United States Patent Application Publication US 2015/0315605 A1 - sequence listing, part 24

SEQ ID NO: 36400 - DNA, 2953 bp, Zea Mays
tctctcgccatctccgtgcggctgctccaaggaaggaaggtccgaccccgccatcgccatccccgcgtggctgccttcccctctcgccatccccgcgcggctgctccaaggaaggaaggtccgaccccgccatcgccatccccgcgcgcccggtcgagcgccaccagccgcataagtctgggctagcgccgccggccaccattggctcggtcgagcacctcatgcccacgacggtcagtcgccgccttcatggctcagagtcgtcggtccctgcccaccaaggtcaccatgggctcgacgacgatggcaacaaggtcaaggtcgtcatcacaacccaaggttcgaggcgttcaaggcgaactctaggcacatcggcgagttcaacaagatgaaagacgttccctacaagctcggcctcaacaagaaaaaatcatcttctacgattcagagaaattatgtgaagcttcaatttgactccatgcaacaggtttagctattgacaacctcgattacattttcacagtgggagctccttcgattattaaccacagttgtgtaccaaatgcagttttgatatttgatggtaggacagcatatgttcgtgcattgcaaccgataaataaagatgaagaggtatctataagctacattgagactgcggcagtcaccaagaagagaaacaatgatctgaaacagtacttcttcacctgcacatgtccacgctgtgtaaagggttttgatgaggatgcactacttgaggggttcaggtgcaagagccaagcatgtgatggctttctgctgcccaactcagataaggctgaagcaggttctatctacaagataatcaaacagttagagagaaatctgtaccatgctttctcaactactttgctgcacacgtgcgaaacactattgaagatatatctggaattacaagattggtggactgcgttgacatactgtagattgacaattcctgtttatgaaagagtttatccaccttttcatccgatgattggattacaattctatacttgtggaaagcttgaatgggactggttcggagggagacggcccctcactctctgccctcctgctgcctgcctactgctatactgttctcttgtgttcatgttcatataaaattcagtttcatgttcatattttcataactgtatatgttcatcttatcatacagtttgggtccttgaactttggaacactgaatccctactactctccccccataaagataggaaggaacacaaaagggtcaaatcaatacccttatgtctccccttctggaccaggctccgccgccggtgccgtggcctgcatcgcatgcccgacgctctacgcctacctgaagaagacagaccccggagtgcccgcgcagctgctggagtacgacgagcggttcgggcagtacggctgcgacttcaccttctacgactacaaccgaccggaggagctgccggcggcgatgaagcacgcctaccgagtcatcgttgccgaccctccctatctggtactgtttctaccctaccagagattgcctattaaaaagtgtttgatcagttcttaacatttgagatgagaggaaatatcgaggagaaatggctattattcattggttgatgatgtagagtaaggagtgcttggaaaaggttgccaaaacagtatctttcctcgcacgacctgaaggttcattcctgctgctgctcacaggggaagttcggatggaccgggcattggagctgctgaatgttcgtccctgcggtttcaggcctcgccactcgaacaaactaggcaacgagttccggctgttcacgaattaagatcctgctgacagacttggtggttgggagcaaagtgatggtgcccccatttaactataaactaatacaatttttgttctagagctgttccatctttatgaacatgttgcatctttgatccacagctcactgatccctccaatttaaattgtagtgacaattatttgaggaatctgtgtgctatgatgtatgattaatcaaacatttacactgttagtgtacctcattttaatttcattttaaaatacactgttagtgtatgtttcattttaatttcatcagtattctttagaatgtctcgttggcttattcagatttatagccaaaatgacattatcttggggatagttcatcagtattttttaatttcattatctcgttcggcggcggcatcccggacgggcacagcctgcacactggcgggcaggtcgtgaaggcacccaccatcgagcagaacctgtcgtgcaaccttgagtagctgtacaagggcatcaccaagaagttgaatatttctagggaaattgttgacgcaagtggctaaccagatggaccagtccctgtcagatttatgcttggttaatttctgctcgcccggtgcaggcgacgcttctccttcagacgctcaaccagtcaagaaggagtccgagagccaggcatggctcggattaggaccgaatgccgtcaagtccaacctgaacctgagctagcacacaacgacacagccaaataagacagcacagcaacctcaccaaagcctttgcaggacgatctgaaaatatgctttgccactagagtaccgaaaccataaatatcctctcgttatcgtgttttagtgttctgtttaggccgtggtcctacgccctcttgtcacatagtctggatgtaaagataagtagccagccatgactgagagaagttttttgggggggggggtgttaacacacggccactctgaattggccatgctaaggaaaatgatagtagtgcaaagagaagtatatgtcttttttctttttctttttctgaaagccagatcgtttggctctagccttgatgtatgcagaacaagtgattgtaatggattctgagtatcctcatcgtcttgctgttgcttc

SEQ ID NO: 36401 - DNA, 4873 bp, Zea Mays
atggaggacgcggtgtcagggctgcgatcttccaactccgccacctccttcgtcgccgcgccggtgtacgacgacgacgtgttcagctcttcggcgacctcgcagcacaacgccagcatcctaggacggcgccagcatctcagtcgcagcgcgcggctgcagcgccgaccgctacagcacctgaccgtcgaccccgtcagcgccgtccatggcagcgacgactctgagttgtcccacagtgaggtcgacagggtccttgcgaccgtcgtgctctccaacccgcgcgagaaggtccatgacgggctcgtcggcgtgacggagttcgcgcatcgtcctctcgccgtctacgacagctacgtcgagcacgacctctacagcttcatcccgctgctcttctacaccgagcaagccaaagaggagcaggtacccgtcgacacgcccaccaggtgttcgatgagagtcctcaactgcagaacctttcctcgacaagggcttcaaggacatccgtccagcctggtgtgtccactcgtgcgtcgccacgatggcaggttccacctctggttcgaaccctccgtgctggtcgcaccgcacaccaggggccgcgctgagcagatgacgctttcctacgacgctgatgccgaagctgacgactactacaatgcgcccgatgtcgagatcatggtgtccaacttcggctccacctccaccctcagctacctcgagcctgatctcatgctacccacgcggtacaggaacattctagcgggcatgctggagaaggccgtctacgaggaaggccatgacctgttcggtgtgctgtatgaatcccgatcgcttgttggaaccattggtagtatcgacttcagttttgaggagaatgatgaattagttgatcgaaaagaaactgtcgtcacctctcagttgcaggaagagatgggcagcaaggaacataccacgggtcagtttcagacactggacaagcccattgcagataacagcagtgcagcggtcgaattcagcaacaggaattgctgggtctcattgattcaaggttcttcggtgtacacgccatatcctagcaatcgagtggagcagggactggttgcaacactacagtccgatgaagatggatgtgaccaacaaagggatggtgagtccctaccagggagcgacaatttgtttgcaagagctgctatcgtcttttcccactggtggagtagtgcagctgctgatgatttcagaggacaacaactcagccgactggtcaatttggctccacgagtgcagcagtctccaggttgtcttcgttgtctggtcttggggctcatggaagagccgaggaggcctcgattcttcaaggtcctcgttgtcgacttcgcgcgacgaatagagatacctcaaggcttcctctgccattttccagaggggagagacaggaagcccggcaccacagcggtggcgtctgctaaagtcgtcctcaccaatgccgagggtagtagtatctggccggttgcgctagagtcgaccgacggccgcgtgtttctcaccacggggtggccaaagttcgtggaggacaaccgtttggggaagggcgagatccttatcttcaagtaccacgggagaatgcgtttcgtggtctcgatttttggcgtggatgccgtcgagaaggcaggtcgctggtctgcaaggagtggcgcccaggccgcggagaaggtaccatgcaacgaaacactaaaggggatgaacacatttcatcccagggcacagctggtttccttgactcacatgaagtagtttgctccaaagattacttggagacgtacttgtcagaggagacaatggaggatgataaggctaaagcagtagcggaagtaatgaagactttgcgtgttgacaaattgacagtagacttattctgtgctatactctgtttgtgtgaatggaaagtcgaggcagctgcagaatattttaatttttgtaggggcaaaccacaaatcccggaaaaatctctgaagcagaaatttgtttttcagtttgactttgtaaagggacaactacaacgcttcttccctgaagattatgattctgagaaaatcaagaagaacaatattgagtcacctaatttgtctgatcaaccactacaacgtgaccttatagtggcgccggtgaaacgaaggctagttgatgaatttaaatcttgtgacttgtctcaccgacagaagagaaaagttaagttgcagggaaactcactgcaaactcagacaccaagaagatcaccacgattggtaaacgtgaacaatacttgtaataagaacaaaaaagtgtcgaaaggaagagccaaagtgctgaaaacaccaccagatgcaacagatcaggtgaaggatagagcacataaatcatgtttgcttgatgagaaactagataatgccttgaaagctgttcatgaagaagcgacaggttccttatctcaggatctcaggaaactggattccccacggtgtgaggttggcttaagtaaagagcatggacatgatcaaggagatactggaaaaatgttggatgaagtcagtgatgtagaaaacagtaaagaacatgtgggaagcgatgctatggggaattctgaatcatatatgagtacatactgtgtagagccattgccaaccaactctaggttgacagcatattcaagaataaatgagctatcatttacatggaagcactcacaacatgccagttcccttgagaaagttttacttgacattcaaagagataacttcgtgaacaccattgcacgcatccagaaaatcgtccgggatgatccttcagatgtgcttagtgcagatgtaattgaagccactgtacagatagaaattcttaaatggggtttatgccttcaggacaagtgcgcccacaagatagtaaatacaatgttggattatgctaaaaaggtcaaggggagacacaatttcaatactgagatgaggaaggaagagttctctgcaaagctgcaggatctcctgaagtggcagcttaaagaactagaatttaaatacacttccttggaatcagattacaagaaagcaatggctgatgctagcaattttttctcgacatttgaagagcacaggaaaaagttgcatgccattaaggacggtatcaaggacctgcagcaggcctgtatgactaaggacgatgaaatgcaaaaattggcacttcaagtcgctgagcatgcgaccgcatatcagaagtctataatggaaaaggttagggtcaagatggctctgaagagccatgagcagactcttggttacataaaagagcagctagcctctgcggaatctggatcaattgatgtaggggcattggttaagatagagatggataatatgagtagggagattgaactctccaagcaaaatcttctaaatatcaacttcaagaaagagtaaagaaggtgtaagtgtttgcttgaaaaccagattaggaatgctgcttatgtgctataataacctagctatcatatcaattactgcgggagtttgattagatatagggggtgtttgaatgcactagaattaatagttagccgctaaaattagttgagacatccaaacaccctagctaatagttcaactattagctatttttagtaaattagttaatagttacataattatttgttagctagctaatcccactaataatttttagccagctaactattagttttagtggattcaaacaccccataatagtttacatgacatacaaaggttatagaatgccccttgttgttcatgagctgcgggtaagagccacggcccatgggtaaaagccactcccaggaacgcaattgactctacattcttgattgtgtttagtcgatgtgccaccacaattgtggtcctccctgacattattcgatcaagagcctagcaattgctctgactgtgcatcaagcacacttgttgcttcatcaagtagtagtattgagggattccggattattgcccttgcaattgcgattctttgcttctgccccctgagagctgtataccgtgctctccacaatcagtattttttatggagtcattactgtaggtgaactatgtacatgttacatgtacatacggtatatgtttacagttgttgcagccagttctgcacctgttcagctagcaatggcttcaatctatggcagattagtatcatttctctcctaaacatgtctttgcacgcggctattgttggcgggatattttcaaatatctagctgttccggtattttcatatgcaccaagtcatggttatgatgacctctattttccaaggatttgccaattgaagcctcattcatcgcatcgcaaggagtcgatcagaggtgcggggtggcgtgactccaattatctgccaacatcttcgtacgaagctgcaccgcaagaacaagtggacagttttctcctccctttgtcggatgcaattttcacatgtgaacaattcaagatccatgttctttctccttagcagtgacctagtattcagtccagcttccaatagaagccagaagaacactttttgttttggttgacatttcgatgcccacaaccacatgtatgcggggtgtgctagctcttctgcaatcatgtgtttatatgtttttgtgacgaaaatttcagatttccctagatatatgaccatgtgttagtttgaccaatggttggttgtccttgcaaatgggtaatgaggagttggtattgtgggaaagctgtcacggacatgggtgtgtagaacatttgttgagggtgttcaatagcctttgcttgtaatattgttatttccttatgaatggcatacgacaacagttctgaataca

SEQ ID NO: 36402 - DNA, 4129 bp, Zea Mays
cggcaggccagaccgccagaccggtcaggagcagagcacccgaccgcctttcctcccccgcctggccgcctgccaccgcgcgccagatcccgatctcgctgcgatccatggcgtcgtcgccgcagccgccgccgccgttcgccgcgcaaaaccctaccgcgcagggctcgggccaggggccgccaggctccggggtgggggctctccccggggcgttcgccaacctccagatctcccgcggcgcggccccgccgcccggcgccccgcgggggctcacgccgcagcaggcaccgcccaccttagccgcgcgtccgggccccccaccgtccgctgcccgtcccgccttccctggcagcccgcccgcaccgccattcgtgcgggcgccgacaccgtcaacttccgcctcgccgccctttggcggacagcctggggtaatgtcccagccgccgccaccgttcggagggcctccaggtgcgtcgtctcagccgccgccgccgttcggtgtcccccccggggtggtgtcccaggccccttccctgtttggaggccctcctgcgacggcatcgcaggcgtcttcgccttttgttggtcactctgttgctgcgtctcaggcggcaccattcggtgccccccctgttgcgggttcgcatcctccacccttcggtgggcctcctggagcggggcctcagccagcaccgccattgcggcagacattcgctggccagcctgggccaatggccgcagcggcagcttggacgcagccacctccacctagctttggagccccgcaacagcctccaccaccattcggttcgcggccagctgggcagccgctctttgctacacaatcagcgcctgcggcacaacaactgccattcatggggccacccagggtaaatgccccggcgtttggacctccgtcttggcaaactcagggagctgggtctggtgcaatgcagccacctttgagaatgccaggcattcctggtagcatgcagccaaacacactaggaccccctggcaccccgactataccttattctccacatgctggaacccaggtatcaaccccgtccaaaattgatcctaatcaaattccacgtcccatgcgtgaatcatcagtcatcatttatgagacccgtcaaggtggccaagcaaccattcccccggctgcatctagtgaatttattgtgaaggacactgggaactgtagcccccgtctaatgcgctgcactgtgaatcaaataccatgtactggggatctcttgactacttcgggcatgcctttagctctgatggttcaacctttttctcttcctcacccatctgaggaacatattcagcttgtggacttcggagagatgggacccattcggtgttctcgttgcaaagcgtacataaaccctttcatgaaatttgttgaccaagggaggcatttcatctgtaacttatgtggattcagaaatgatactcctagagactacatgtgcaacttagggcctgatggtaggcgacgtgatgctgatgacaggcctgaattgtctagaggaacagttgaatttgttgctacgaaggaatttctggttcgtgatccaatgcctgctgtatacttcttccttattgatgtctctatgaatgctatacaaactggtgcaactgctgcagcttgcagtgctatttctcaggctatttcagatctgccggaaggtcctcggacaatggttggaattgcaacatttgattctgctattcacttctacagtcttaaacgtgctcagcagcagcctttgatgctcatcgttcctgatgttcaagatgtatatacacctcttcagactgatcttattctcccagtttctgagtgccgggacaatctggagcagttgctagaaagtatcccaagcatgtttgagaataatagggttgctgattctgcttttggagcagctatgaaggctggcttcctggcgatgaaatctaccggcggaaaacttctggttttccaatcagtgctgccatcacttgggattggttctttatcagctagggaagctgaaggtagagcaaacattacaactggtgacaaggaagcccataaacttttgcagcctgttgacaacaccctcaagacaatggcactagaatttgctgagtatcaggtctgtgtggatgtattcctcaccacacaatcctatgttgatattgcttctatatccgttgtgcctcaaactacaggtggccgggtctactactactatccgttttctgctctttcagatccagccaagctcttcaatgatctcagatggaatatcagtagaccccagggttttgaggctgttatgcgtgtaaggtgcagtcagggtctccaagttcaggactattatggcaatttctgcaagcgtgttcccaccgatattgatcttccagcgattgattctgacaaaactgtgatggtcacgtttaagcatgatgacaagttacctgaaaatgtggaatgtggcttccaggtctacctcgggctatgctgcgttccttggtgacaacctgattttctggtcttccaagcgtcagaacaccttctcgaggtctagtgctgaagctgagtatcgaggtgtggcgaatggagttgccgaagctacgtggctgcgccaactcctcttggaactccatgccctctccgtcgcgctactctagtgtattgcgacaacatcagtgttgtctacatgtcttccaaccccgtcgagcatcaacacaccaagcacatcgagattgatcttcactttgtcagagaacgagttgctgtcgttgatctttgggtcctacatgtgtcgacgacatcatatgtgcacttctctatactactgtatatggacaaaggaggatccgagtcataaacctttcactttcatgcacaaatttgcttgccaatcttttccggtatgctgatttggagacacagttttcatgcttcctgaagcaagctgctaatggcatcccgacatctccattacctcgtattcgggatgaagcaacaaatacatgcataaatattcttcaatcttaccgcaaacactgtgcatctgtaacttcatcagggcagttgattctcccagaggctctaaaactgctgcccttatatactttggcactggtcaaaagcttaggcttgagaaccgatgggcgattggatgaccgttcctactggatatctgtagcctcgtcagtttctgtagtactagctgttcctttggtgttccctagattgattcctatccacgatctcacatcaagggatgacgatgattctcttatacccagtccccttatgctcaatagtgagaatgtacaagaggatggagtttatttattggaaaatggtgaggatggtttaatttatgtaggaaacatggtaaatccggctaccctggaacaaatattcggtgtctcttctttggctgcattaccagcccagttggcgttggagcaatttgacaacgaactctcgaggaaggttaacgaagttgtaaatgaaataagacgccagaggtgctcatacttgaggttaagacaatgcagaaggggtgaaccatctggtgattttttccggtcatttttagtggaggacaaggcgcctggcgtcttctcctacgtcgagttccttgtgcatgtccacaggcaaatccaaagcaagatgacctgagggcccaagatcctggttgtaacatttcggtcagtagatggattgtatgtaccccgggagtttgatttctgcataaggagacagcaaagtggcgattccatatcaatgtggagcataaagagtgctcggataatagaactcaggaatagaggcttgtggtgtttacagcaccgtttttggagtgggtggtatatgtgttgtatacagagatgagaggggtggagctttagtttttgtgttgtcttttatcatcgtgcatccttgtttatctcatgtgcaaaaagtgttggattatgttggttggaaggttatagaggtttcgtaataaaatgcacctagctaatcgatagtatgaatcagatatactataatttaactattatgtttgcctattcgaatttaaccctgtgatgatgttttgtgatt

SEQ ID NO: 36403 - DNA, 165 bp, Zea Mays
gtttcctgccgccgtcgatcgtcccggcgcgctgctctttgagggcgccataccgccgtcgtaggtcagtttgagtgcatttgcattcttgttctctgagttggttcagtacaaccagactcaagttgacagcattactgagctagaacggagggcactcttctt

SEQ ID NO: 36404 - DNA, 3116 bp, Zea Mays
caaaggcgaaagccgggcacgcacacccaccccacagatctccctcctctctctgcccgtgctgttgctgtccccgtcgttcgcgctcgcccaagtcgtcgcccagtcgctgcgccgctcagctccaaagccagcagaaccgcgcaagcgcgcgcgtgtccctcctccgctcctccattccgcgccgctggactggacgcgtcgctgtgcggacttcttgcttgcgccggctgctacgggcacggtccacgggacctgactggcggctccgggccgggggaggcgagcgacagagcgatgcagaggcaggggagacacctggagcggtccaactcgaagcgagccctcgaccatggcggcggtggtgacgacgacgaccgcccgtctaagcgcccgcgcgtccccgccctcgccagtgtcattgtagaagcactcaaggtagactgtttacaaaagctttgctcatcactggaaccaattctgcgcagaattgtcagtgaagaagtagagcgtgctttagccaaattgggccctgcaggtcctgctaggatccaaggaaggggctcacccaaacgaattgaaggccctgatggtagaagcctccagcttcagtttaggactaggttatcccttccgctctttactggagggaaagtagaaggcgagcagggagcagcaattcatgttgtgctgcttgatgcgaacactggacatgttgttacttcaggacctgagtcatctgtgaaactggatattctggtgcttgagggtgattttaataaagaggaagacgagggctggactgaagaagactttgaaagtcacattgttaaagaacgagaagggaagaggcctattttaactggggacctgcaggtaacccttaaagaaggtgttgggactataggagagcttattttcactgataattccagctggataagaagccgaaaatttagacttgggttgagagtctcgtcagggttttgtcaaggaattcgtgttatggaagcaaaaacagaggcttttactgttaaagatcacagaggcgaattgtataagaagcattatcctcctgcactaaaggatgaggtatggagattagaaaagattggaaaggatggttcattccacaagagattaaactcaagtggaatctatacagttgaacactttcttcaattccttgttagagaccaacagaaattaagaagtattcttggcagtaacatgtcaaataggatgtgggaaagtcttattgagcatgcaaagacatgtgttttgagtggcaaccattatatatattactcaagtgatgcaagaaatgtgggtgcaatattcaacaacatatatgagttcactggtttgattgctgatgatcaatttatttcagctgaaaatctcactgaaaaccagagggtgtttgctgacacgttggttaagcaagcatatgctgattggatcaatgttctagaatatgatggcaaggcgctattaaagttcaaccagaaaaagaaatatgttacaactagaagtgaaacagcgaaagcttcagcaagctaccctgcatcaaacggtttagtgaactcacagaaagaactgcctggaggtcctgtgaatgctgagcaatcttccctgaacaatgctagccaagatagaactagaatcccatccatgtccatggggaaccaggtagcaagagagtatgcaggcaatcctcagcacatgacaccaagtattaccatgcaatgcgacacgaggtcattgatccccggaggccagttcagtggtggttcctccgtgcagactcaaacttcacgaagctccaacatgcttgcgctgcggccaacgcagcagcctcaaaacttggacttctctgggctaggtcagtccacacagccttcagggaccaaccctttcgccgactggtctcggttgcaggagagcagcgtcgatgagtacttgatggatgagataagggcgaggagccacgagctattggagaacgatgagatgcagcatatgctgcggttcctgagcgtgggcggggcgccgaccggcctgaacaacgttgacggctttctttcatacccgtctcctgccccagccttcggatttgatgaggacgaccgcgctcgctcgtccggcaaagctgttgtcgggtggctgaagatcaaggctgcgatgcggtggggtatctttgtcaggaggaaagctgccgagagacgggctcagcttgttgagctggaagactagcagtcgcaggtgcttgggctcggtgttgcacatatttatgcggaagggttactagaactgcaaaatattgtataatacgcttcccttttggctgatctttttaatttgcacaatagccccgttggtattgtatattactgggtacagacgtacagtacatgtacatgggaggacgatcaggatcggggcttttttacgaatgaagtcacgttggttgtatagaaaaaagaagatcaagcggaactttggcaggaagattaagtatgcttgtaggaaggctctggcagacagccagccaagggtgagagggagatttgccaagatcgaagaatgcgacttgctgctgctgaattcaggcacttatatggaggttcaatcgatcattcagctgttcaaaatccacctcctctacccagccgttttggtgcgagccgagggagtgaagagctgaaagtggtggtagtctagttggttagctagcccctgtacaaaggcttgaatgaagatggcaataaaactcagctctcccctctgcttgcttggcactgcactccttgtgccttaatgaaaacaagagcaaaaacagactcatgaagattaacaaatttcacggtgtattccttcctttccttgtgccttactgcaccacaatcaatccaactcaaaagtaataggtgacagtagctactttattacatcctgccttggtctgtcggcaattatgtgaaaactgaaaagaaaaaaagcaaacctcaagagatttagtcgctggttaattcaccccatagacccacttctccgcattgctggtataagagaccagctccttgggttcaaaccacaaggcgatctcatccttt

SEQ ID NO: 36405 - DNA, 1694 bp, Zea Mays
ccaaaattagggtgagcagctgcgccaaaagcctaggccccggtggtgttcacttggccgccactgccggccacggcggcggcggcccatccctccctttcccctcttctcccctctctctcttccccgccccctctgtctcgacatcggtgccgtcatcttctcggcctcccgccggttggatccatcgggcgctggtcggatctgcctttcggtcgccgttgcccctccgccacgcctcgcgccagccggtcctgctgagcgccggcctgatccgcctccctctagtcggatctgcttggcgtcggcctctcgccgctactgctccgcatcctgggcttcctcaccgatgcacgatcctggcaccacgccacgccggtgtgctaccggctccttgcggcggagcggaccacatggtctgtgctcacgctgagcagggacccacgatcgctcgcgttcctcatcattaggccgactttctacttctcgacgctggagcagcttgacctctcactggtgtcgtcgtcgcctctcgccggccggtcgcgtctcgcggtgccaggcgagcggccctgttgccattggctgggtaccgttgacatggccgcccccgctggctcgcatcgccgtggctggcacacgtgacgacaggggcggccggcggtggtggctaggccctagccgctgctgcatgcggtaggcttcggcttcaatggattcggctccccttgggccctcgtcgcctcgccttcagggtcgtgcactcgtgccgccaccgtcagcccccatcgccgtctctgggcccctgagaggagcatgacccgagcctccacccttgtcgccaggagaacggggctactccgccacctcggcttccttaagggccgacctagcacccccgccccctcgtcgcctccacatcttcaaggttgtgccgccaaagctggcctccatagcctgcactggacccctgattggagcacgacctaagcctccatcctcgacactgggagtttagggctactcctgtcaccccggctatccttggctgctgttgtgttcgttgtggcattgccgctagcatgagcagggtttttggggtctcatacgaaagccatgccaggtgtagtctgcacagacaacagcaatgccctcgacgccgatgacctccttggattgttgtaaggttctcttgtgtcgttgtgcttggcactggcgttccagcctttgtcgtggtcggtgaatatccgcctctcctgccattcacccatgaggatttctcctcaagcggcgttggatggtggcattagagcccggatgcgccatcgggtgtttctgttttctcgaaaggagatcgtcgttttcggtatgttatggtcgctatgcctctgacctcctttagcccctgttcgtggccataagtcaacgggacacgcgtagctacaaggggaggtctagatgagcaaaggcctaggtttgtcgacgagtatgttatttttagtcgaagcgctagtcgtcgttcgacaattgtcgtttcaactgctttaacatgcgacgtgttgggtttcctttctttgtttcccctgtgttgttgaagtatttgctgtgttgtgctagcacttgtttgtaatctatggtctaccacaattttatatagtgctttgcctcgtttctctaaaaaagaggttgctttc

SEQ ID NO: 36406 - DNA, 1552 bp, Zea Mays
ggcaactgaaaaaacgagagagtcgttcgttttcatccctaccggccgcctcttctcctctccacctctcaatttcccaaattgaatcctcctcctccccgcctagggttccgattccgcaccgtccgagaaccacccaagcggcggcaactgtcccttctcgtcggccaccgccgcacaactcagttgcttgttcagccgctccgctgccgacccgcctatcgcctgagcgtgtatcgtgggtccttccgcttcacccaaccacgaggaagttcttacggtgccacggagttgcaactgcacaaaggccttttgtggtcacaaagggtgctattgtgttacaacaacagttctagttgaagtaataagacattttttaaactgtctgctacattgcttccatggcaaccaatgagaacctcccaccaaatgtcatcaggcaattggctaaagaactgaagaatcttaatgagtcacctgcagaaggaattaatgtgactgtcaatgatgatgacttcactactatttttgctgatattgaaggccctgctggaactccatatgagaatggagtgttcaggatgaagctattattgtctcatgatttccctcaatctcccccaaaaggattcttcttgacaaaaattttccatccaaacatagctactagtggtgagatatgtgtaaacacactgaagaaggattggaatcctagccttggattaagacatgttcttctggtagtgagatgccttctggtcgaaccatttcctgaatctgcacttaatgaacaagctgggaagatgctactcgaaaattatgaggaatatgcacggcatgcaaggttatacactggcatccatgccctcaagaataagtccaagactggagctatatctgagtcgaccacagctctgaatgtcgacaagtcaagcactgctcccaacgagaacgcaccatcgatgccaccggcaatacctacctccgctgcatccagagcacttggcacaaatttgcaggatcagagccctactgtatctgatcctactgtaggagcggcggcggcggcggcggcacgaaggaaggatggcccaatgccttccaaagtacctgttgataggaaaaagatggatgcacggaagaagagcttgaagagattataggcggaaccttcatagtccagcatttaaatctgtcggaaatttagcagatgcctagcgaagctgggagagagacaattagttgggaggcatctgatgacctggcttccgggaggtaggggtcctgggctgggacaaaagtgaataatgtggcctgggtgagtccttcgggacaactgtatgtgcaatgtccaatcatttggaagaacacctgcctatttccttctgtcctctgtattttgttagcttagcggtagtgttagctagctcataggggcaattccctgtctagccatgggctgctgctccgtactctgcttgaataataatttgtccgtgcaattacagctattgttttgtttggaggaatagttgcctttttctgttgattc

SEQ ID NO: 36407 - DNA, 3358 bp, Zea Mays
ccacaacaagacagcgctgaaagggtagacgagggttcccgggacaattatttgcggatcatgcatgctccacgcttttggatttaccctgttgttttctccaaagtgagattttagtcccatgtcccttcgtacctgatcctcttgcccccctcgtgctcatatagagaattatgcggtcaaacccatctcagctcatgctcgggtctatgttctaattttgcttcttatgccgatagttcatggccaagtcttaagcacgtatgatgttgagctggaggatgggctcctaaagaatacccaagcagtccttcggagtcgggactagacatgaagtccatgctccaggtttggggcatcttctgctgtgtgtgttcctgtgcacttggacaaaatacttctgcgcggcccagtgtcgtgaacgttggagctctcttcacgttccactcgacgattgggagagccgccaaggtggccatcgctgctgcggtcaatgacatcaacagagatccaagcgttcttcaggggacgaagctggttgttcagatgcaagataccaactacagcggtttcatcagcattgttcaagccttgcaattcatggagaaagacacgatcgcgatcatcgggccacagtcttcagtcgttgcgcaccgaccagttccagatggcttccgtggctgcgatagttgattactacgggtggaagatggtgacagccgtgtacatcgatgacgactacggaagaaacggcgtgtcctccttagacgacgagcttgccaagaggagactgaagatcctgtacaaagctgcgatcaggccaggggcaagaaagagcgagatggccgccgtgctggtcaaggctgcgatgatggagtcccgggttttcgtgctgcacgcgcgtgacgattctggaatcgacgtgttctcgctggcgtacaatctgagcatgacatccggtggatacgtgtggatcgcgacagattggctcaccgcgtgcctcgactcagctcctcgtcttggaactggattactgaacacgatgcagggtgttctcacgttgcgtcagcacacggagaacaccagtaggaagaaggcgttggtttcgcgatggagtgaagtggcgaaggaggaggaggaggaggacggcggcagcttgcccaatacctatggcctctatgcttatgacactgtctggatgcttgcccatgggttggatgcgtttttcaacagtggcggaaacatttccttctctccagaccccagactgcgtgcggttgtaggaggagctctgaatctggacgcactgagcgtcttcgacgaggggacgctgttgctagaaagaatccgcaacgtgagtttcatgggtgcgactggccctgtaaagttggactcagatggtaaccttatccagcctgcatatgacattgtaaacgtagtagggtctggtttgaggacgattggctattggtccaactactctgggctgtccgttgtgtcccctgagactctgtacaagaaaccattcaatgtcagtgcaaaccaggagctccacgctgccatctggccaggcgagactgtaacgaggccccggggatgggtgttccctaacaacgggaatgagctgaggattggagttcccgacagggtaagctaccgtcagtttatatcagtagacaatcaaactggaacggtgggaggtttctgcatcgatgtgtttgctgctgcgataaacctgctgcagtacccagtcacatataggtttgtgccttttggcaatggccgtgagaatccaagctacacggaacttatcggtcgaattctgacgaatgaatttgatgctgttgttggggatgtagctattgtcacgaatcggacaaaagttgttgatttcacccagccatacgttgcttctggcctcgtcatacttaccgccgtcaagacacagagctcggatgcatgggctttcctgcagccgtttaccatcagaatgtggtctgtgacaggggtgttctttctggtcgtaggagcagtgatttggttgctcgagcacagaatcaacgacgacttccgtggtcctccagcgaagcaggttattactgttttctggttcagtttctcaactctgttctttgcccacagagaggacacgaggagcacgctgggccgcgtcgtggtcatcatctggctgttcgtagtcctgatcatccagtccagctacaccgcgagcctgacctccatcctcaccgtgcagcagctgacgtccccgatcaagggcatcgacagcctgatcgccagcgacgagcccatcgggttccaggttgggtccttcgcggagagctacctggtgcacgagctgggcgtctccccgtccaggctcaaggcgctcggcaccccggacgagtacaagaacgcgctagagctcgggcctcgcaagggaggcgtcgtggccatcgtcgacgagcgcccgtacgtcgaggtcttcctggtgcagcacgacaagttcgccatcgtgggcgcggagttcaccaagagcggctggggcttcgtgagcgttcccgcgtgactcgcctctggccgtggacctgtcgacggcgatcctggcgctgtcggagaacggcgacctgcagaggatccacgacaagtggctgtcgaacgggccgtcgccccagtccacgaccgacctggagccggaacggctgcgggtgcagagcttctcggcgctgttcctcctctgcggcgcggcgtgcctcgcggcgctggccatccacggctgcatcctggcccggcagtactccctccacgtggcgtcccagccgccggacgcggtggccacgggggccgacggcgccatccgccgctccagccgcagcagcatccggtcgttcctgtccttcgcggaccgccgggaggcgcagtgcccgagggggagctgcaaggaccccgccgcggcgctgggagggtcctccagcagcggcgtcagcagcttcacgtcaagcaacgccagcgtatcgaggtagccgcgtccgatggaccggcatacgcacggcacgatacgtcgatgcctcagcacagatagtccacactactgtacgtgcgcgtaggccgtagatgccggcgtgtaaatggtcgtatcgtagagacattgattcgattttgctaccgtctggggtccatggtgcagtgaatttggatccccgtgtgctgaggaattgtatacgtacgagtaaagcagcgcgcatggggggcaggcgggcagggcagtttcgcggccttgcagttgcagcacacgttgcggagattaatgtccgatcctaggcatttgattaaagaacactaccagcctgcgtacataaac

SEQ ID NO: 36408 - DNA, 2116 bp, Zea Mays
gctaccagtggcatcctacgcggcagaggaatagccacgccaccacgtcccccgcgcccgccgacccacccgcaaacgcaacgcaataataataggctaggcagccagcagccaccatccccaccagcccagcaccaggaaggaaatagcggcgagcaagagctggcggaaagaagaggaaagccaggcacgccgctcacccaccgcgccaccaaccgcagatcctaaatccgatctctctctccctccctccctccctcccgctcgaggttttcggtttcgatccggcaagcgggcgagatcttcatggcgacgtcgttcgaccgctgggagaaggaccccttcttcctcgccgccgaggaggtccaggaatccgccgatcggatggaatcggtttatcgggtatgggtgcaggagaggagcgggggcgattccgaggcggcaagcgtcactggaggccctacagctgcgcagcttcgccgcgagctgcacacggcgcttggtaccgccaagtggcagcttgatgaactggcgcgggcagtcagatcgaacgatctggttatgtcagcaggaaaagacacaagggctaggcatgatgattttgttacagcaatcggctatcgcatattagaggtcgagaactacttgaaagaatccaatcttgcggacgggagggggccattgagctgggttcacttggatgaggatgaaagggacgaccttgcagcttttctatctgccagtccttttcaacagaaagacaaagtggtcacaattccttcagcaggtgacattgaagtgggcagcaatgcagcaaggatgaaaaatgatatatcaactgacagctccaaggattcagctggttccacggatttgatttcaggcacagcaaagcaagatttgcatcgtgggcacagaagagcagctagtgccagtgctgatataggctcatggagcatgtcaatccctaatgaatgtgaaggaactacagaacagttatctgatggctcagacaaattgcctttgcataagatagtgaaaacatgtgctttgacaagtaccttgcaatctaagactagaacgaagtggaaaaatggagctgttaggtgggcaggcagtaaccaacaggatgttgaagaggctatccctctgaatacttctcagttgagtcagggcttagaggaatgctttgaaaggaacaagagttgcttaagtacatgtgatgagcatacatacaataagaaacttcatggttggctcggagcccttcgtagacaacttcaaagcctcacaagatcagcagcttgtatggtaaattcactggcagttaagttactcttggtcaacttgatcctgaagcatgcatatgaggcaactatggtagaccattttggtagtcaaggttcaaaatcacgtataatgatctggttggggccacttatcttgccacatgttcagggcaggctgcctcgtccttggaagaacatctacaggacaatccttgcagcacggttgcttcgccacacttggatatgctcccgaatggtgccttgaacaattgatgcacctcgagaactcaatcctccgtggtgagttggtgactgggtggcacctatgcaatggcccagtataaattagtggtgcagtgggctggcgatcatgctgctagcaaccgaaattgcaagacttgtatcatacatcaacgctattgcttttaccgcctgacacggaagggtggtgatcatgcatcaatgctattgcttttactgcctgacacagaagggtgtcattttttttttgtaggagttgccatctgaactgtagagctccataggggataggttctgatcggaatgtgaatggcactagaaaattacttttactgtatctgcttgtgttgtcaagaaccgaatgaggtgcctggcagccttgtctgtaccctgtacactaaaattggagaatgttgaagccctcggcagtaatcggctggacttgtaaggtgccagtgtgtgttgagcctgcatattacggctaaattcggtgaagattatagcactttactgtgcatcctaatgtcaaagcccccaaccaatctttggtattccaaaccccgaag

SEQ ID NO: 36409 - DNA, 1412 bp, Zea Mays
ctcggttgctcccgttgtcctctccgcggggcgcggcctggcttttcccttctcggcttctgccgttcgcgtgcggccgtgcggcctctctctttctttcccagcgccaccgccgacctagccaggtgaccaggtcttcgtcaggcccatagccagcgacgaacacctaagtacccaacagatgagttcgaagaaggttccgtaccacaagcatagggaggctgaggaggcgaggaagaagagggaggaagatgaagcagcacgtgtatatgcggaatttgttgagtccttcaaaggtgatagctcatctggggctaagtttatccgaggtggtgtgatcgaccccaatgcaaagctgaagactgactcggaaggtatgttccatccttcttgccaccatcatttgcaaaagagcctgagaaaaagaaggaaggggagaggccaaaggaaaaggaaaagggaaagccacgagtaatagatagattcttggaggaaatcaagcttgaacaagagcagcgagagaagcgccatcaagatcgagatcaccgccgtgaaggtcgccatggcgatagctccatgtcctcgagccggtttgatgaactaccagatgaatttgatccgactgggagatttccaggatcatttgatgatggtgatcctcaaaccaccaacttatatgttggcaatctatctcccaaggtcgatgagaattttcttttgaggacatttggtcggtttggacctattgctagtgtcaagattatgtggcctagaacagaagaggaacgcagaaggcaaagaaattgtggttttgttgccttcatgaatagaacagatggacaagcagcaaaggatgaaatgcaaggtgttattgtgtatgactatgaactcaagattgggtggggtaaatctgttgctcttccgtcacaggctttgcctgctcctcctccaggacacatggcaatcagaaataaggagggtggtacagctacagtcatactttctggtcctggtggccctgctgttgcatctattaaaccacaaacctcagagctggtccttacaccaaatgttcctgatattgtggttgctccacctgatgatgggcatcttcggcatgtgattgacacaatggctctgcacgtacttgatggtggatgtgcttttgaacaagctgtaatggagagagggcgaggaaatcctttatttgatttcttgttcaatcttaaatctaaagagcacacatattatgtttggaggctatactcatttgcccaggtacttgttgctgtctatagtacaaaattttaaagtgacatttcagtattctaatgcagaatatctccgttctttttattcgttcatatttgtcattcttagaagactatcaaaagtattatgcttcacttctg

SEQ ID NO: 36410 - DNA, 1553 bp, Zea Mays
ctatcacctaaaatctaggatatattattccccccaaaacaaaccctaaccggccggcccaattctcacgcgctcgccgcctaggagcattcacgttggcggcgggcggcggctcggttcctctcctccaccgcacctccaagaatccacctccacgactgagctgacggctcggtagcgccatggcagttcaccggctccaaccttccccatccggcctacagtgctccaccgcccggtcgccagtgctcctccatgggccacggctgacgggtgcacgcaccgggcgacgagcacccaccaccggttatgtgcaccctctctccttcggtccttcctccctttcttccgtgctaagccaccgagcacccaagcggtttggcctgatgccacatctctggtaggagaggtggatttggtggacctagattcgatgtgcagagagcgacttggaggtggctgacatcttcaagcactgcatcatgcagttacaactactgttggccatacagggaaatgctgggcctattataccaattgttcaaagttatttttccagcacttgacattcgagtgaaaaatgtcgcagggacatattctcttgaacataaaggagaaaatgatctcttcgcacatcagacaaggcttctactctttcagaagaaagtcatttttaggagaatcgtgaacaaaatgaccagatgtttaggcctggttggaaggacatttttcgaatgaatcagagtgagctcgaggctgagatttgaaaaggtctctcgagattctactcttgatccaaggaggaaggcctatctgatccaaaatctcatgaccagccgttggatagttgctcagcaataatcaccacaaccaagcgtcgaaggacataatggatgtacacgatgacctggatgtgttccttcgtaccgagacccagggaaacaaatatttgggctgtgagcattacaaaagaaactgcaagcttgttgctgcatgctgcaataagctattcacttgcagattctgtcacgataaagttagtgaccatacaatggacaagtaactcaagaggtccacttattgactcttatgaccatgtaattggtgttaatacaactacattaacatgtaaagatctggaaggtcttgatggtctaatacctatctatgagtacggaagaaaaggcgggagaagtcggtctctgcagcatcgcgcgtgaaaaaaaatcagccaattccacgagcattgatgttgtcatgacttcaaaagaggagagaccatgctaagaataatgcattatgacatttgtcaggcttacatatcgactgtttgatatggatagatgtataggtttatgaccaatccagttcaaagcaattggagtatagaagaaataaggagaaacaggaaagctctgtacatcttgcattttgctgttgtttgtcgaagtttcaatgtctgtcgcgtgacaaaatatagttgtaatttatattttggcatgcacgaaacaggtgtatttattcatttttgaacgaaattttatgtcaaatcc

SEQ ID NO: 36411 - DNA, 1208 bp, Zea Mays
ttgcaggttaaggtccagccgaagaaggttattcaaccgaagaaaagtacacaacctgctaaacaggagtccagtgatgacagcagctctgagagctcctcagacgatgaaccttccaaaaaaccagttgccggttcaaaaaagcctcctgccagtagtagcagcagtgatgatagcagtgacagtgatgatagcagctctgatgaggaaccagcaaagaagcccacggtcctttcaaagaagcccactgtcctttcaaagaagcccactgtcctttcaaaaaaacctgtcacagcagtcagtaatggttcaaaacaggttaaacctgatagcagcagctctgacagtagctcagatgaggatgaaaaacctgctgctagcctaaagaagcctgttgttgcctctgtgcaaaagaagacccaagaatctgatagctctgacagtgattctgatgaggatgaatcagaagataaacctgctgctaacctaaagaagcctccggttccctctgtgcaaaagaagacccaagaatctgacagctctgacagtgattctgatgaggatgaatcagatgatattcctgctaaagctcaagtagtagccaagaaaaaggaagaatctggtagcagttctgattctgatagtgaatttgagtctgacgatgaggatagcaatgcgaaaacagtacaacctgccaaggctgctgctattaaaaagaaggaagattctagtgagagctcagaaactgactcacagtcagattcagaagattcagaatccagcgagaaatctgatgacagctctgatgagagttctgatgaaagtgatgaggaacctccacaaaagaaaactaagaattctgcaccttctggtgctgcaaaggctgccactaatgtttcaaagaaaaaaagcagcagtgatgaagatgatgaaagttcagaagaaagctctgatgatgaggatacagaacaagttgaaactaaggaaacttctgtagtcactacccagaagccggcacataatgaacctaaaactcctgccaaaagccaaagtcaggctactggttcaaagactatttttgttgggaatttagcctacagtatagagcgtgaacaagttaaggaattttttgaggaggctggtgaagttgttgatgttcgtttggctacttttgatgatgggagtttcaagggttttggacatgttcc

SEQ ID NO: 36412 - DNA, 1875 bp, Zea Mays
ctcttcctctcctttcccgcttcccaccagctcgcgcccgccgccggccgccgtctcgcgcaccccgctgccgccagctcgagcgccccgcgccgccactgcgcgccctgccgccgccaccccatgcgccccgctccgccagcccgcgcctccaccccgcgtgccgcccgctcgccagccccacgtcgcctggcctcctccgagcccgacgccgacaaggcggcgctgctggcgttcctctccggcgtgggtcacggcgccaccgcctgtccgcgctcgcgggcctccacctccaccacaacgccttctccggcgcgctccccgccgccctcgcggggctgaccacgctccaggatgtttccaaaaaggtgtctagatctgatggggtttccactgagagatctactagattgaggtttagccaggatcatgctgccaaatcaaaagcaaagctcaagggtgctttctctttacttggactgaacaatgacaccttcaaaggtaaaggacctcatacctccaaaaggcttcagttgaaggacctgtcctggagatcaaaggatactactatcaatgtgaaagagaaccatgatcaagagacagtgcatgaggagaataccaagtcctgtgaacatgaatatgggagttactgcctctggtctactgaacacagggaagtaatgaaggatgccattgtcaagaagcttaaagatcaactttttatggcaagagctcattatcctagcattgcaaaattgaagcagcatgaagcatttacaagtgaactgaagcaaaacatccaagaacatgaacgcatgctaagtgacaccatcacagatgctgatcttccaccattttttgcaaagaagctggagaagatggagcacacaattgtgagagccaagtctagtgaagtaggatgctccaatgttgaacggaaacttaggcagctacttgatataactgaaaatgaagcttatttccatacaaggcagagtgcatttctatatcatcttggagtgcagactatgccgaaaactcaccattgcttgaacatgagattgacagtagaatattttaagtctggatcaagtcatgtggatcagttaaatgaccagaagcttgaaagtcctgccttacatcactatgtaatattttccaggaatgtacttgcagcttccaccactatcaattcaacggttatgaactcccaggtctctctctctcggacacttatattaaatagaaacgaaacgctccggatgtcgcttgccgcgcgcgcggcgtgcagttgtgatctctgccaggagtagagtgtgggatggggatgcataacgagcagtgctgcagcaggcagggattgtaagttgtaaccttgagcagcttgtggttcatggtgcccccgttctccagatgccggctgccacgcgccccgaggccggcgagctcctggtgctcgacctctccttcaacgccttcgaaggcgccgtccctagcgcgctcgccaacctcaaccgcctaatcctagacgattaggattgggggttaacagtaaataaaggcaatgcagaatcaaaaggctaccaagtgtggaaaaggattctggctctcatcaagtgactcctccccctcacgatgactttgcggacatatgtctcaattctagtggtggagctacgaacaacaatccgatgtcctgatcgagagcgatgaagctaatgtttgaacttgtgaactaaaaatatgaactatggatgtgaacttatgtgaatttgtgaacttgtatttggacttatgtgaatttgtgaacttatgtatttggacttgttgtgtgaatttgtgatatgaacatatatccatgtgtttgaaatctgt

SEQ ID NO: 36413 - DNA, 297 bp, Zea Mays
cagggagacgggagggagaagatggtatgaacggatgtgaactctagtctgtgtatgagcagtttggacatttccaaggacaaaatccattagtcaaacttaaaagttacatgtgaactatttcgaaaaagttgtccaatcaaacggctttgttttacaaatgcaccgaagcgtgctctttacttaaagaacaacgataaagggatccactgtaacaattttctcctcgtagctgtgccaccgtcacttcgattcgctactactcgccgcgccgttccgccgtcaatgccaccgacg

SEQ ID NO: 36414 - DNA, 3032 bp, Zea Mays
tattactgcctagtaatattacaacagtaatttaccataggagcttaatatttccttgaccaatcttcaacggctagttggtttggttgacgactcgtcgtccccccatgtccggtacgtacgaggccaaacccggcacaccttgtctctgtctctcatctcatggtggtgggccaggcaaggacactgacatctgggcccaagcaggcgcacagcatgtgggcctacttgccattgggataaaggccaactcggtcactgcgctccttctccttccttctctcacacactccactgctcccctcctttttccttcaaatcctcccaacaccacccagggagacaaccacccccgccgcaatggacaagattgagacgacgacgaggaggaggaggaaagggagaagcagcagccgccgccgccgccagggggcacggggaccggcgggcctcgtagccacggccttggccctcctctgcgcctgcgccttctccacgcctgccgccacggctctcaccccggacggcgaggcgttgctggagctcaagctggccttcaacgccaccgtgcatcatcggctcaccagctggcggcgcagcgaccccaacccctgtgtctgggagggcatctcctgctccgtccccgacctcagggtacaatccataaatctcccatacatgcagcttgggggcatcatttcgcccagcatcgggaggctggacaagctgcagagactagctctgcaccagaacagcttgcacggcccaatccccgcagagatcaagaactgcaccgagctcagggcaatttacctgagagccaactacctgcaaggaggtatcccttcggagattggcgagctcgtgcacctcaccatcttggacctgtcaagcaatctgttgaggggaacgataccggcctccatcggaagcctcactcaccttcgcttcctccagacccaggcccgttgtgtgcattgaccatgaacgagtatgcgattggttgcctgtgccatccgaacgcagcctgcacgcgcggaaacaggccaggcgttttttcagccctcagcctgcacgcgcggagacacagaaaagacgcttctccggtcgcccaggccggcgtgggcgtggctcgcattggcactgcaaccaatcacgtagtatgtatctcccaggaacctgtctactaatttcttctccggagagatcccaaatgtcggtgtcctcggagccttcaaaagcagctcgttcgttggaaatctggagctctgtggcctgtccatccagaaagcttgccgtggaaccctcggctttcctgccgtgctgccccactccgatccgctctcttcagctggcggtgtctctccaatcagtaacaacaacaagaagacatcgcgctttctgaatggcgtcgtgatcggctcgatgtcaaccttggctcttgccctgatcgctgtgctcggattcctgtggatctgcttgctgtccaggaagaagagcgtcggtggaaactacgtaaagatggacaagaaaactgttcctgacggcgcgaagcttgtgacgtaccagtggaaccttccgtactcgtcgagtgagatcattagaaggctggagctgcttgacgaagaggatgtggttggctgcgggggcttcggcacggtgtacagaatggtgatggacgatggcacgtcgttcgccgtcaagaggattgatctcagccgccaaagccgcgacaggaccatggagaaggagctcgagttcctgggcagcatcaggcacataaatcttgtcactttgcgaggctactgccggctgctccctgcagcaaagctactcgtatacgatttcgttgagctgggcagcttggactgctaccttcatggagatggacaagaggaccagccgttgaactggaacgcgcgtatgaagatcgcccttggctcggctcgaggcctggcatatctgcaccatgattgctcgcctgggatcgtgcacagggacatcaaggccagcaatatcctgctggacagaagcttggagcctcgtgtctctgattttggacttgcaaagctgcttgtagacaatgccgccgcccatgttaccactgttgtggcgggcacctttggatacctagcaccagagtacttgcaaaacgggcatgctactgagaaatcagacgtgtatagctttggagtgcttttgctggagctagtgacgggaaagaggccaaccgattcatgcttcatcaagaagggactgaacattgttggctggctgaacaccctgacgggggagcaccggctggaggatatcgttgacgagcgatgcggcgacgtcgaggtggaagccgtggaagccatcctggacatcgcagcgatgtgcaccgacgcagacccggcgcagcggccgtccatgagcgctgtcctcaagatgctggaggaagagatcctgtccccctgcatgagcgagctgtgctacgagcagcacctggagctctgagccgaggaagcctgacctgactacgatgcagtgcatgatggatgagactgtgtaggaaacaaaagttttgtagatatgacgatgatgaaccgcgtacgtagtgtaggtgtttgtgagcagctcaaaagtaggacaagtgcagaaccaacaacctgatcggcacgttacatacatagatcttctctctgtctgtcttctaatcctttttggcctttttgttctcagttttctttggacggccgtattctgtagatgagctgggaaacagtgaacggcattgagacctgagaatgaataccagagcaggacaaaataacaacagcagagggtgtttcggtataaaaagaaagacggtttaaagaaaactgatttttacaatgtccaaaccgaaaggacagttaagactgcaatatctaaactagaacctgataactgggatacagagcaccaccagtgaccagagcattgcaaagttgacgagtgaaggtaatacttgtccatacatgatgtaccagcatgtgagccttgcaaag

SEQ ID NO: 36415 - DNA, 361 bp, Zea Mays
tcggtcgaagacttcaatcgaaggtcgtcgtcgttccgcgcgtcatcaagaatcccaagaatcggatgaagacgaagctagcagcgtggtgttcaccaagtgcgcgacaaaaagctcgaacatcctgcgcgactaaagttcgattcgtcaaaaattattcagtcgaggagaagatcttcatcaattgattaccgaagaaaagaaggcccctggatgacgtcaactggaaaccatcatcgtgcttctgactatcgcgtcaaagtagtcagggtaagcaaatttgttattcgcgttagtggatgaatggatggttcgactaggtataatatttattagattgcctgagtcgctttggtaattt

SEQ ID NO: 36416 - DNA, 594 bp, Zea Mays
atatttagcgaatatggtgacataaaagagattcatgatgcaccgcaaaagggccatcacaaaattatagaattttatgatgtcagagcagccgaaggtgcagctcgtgctttaaacaggagtgatcttgctggcaagaaaataaaactagagactggccgtctgagtggtgctagacggtatgtcattgaaatgtgaatattgctgttcattctcatatttcatcagcaatacttcctttattactttcgttcactccgtatttaactgttgatcatttgatcacagctttagtgaaccttaggtcatttttggcaagttgaacgattcttgcataggcatcactggtatatagtagcatcacttattctatatgatggtacctgtggataggatgcacattagttatgtgcctgggttttttgttttcttttctcaagcggaaaatctcttcctggagctgtaaacattgcactatttttattttgtcatgcatagatagttacttaatctctgtttgtttagttctgtgtgtgggctctcatgtcctaaacaaaacatttattcttttatattgtagtcctaattctttgt

SEQ ID NO: 36417 - DNA, 2301 bp, Zea Mays
tataaagacacgaagtgattcagtgcaatataagtctattgtttggaacacattaatatagatttatgctaagttgataattggtttgttgttagttaatatgaagacatgatgtgatttgaagaatgattatttatttctatagatgctactagaattatttcaaaatgattggttttatcagttttgggtaaatctggtaaaactcgaccccgaatccgaattattggatatccaaaatttcggataatattttgtcgaaacagaattaggttaggaatttttaatacccggttttttatttatccaaattacgcgacccgattatttcagctaaccagaatgggaggcctctccggttgcctctttctttctcagttctcacctcaacgtcaccgcaactccgcaagtccgcaacctcctccttcccaccccttctcacgcgattcaagcgtttcccattcggagccctaatcctctctttccatactcgcggaagccaccaccaccggcaggggaagcggaaggggagcacctcgggccaggcaagatggtgctcgcgcagctgggcgggagcatctcccgcgccctggcgcagatgagcaacgccacggtgatcgatgagaaggtgctcaacgactgcctcaacgagatctcgcgcgctctcctacaggccgatgtccagttcaagatggtccgcgacatgcaggccaacatcaagcgcatcgtcaacctcgaggcgcttgccgcaggcaccaacaagcgccgtatcatgcagcaggctgtcttcacggaactctgcaacatgttagatcccgggaagccttctttcactcccaaaaagggcaagccaagcgtagtcatgtttgttggtctgcaaggttcgggtaaaactaccacttgttcaaaatatgcttattatcatcagaagaaaggattcaaaccagcgctggtttgtgccgatacatttagagctggtgcttttgatcagttaaagcaaaatgcaacgaaggccaagattcccttttacggaagttacatggaatctgatccagtgaaaattgctgttgagggtgtggagaggttcaagaaagaaaactgtgatctcatcattgtggatacaagtggaaggcacaaacaagaagcagcactctttgaagaaatgcggcaagtttcggaagcaacaaaaccagacttggtgatttttgtgatggacagtagtataggtcaggctgcatttgatcaagcacaggcatttaaacaaagtgtttctgttggtgctgtgattattacaaaaatggatggtcacgcaaaaggtggcggcgcccttagcgccaacaaaaagtcctgttatattcattggaactggagagcacattgatgattttgaagtttttgatgtgaagccatttgttagtcgcctgttaggtatgggagattggtcaggctttatggacaagattcatgaagtgatacctacagatcaacagcctgaccttctgcagaaactgtctgaaggaagctttagtctcaggcttatgtatgagcagttccagaaccttcttaaaatgggtcctattggccaggctaagattaagcgctacatgacaatgatggattccatgactgatgcagagcttgacagcacaaatcctaagttgatgactgaatcacggatcattcggattgcacgggggtctgggcggcctgtcagggatgtcatggacatgctggaagagtacaagcgacttgctaaaatctggggcaagatgaagggtctcaagctccaaaagaaaggggacatgagtgcactgacccgcaacatgaatgttcagcagatgagcaaggcccttcctccgcagatgcttaaacagattggtggcatgggcggtctgcagtctctgatgaaacagatgggatcgaaggagatgagcggaatgtttggaggcatgggtggttgacttgtttttggtggatcgtcgctgtgatgctaaattgagagcgtttaatgctgcggtctgatcaccatcagagcattccctgaagatcagcctgcgctatgttttggatcaggcttagcgtagctccccatgcctgcaaatttaacctatatgaacagtacgtttgtcctctgaaaaaacggataaggtatatattacaaagcgaatatgcttatgtagatggttactccaaacattagtcttccagtggtggtgtcgttgggttggcaaaggatgcgccatggaactttcttgccagggtgcttgtttaggtgtgcactttgtgctcggcggaagttgg

SEQ ID NO: 36418 - DNA, 683 bp, Zea Mays
tttgattcactgactcatggggtcgccaagcagacccgtctccccccaactcccgagttcatcgttgattcttgtaatcgccaggatctgagatcctcgctatcgcttgctgagcgtcctagctccagggtataaataccatcgtgtctcgccacctctccatcgggtcttagccatggacgacggagctgaggccctaagtactgagaacgaaatagaggaggagcagtggctgccgccgttgttgaatcatgttttcttcttcgctccggcctcggcgtagggtcgttggggccgtcagggctcgtggatcccgtatcatcctctggggagcacgaggatcatcggtgggttccgaatttgtcgccgggcttcgtcaaacgccgcggatccgccgagccgcgtgggtgggggcctctgcgtcaccgtactaggtaccgctgtttccagctgatgagggaggaagacgatcggtgagccaatggatcccagccgaacggcagtgattagatcataacctaccctttcgccgattcaatcttgtccgtagatccctaattggatggcttcgagtagatcacaagttaataaaatcgtgactgttgtgatggcatcgggcggtgaggagagaataccgcttcaggccctgttcggttgacagggttttaaatcctaagggcttg

SEQ ID NO: 36419 - DNA, 4434 bp, Zea Mays
tgaagattgtgcctatatcgattgttctagttttgaggcaaataacatcccacggtctatccgttacctatccatttccatgcaagatcattgtgctcagaatttcgaggaacaaatgggaaaactgaaagaaaagatatacattaacaatttgcggagtttgatgatatttggaaaatacattatgttacatctgctcaatattttaagggacacatttaaggaaataagacgtcttcgtgttctatctatattcatatactcccatagttccttgccaaacaacttttcagagcttcttcatctccgctacttaaaacttttgtcaccttattactcagaaatgtcattgccaaacacggtctcaaggttttatcacctgaaatttctagatcttgaacaatggggaagtgatcgttctttgcctaaggacattagccgccttgaaaatctatgccattttgttgtttcggaaaagattgattccaatgttcctgaggtggggaaaatgatcttcttacaagaattgaaagaattccatgttaataaagagagtgttggatttgagctacaagaattgggtaaactagatgagcttggagggaagctcaatatatacgggcttgaaaatgtgagaaccaagaaagaagctaaagaggccaagctgatgtcaaagaggaatttagttgagttgggattaatttggaacatgaaacaagagtccaccgaagatgatatcctagatagtatccaaccacactctaatgttaggagtctttttattgtaaatcatggtggtaccctcggtcctagttggttgtgcagcagcgacaccatatacatgaaaaacttggagactctacatctagagagcgtatcgtgggctaaccttccacctattgggcagttctatcacttaagagagctaaggctgagtaaaattgttggcatatcacagattggacctggcttcttcgatagcacgacagaaaaaagtgtctcacacttgaaggcagttgagtttaatgatatgccagagcttgtcgagtgggttgggggagctaactggaatctgttctcaggaattgaaagaatcaagtgtactaattgtcctaggctgacagggttgctggtttcagattggtctatttcttctatataagacagcactgtatggttccctaatcttcatgacctttacatttatgaatgcccgaagttgtgccttccacccttgcctcacacttcaaaggtatcccgtattcatatgggagacttttcttatgaaggtcgtaccatgttgaaaattaataacccctctagatttgccttcgaaaatctgggtgacctagagacattggtagcttgggatgcactacccttgtcctttatggatcttaaaaagctacattccttgagacgtataaatgtcactagatgtgaggaaacatttttgagaggactggatgatggtgttgtgctacccacagtccaatctctctaccttggacgatttacacctaccaaaaattatttgtcaaaattattcaaatgttttccagcactttcttctttgcatgtgatggcatcaccatcagatgaggacaacgaggaagtggtactgcattttccaccctctagctcgctgagagatgtcaacttcacagggtgtaagaatctgatcctacccatggaggaaggagctggattctgtggcctctcgtcgctcgagtcagtgaccatacacaaatgtgacaggttattctctcgatggtccatcggaggacgagcaactcagactcagagcatcatcaaccctctcccaccctacctgaggaaactcttcctttcttatatggaaactctgcctcaggaagctctgctcatgaatttgacatctcttgagaaactcacactatgtaattgtcttggctgtgagcaaagcaccgagcgaatggctgtactcgcgaatctaacatctcttaccacgctatatttatataattgcagaaatatcacaatggatggattcaatcctcacatcacatccagcctcaagtatctatgcgtgtacaatgagagaaatgatggaactgatccgtattctgtagcagcagatctacttgtagcggtggtgaggaccaaaacaatgcccgacgtttccttcaaactggtgggactttatgtggacaacatctcgggagtgcttgttgctcccatctgcaagctgctctccgctaccctcgagacgttaaacttcagtaatgattggcggacagagaacttcacgaaagagcaggacgaggcgcttcagctcctcacgtctctccaattccttgagttttataactgcagggctctgcagtccctcccccaaggactgcaccgccttccttctctccacggaataactatctatgggcctcaaaacattagatcactgcctaaggagggcctccccgattcactacgaatactacgtataactaactgttgtgctgagatttatgaggcatgccagcaattgaagggaacaaggccagatataaatgtacttgcctccaaagctcgtgtgcaaaattgaatacctgcttctgcatgtcttcacagtcagctctgcttcaacatgcctttcactctacaggtaaatactgtgaaaacatcttcctatacgtgagatagttgatcttcatcgattctacagccaggatgatgtcttattggatgatgtgttggtcatggttggcacaaaattcagtagcgttcaaggcaataaacgagaacaagcatgggatgtggaaaattttagaaagtaaagacaagtgaattcttgacgacgttggcttggcaccttagtttgagtacataatgaaagaacaaccttttagcaaccctggagcatctagaaaatatcagtcatgtaactatcgttaatcatttgaaaaccactggaagacaggagatgtagcaccacaagccattcctttgatcatttgaaaaccattgcggctctttctgattatatcaaccagaagggctcacaattgtggataataaggcatccagtattatagaggaaacaaaggaaattcaaattagacggaaacctgctagtccaaatttgcatcctactggagacattgctggcagaggaattgagactggcataggagaactcaatatatgcttgtgaataacgcatccagtgaaagatagtagattttcatcaattcactacccaggatgttgtcgcattggatgagaatgacatggaagacggcgaactagaggaagacaacaacctcatctaagctgaaaatgtgttgcctgtggttgaagaaaatctagcagatgaacaacactgccttccctgtcctctctagacctgaatctctctgatggtttggattcgtccatgattgatcctgtacgatgaaggatcagctcgtccaacgtttttcaaggaacgaactcaatctgaggaattaccttttcattggtcacctggggtactacgaggaatgacttcacgatagacgactcggttttgcgacgcaaaccaaacgccatggttaggctcagatgttggatcagatgattcctcgtggcttcgtgacgcaaaccaaacgacatggctaggctcagatgttggatcgtatgatttctcgtggcttcgtgacgcaaaccaaacagcctgtaagtccgcacaccttatctatcatggtcattgttgagctgatcagtaattggagtcgtgtgataagcttaatggacctcctatttgtcgtgatcttcacagatcaacaagtgagcggcctttgcatgctgcatgagatcaagcaagccgccgactggcaatgctccacctgccattcagttcgttggtgaggtattaatcaccagccatgttggcacttggcggcatgcagatggagcagaacatccaggtgaagcggacagatacatgatcgatcatgagttggcgcagacacaggccagacaaccagaggctatattccaattcatacattccatgataagcaaaggaagatccaagacaacacaaatatacaaatagttagttatacaagcaaaaatcctgttgttttgtgcctcccattttctagtccagaattaatatgacaatttttcactgaaactggttggatcagagaccaggaaaaaaagggaaatgacaactacagctgtgttttttttttcaaagaaggcagctgcccgtcgatgatgtgctcacttgaggatttcctctgccttttcagtgacactgcttcatccttttcagagtcaaatgaatctctacctcatttcactgcacatacttccaaactgatttgctgtaacatacttgagtttcggtatgacattaatttttaactcataagagaacaaaatcagaagaaaaaaaaacaacaa

SEQ ID NO: 36420 - DNA, 611 bp, Zea Mays
tgctcgcctcactttccatggacgagcgctcgtttcgccgttgctctagctgccgcgctgcgctgttcttagtcgtccggcactgtgtgcttcagtggatgttcgtcgagtcccctgcgtcacgtcctgttctttgcgcgcgcaagctatctgttggccgcgcgcgaagctatcttttcgtcgtcatcacgtcgtcgactccgtcggttagcgtcgtcgcgtcgcgggtgcagctctatatacgtcaccccctgtgtcgtcgtcgttccacgtgtcagcaagaaatctcaagcgtcgggtgaagacggagccagcagcgtgatattcatcgagtgcgcgacaaaaaagttcgtgtgacacctgccaagcgctcgccaaattgttggaatcggaaaatcactaccgatctcgcggattcaagtcatatattagaacggtacgttaaataatcacgtgatgcgaaggaccaaagctgagtcgaccccaagatgctgttaagcgtgggctaatccgcatggtgatgctgatggacatatgaagcaagtaacagaacaaaagatggtcgccaagtgatcgtcgtctaacaacactaacctagtgttacccaggca

SEQ ID NO: 36421 - DNA, 718 bp, Zea Mays
tttcttttgttctctcggaaaatgacaagatttatcaggtcaaacaatggacttcagaacacagaacaacaaaagatatccaagtatatcaacacacatgttacagaggctttccctatgagaaaagcaggaaagtttggtaacgaaaattgcaagaatattgtgaaggtttctaagtctgttgattctgcaacagcctcaagttttgcaccatcttcactataatgtaatgatttggttgcagaactttaggttcaatcttttcattgttattaagctcttactcggcttgtttatcataattcaggggtcatggcgactctgctaagttggacacttttgttccatccatggaggctgcaaaaccaggtttcaaggaagttgagaaatggagtgaaaatgctttgtggagtgtatctgagcttcatgttggcgatgagaagcagactggttctaacaaatctgatatggaaagagtactaaaagggtttggagcttgtgatgcttttgtggcttctaggctcaacgcccctaatggacaagttggtggtattacgtttaagtcttcagacattgcccttctaatatgattgttcgtaggaaagaaagctcctctggattttgcctcaaagactagcttgcagtttgtttcattgtcaccagtcaagtggtgggagtcaaggtttcctcaattgcggatgctcgcttgctgctatgt

SEQ ID NO: 36422 - DNA, 763 bp, Zea Mays
tagttctcgcacgagatgaatgattgaatggcatgcaccatgttgcaagaggaggaattagaatctgcaatatccctttgttgtgcgttggaggtccttaatgtgcattcttgtccaaagatcaatgctctggattttggccgactccgtttggtttatcccagtctgaagcgcatccagagcagcctcatttcataatgcggaggctactaccatattaaggagtgcaattcatgcaataagcctctgttcaggtttgatgaaagaagcaagtcgggaaaagctctccttgatgctctttgtacatattacccaagcattgccggtatattgcaagccaggggcaacgtggtcctatttatccagtccattcatggttctgtaataagtactttttttttgcaaatttgttttgttgccggagatagcaaaatatctgttcatgtctgtttgtctttgttccttggagtgtaccaatggagctatcagatgtatatgctggtttatatgcatcaataatcttgttttgatctaggatcttggaatcgctttgctaatgcgatctggggtgtagttttgtacaactttaattgttcgcagattttagcgagtgttatgaagcttaactgatctggggtgtagttttgtacgactatgtttaatttttcgcagattttagcgcagtgttatgaagcttaaccaaggctatgcaaggcagatgatgcacgcacaatcttagctagagttctgagttgtttcaccg

SEQ ID NO: 36423 - DNA, 2494 bp, Zea Mays
caatgatgtgctcaaagacagttcgttggagttcatgaggtttggcatgaagtcaccaagagaatttagggatgggctctccgacctgatgggtagacgaccaatatcttgttgttgcttgttaatggagggtggagaccacaacaactgttcactgctcatcattcacgcaatgcctttagctagttgcttaaatctctgggtaacaacctactggtttctgcccgtgtatatgccaagtagggacttcaagacagaaaataacatagctttctgagtgacatttgtgctgaaaccagcctcattgtttatggtctcaaattctcaattgccaagggcggctggtgcttggagttactgaatgaagcacataattatttcagccattcttctagaaacgacgctttctgcacaggtcaggtggcagatgagttagccttggtaataggctaatagatccaccatggattatggagtctcctatgcatgtagcaagagctacagtacatagatatacctgtacatctaggtgattcaggaaaattaatcctacactcccacgttactttacaggtcacacaggtcaccagaccaagataaaaaatcagaatgtgttcgttaatgaagagcagggcgatgctcctccccattccccagcaccagaccgtgtaggatgcagggtcgatgccccgacggtgggaggcgatggagggcgcgcagtcgtggccgtgacactcagatgcggcgaatcaagcgcacagcaactccttggtgcaggatacgaattaatattgggataaaggctttacctgtggatgggtcagtggcgaggacgacggagtcgggcattggaggacgggcgcgaccgcgcgaggagacatcagaggatcggaggaccagcgcgaggaggccggtggagatgacaatccgatggaggtgaagagggcggcggcagacagtgttcgtcgtcgtcggggacacaatggcggccaccaactcggcgacgccgttcctgctggtctcgtgtaagccctggccatggtgggtgtttgtgtagaagaggaggcattcttcggtctggactctggactctgctggaagtgtcgtggcgcgtcggtatgatgaaagatcaaattgaccatctgtgaaggagaagatggcactgaatcatcaaatggagatgtgttgatctttccagatatgatcagatataaagggctgacccattttgacgtggacaactttgttgaagaagtgcttgtgaaggatattgactggcttcctagatctcctgagcctatgagtggttcctatatttttgtttgctcccatggaagcagggacaaaaggtgtggtgtttgtggacctgctttgattaaaaggttcaaggaagagataaatgaactgggacttgatgatcaggtggctgtcagtgcatgctcacacgtgggaggtcataagtatgcaggaaacgtcatcattttcagttctgatgccaagggagaagtgactggtcattggtatggttatgttgttcctgatgatgtgcctgttttgctgcataaacatattggacaaggagaagttgtggaccatctatggaggggacagatgggtttatctgtggagcagcagaagcgagctctcgagcttcggaacatggtaaatggtggcgaagaatcccttgaagaaaccagaacagatggtgcttctttcaaccctgcagcagctggtggatgctgccaaggcaatggtggcttcacctgctgccaaactgacctgccaaaggaaaaacaagacaagagcatcatagctgagcagaaccccaagagctctgacaaggagggtggtgctggcagcaagaagggggatacaaagacttgcccagtgcccatctggtttgagacctgggagagagctgacacatatgccgctcttgctgttgttgcagctgccgcagcggtgcttgtctccttcagaatctacaagaacctcaactgaagaacatgggagatcctggaagaggtgaccaaaacaagtataggtgaaacagcgtactgtgataaaagtctgggatgagaataaatttacctgtgcataatgctaggcttaggctatggctagcaaatcgttgtgcaaaatattgttgtgcattgtttacaaagtgatgtttgaaatagaagataacggcgatgaacaagccgttggagataaccttagaacctcaaagtagcttatctggagatggagacggtgttgaaaagatgttgctgccagtgttctcgtatgtgaactccttgtgaacctccactccactgcaatcgaagtttcgatgccttagctgctgtttatcataagcaaggcgatgggatcggcatcaccactaactttgatgatgttatcttttgtttgaattttggatgttctggagcatctagatgttaaaactatgtcaggttgattagaaaatagaataaaatagagagactaaaaa

SEQ ID NO: 36424 - DNA, 2047 bp, Zea Mays
aaaaaaactctgcagccggtcaatgcaagtaggtgggattgcttgtgttgtgtcaattcggacccgcacccgcctaacaaatccagctggtggagtggaggcactgtatcccgtacccactctggcctactccatccaccaaaagtccagggccccaaacggccaaacgcaaaagcgagagcaaagcaagcttcggcctcacctccagcggcaggtggtgctgcggagcttctcctcgccctagatcccgcgcacccaacgccagatcagagatcagggcgcgccggccgtctccattgtccggcggatcctgcgttgcgagctggaccgagagggaggagcgagggagcgcgcgggtagagaaggcggggcggggggaggaaggaaggaaggagcgccggccggagcagacgtcccctcggggccctcggtcggatgagatcgacgatgaaggcgcagcacgccaacgggcgggggagcaggagccccttcctgacgtcctacgcgctcacgctcgccttcatcaccttcgtctccgtgctctactttaaggacttctcctccacgctgcaccgccccttcctccaccgcccccgccgccacgccgccccagacaaaagccaggcggggcgccgcgcggcggcggagcggctgccgttcgcggtgggcgcggcgccggcggggtgtgacgtcgggcgaggggagtgggtgtacgacgacgcggcgcggccgtggtaccaggaggaggagtgcccctacatccagccgcagctcacgtgccaggcgcacggccgccccgaccgggcgtaccagcactggcggtggcagccgcgcgggtgctcgctgcccaggactacaatgccaccattgagttctactgggctccctttctggccgagtcgaattcggatgatgctgttgtgcaccggatcgcggatcggatcgtaagagggacatccattgagaagcatgccaagttttggaagggggctgacatcttggtattcaacacctacctatggtggatgactggacaaaagatgaagattttgcggaactccttcgaagataaaagcaaggatatcatagagatggaaacggaggaagcctatgagatggtacttaatgctgtgctgaaatgggtggagagcaacatgaaccccaggacatcaagaacattctttgtcactatgtcacccacccacacaaggagcagagactggggcgatgatactgacgggaactgctacaaccagacagcccccatcgaggacctgtcctactgggggccagacaccagcaagggcctgatgcgcgtgatcggagaagtgttcagcgcgtctaagtccaggatccccgtgggggttgtgaacatcacccagctctccgagtacaggaaggacgcgcacacccagatatacaagaagcagtggaacccgctgaccccggagcaggtcgcggaccctaagagctacgcggactgcacgcactggtgcctgccggggctccaggacacgtggaacgagctgctctactccaagctctttttcccctgagttaaaggtttgagttgcgaggtgcacggtgaagttggggtctctctctggcattggcacgctgcacaatactagttagcttggcattggcccagcagtctgaagatggatgctctgctgcggtatggcatggcatggtattgttgatgtacgattcattcgttggaaaacctggacgtgagtgctggaattgcaccatctggccttttctgtacatgcctgatgtaacggtggtgttgtgtttccccaccaccacctctcttttcacgatgatgacacagtgcatgaatagttgtatggggtaatgtgataatacatactgtaattctctggttccttcccttcttctctgtttgccctcccttttgttgggcctacgctagcatcaaatctgtctgataggctgggccttgcggagtgggccggtagacaaacatttcggcggctggtcacttggtcagtgacccgttgatattattattattattgga

SEQ ID NO: 36425 - DNA, 1673 bp, Zea Mays
tcggaatcgggcgttctgggctcctctgtttcctttcgtcaccgtcctcgccgttgtgttcctctctcagtctcggggcttcttctcgcgggcacctccggctgcttcctttgccaccgcagcaccagcgctgtccatggagcccccgccgctctcctcgttgcaggaggagggggaggaggggcctaccgtcgaggactcgtccgtcttctccgccgccgttgtgccgcctcgccccgccacgcaccactcgctccacaagtacgcgcctctggactggtccgcctacttcgacgaggagcgccgcgtagccatccccgacaccgacaacgttttcaatgcgtacacgaccggatcggaggggcccgtcgtgttctgcctgcacggaggcggttattcggggctttcatttgctctagcagcaagtcaaatgaaggacaaggctcgtgttgttgccatggatctaagggggcatggaaaatcaacaacgaatgatgatctggatttgtccattgaaactcttaccaatgatgtcatagctgttatacgtacaatgtatggagatttgccaccagcaattatacttgttgggcatagcatgggcggttcagtggctatacatgtggctgcaagaaaagaaattagaaatcttcatgggcttgttgtcgttgatgttgtcgagggaacagcaatggcttcattagttcatatgcagaagatcttagcaaaccgggcacagcattttcctagcattgaaaaagcaattgaatggagtgtcaaaggtgggccattaaggaacatcgagtctgctcgtgtgtccattccatctaccctgaaatacgatgaatcacgagaatgctatacatatcgcactcctcttgagcaaacagaaaagtactggaaaggatggtatgaaggtctttcagacaagttcctatcttgcccagtgcaaaagatcctgttgttagctggtaccgacagactggacagttggtttacaatttgcagagctttaacaatcggtcaaatgcaaggaaaatttcaaatggtggtgattcggcacactggacatgctatacaggaagatgtacctgaagaatttgcatcgcacatactgaagttcatatcccgcaacaaaatagggcctaatggtgtcgagatacctgggctcattaaaaaatggcagcagtagacataatgtacaagttaccgttctggaaaatgttcaggaaaatgatgagtaggtctgcctatccgagttctcttcatatcgaattaaaaaaaggttcaagatgatcatgcgatcgttaacaatcagtcattggtttcgtcatctgttggcaactctcccatgtcgcttgagttgctttgtttctgacatcactctgcgacctgccggcgtcttttgtacgagggttcttgtatgtttttaggtagagctgagtgcagtgcgttgtaatgctttccgtgaggttactatactgctatcaagcaggatcagctcgttatgacagctctgtttcgaatttctgctggcctcggcaagcttgatgggagtaaatcgaagaagcctttgataattatctatttatcttccgcttcaacggagccgagatgtgcaaaaaaaaaacaaacatgagaaatgagcataggtacataaagaaaattgagct

SEQ ID NO: 36426 - DNA, 1858 bp, Zea Mays
acgtttcctagggcacggtaatgccatgccgtgagagcaagagaggaggtagggaaaaggaagttggctttcctggcggcggcgcgctgcagcctggtctttcggccgtgctgcagcctggtctttcggcgctcgcgaattcctggccgtcagctgcgcaacctcctctagttcggctccataactatggagatttgctccctgctcagcaactcgcctaaaatcgctagctctctgttcctattcctcctctcggttccagtcacggtttggatcgattccttcgattcttggtgttctggtgttaatcctgctggtggaagaaggtggaggtggccctgcttgtgcgcagcgcggttttcctgcgctccgttgtctcaccagtgcacctgtgtggtgctctgtctgttctgattattgtccaccgtggactggtgcctgggctccctgttgcgtggtgttcgtcttctcgggctggtgtcgtggacgtctccctcggctccggcagcggctctagtatctccgtcaacctcccgccgtgcaggcccggacgtgggcgacggaattggttttctgggacagaaccttgtgttcgctgagctggtcttcccacgtagacaatctacgtgttgtgagttattcgttgtcttactttatttactgtttaattttgtgcaatctgctagtatcaaatacttgggtgtgattgcactgttgtgggcggatttatgtgttcgatgatgatagcggtgtagtgagacagcgtgacagtctgggttttagtgtattatcattttcagcattgatattatttgtgcctaattaaatctctctttgttgaggctgtttacctgtgttaaattctgttaatttatttaatacacagctccttactatcagtatttatatttgattattaggcttattatatctgatataaaacccttatttggtaagataggactgtcacgttagtcgaggatctctgatcaccttttagcgttggagggctgtttattacagcaacccgctactttgagagcaatattttaagataaacgatcatgtttatttatttaatctgccttcttcatgtgcaagccatgtttaattataaaatggacctgagaagctattttacatgtttacatgttctagaattgctactgttcattgctgcaataattacatatggcatttatctgagttatatgcttgttttattcggaattagaatatttaatctatttaaatatgtagaaagcatgtcacttatttctctaagcttacaacatgaactctttgccaaaatgtagccttagtttgattcgtcccttttgttggatccatactgacattcaaccgtgctccaatgagaagtggtggctgctgccactcatattgtgtattgcaagcgtctgtgaaactctcgtcatataaggcttgttccagcagaccggtgaaattctccctaccccgacaaaaactactcaatcatagtaaatcgatgtatctatgggaccaatctggtggaacggctgaataataagaatcacaaccatgttctgtggaggattccttacatcgatttatcacatgaggtcctgacgcacctggtcaccctggcggcgcgtcggcaagaacactggtcttgacgcacggaagagaaggcctggtctccctaacggcgcgtgcgtcccggctgcacgaactgctatatttagaagtctatttagagagcttttgaagaaacgactttttatttaactattggagttgcgccctatgggactagattgcatcaagaagattctgcagcttcaagaattggaagaaaatccatgcatatatacctaga

SEQ ID NO: 36427 - DNA, 1072 bp, Zea Mays
gcgcgattataaaaacccccgccacacccccacggccacacctttctccccttccctttctccatctcctctctctcgatccctccccgtctccgcgctccaagaaggtcgcttgccagttgccacaggccccactcatgcagccgagcggccgcgaaatgcagggcggcggcggaggcggcgggcaggacgacttcttggaccagatgctgtccacgctgccgcccgcgtggcccgacctcggctacggcaagtcgtcgccctgggagctccccgcggggcccgacgccgccgccgccgccgccgccgcgttcgacgagaccgcgctcctcgcctcgcgcctccgccaccaccagatcggcggcgtcgatgagaagcccctcatgctccacctcagcgacctgcacggcgtcgccgccggcggcggcgacgacgcgggtttcatgccgctgccgctcttcaccgaccgcgccgccttcaagtcccccaatgccgccggagccgaccaggcgctgtacaacgggttcggagccgctgggatgcatgccgccgccgtgcaccagccgccgttcgggcagagcggcgggtcaatgccggcggcgcagagcttcgggggaggcgcggacgcgggcggtggcgcgccggcaccggccgccggagcggcgtcgggcggaggcggggccgcgccgccgcggcagcagcggccgcgggccaagagggggcaggccactgaccctcacagcatcgccgaacgttttcacatgccttgtcgctcacgctggccgcgcgttcgttgcagctccggagggagaggatagcggagaggatgaaggcgttgcaggagctggtccctaacgccaacaagaccgacaaggcatcgatgcttgatgagattattgactacgtgaagttcctccagctccaagtcaaggttctcagcatgagcagacttggtggagctgcagccgtcggccctctcgtcgccagcatggcatcagagaggcaccaaagacccagactgatacagctaaaacttcgtgggccaaatatgatgctgaacccatacttttga

SEQ ID NO: 36428 - DNA, 2200 bp, Zea Mays
atttttaggatgggagggcctactagatctaggaagcctagcggtagagaattttataataataaccgacgcgactttttctttttgttttctggcggcgtggtgttctttttcactgagaagagaataagggagatcaaacggggccgtggaaaaaggggggttagttttattcgactggcttcgcgtgcgccgatcttctatttagcacgcgacaggagcatctcgttgctcgattcggttttcttcgtgaattcgcccccagcgagccgagctagaattggaattggaactggacttgcggctgctgcgttcggcgggggctggaattctcgccgcatccccgtgtggtggtgagaggccgtggctcgtgttgcggtcgacgcgcgaggagggtcgacggcctcgcgccattggggtacgaagccggccgagactgagcggccgctgatcctggtttgagcgcctcgggttcctcttggatttggttggcgtttttatgggcgggtagatcggtccggtgatttctcagctgctatcggtgcgatggcagctgactccagcatggggtttcaccaggggatcaccgcctctctgtacaaccatcacatgctctcgttccagtccaacagcgacgtcggcatcggcggcggcgacgacgctaccggtggcatggtcatggccccggggagtgtgagtgggggcagtggcaacgccgggctgttcctctccccaaacacaggggtcgtcggcaacgcaccgggggttgccccgttaatgaactcgtcgggggatgcgttccgtggcactgggacgcccaagtataagtatgtcactggttctccttccgattggagtgaccgtgaggtagacatactgaatgaagggcttgtgagatatgctcgtgaacctagtatcatgaggtacattaagatagcagctatgcttcctaacagaaccatcagggatgttgcgctgcgatgctgctgggctacaggtaaagagagaaggaagaaacctgatggattctacacagggaaaaaaatgagagacgtgaagccaatccaggacaaaatggttgcatcagtcccaatagctaattttcacatgacacctacaaccaatgtaatccccttttcggtatcaacgcagcatccaaatcaacaaagtcaggttcccaaagaagctcctgttgtcgacagtgcaacccagcgtctcctggaggaaaataatcagttgcttaaccagatttctgcaaataatgaaacattcaagacagtggagaacacagatctttttctccgcacgagtaacaacatcaaaacaattttaagcagaatgagcgaaacgcctggtatcatgagtcagatgcccccattgcctttatccataaacgaagaccatataaattctcttattcaactgaacagactggttgcatcatatggcacaacaagcatttcccatcatacgaagcaagagccatgaagctagtctactaaacccagggaaaaatgagaggaccagatggccggacccctcctgcaattctgtaaacgtgctgctgaggaagtcttgcatgttatactctaaccaagtgccaggaacagtcactgctttccagataatgttttcgcagtgacctgattgtttccaacccgtctgccagcctgcctgcccaccaattcttgaagcatttggaagaagtctgcagttgtggttcgagagccgcaagctatttgctgctgtttctgtttccgttatccagcatgtagaccagagtatcagacagtggatcctggtctctgcaaatgacctgtaaatatcggacggctgctggcgttccatgttttgtttctctgatcgctcatgaatgtatttcttcttttctcccccacccccggtcaccggacagggttgcattgctcccaatatgtaactgtatacagtagcgactccattttctgactaattggacacggaaacccaaacatttgttgtccagatgttctactcttttttttcaccacttcaaaagtaatggtggacaacgagtcggctcgttcgagttcgagctgactcgttaagctaacgagccagctcggctcgttaaggtaacgagtcatagagtcggctcggctcgtttacgagctcgagctgtctcatttagctagcgagccagaacagaacaaaaataaaa

SEQ ID NO: 36429 - DNA, 4423 bp, Zea Mays
ccgagcgagcggccgtctcaaaaatcccgcccactctctctctctctcaccaggcacccccattccctccccgtcttcctcccccatttctaccacggcctcggcatcccaagtctcaaacgtcaaacccttacctcatcagcgacgagaggggagccccgcctccgcctcctgcttctctactatgaacaacttccatgtctacgaggccatcggccgcggcaagcactcgacggtgtataaggggcggaagaagaagaccatcgagtacttcgctgttaagagcgtcgacaagttgcagagctccaaggtcctcaacgaggttcggatgctccattccttagaccatgccaatgtcctgaaattttactcttggtatgagacaaccgtacatttctggttagtgttggagtattgcgttggtggagacctgaagggcttgcttgaacaggataaaaagcttcctgaaaattctatacatgacctggcttacgatctcgtcaaagcacttcagtgaagttcttttggaaaccttttatcatgatttattttcacaataaccgatgtactttgatttactgggaacatttgggtaggttcttgcattctcaaggaattgtatattgtgatctgaagccatcaaacattctgcttgatgaatttggatgcatgaagctgtgtgattttggattagcaaggcgcttaaaagacattgagaaaaccaatcctggagatgtgccacaacccatgaggggaacaccatgctatatggctcctgagttatttcgagatggaggagttcactcatatgcttctgatttctgggcacttggatgtgttttgtatgaatgctatacaggaaggcccccttttgtaggtagagaatttacgcagttggtcaaatctgtaatttctgatcctacaccacctttacctgataatccatcaaggtccttgcaaaatttgattgattgcttactcatgaaagatccggcagaaagattacagtggtctgaattgtgtgaacacaacttctggagaacaagtatcctgatgattcctttacctcctcagcctgcttttgacaacatgattgaactttctgctacaccatatctagctgagagaaatggtgacaaaccttccagacagttgacaccacctaaacatcgtgaaaatattggccttcggaagaaggatgaaaattctactaagccatccatgacacctgttaaaaatgtgcaaagtggcaagaaaaatagtgcaaaaccaaaagctgtgggtttcaaaggggtaaatatcctccgaatgtctcgcattgctaaattgaatttgcaaagggaaagggataaggagaactacaggcgtccgcccacagaaacaactgaaaatgagactgaagttaatatagaaaataatgacatggaacttgattttggtgaaaatccagagggtgatgcacctgatgacaccgatggatcagataatcctggatctgcaggaaatgaaaatcctcaaagcactgacgctaatgaagagaattatatggaaaatcaggttgacatgcttacagatgagggatcagttaagcctgatatcatggtggaaactgagcagaattcttgttcagataacctggatgtggcggcaagtccacctagtagcatgcgaaaagcacatcgtgcaaaggtaactccatgtcctgcaactggttctgagccatctaacatctttgaagcattctggcatccaacagatcttgcagttaaaccagttatgcctattaggaaagcagataaagctgtggacatgatccccacacttccttttgaagctcttacagcaggtgattatactaagttaccaaaggaacagatgaatgcattcaacagtcagatacttcagagtttaagtggaacttatcaggtttcacaaaaacaaaatactatcagatacctggagatgttaagcatgaactcagatgctgcgaacaaaataactaatggaccaattatgttgctactaataaaaatgcttcgactgtcaaaaacttcagtcttgcgtgtccaaattgcctcactcatggggttgctgatacgctattccactgctcttgatgtggagctggcaagttcaggaatttttaatgcactatcagatgggttaagggataaacatgataaactcaggcgattctgtatggcaacactaggagagttattattctatatttctacccagtctgatcaagataacaaggaaatcaatacccaagagtctcctttgaagggtaacaggcctgcaacatcttggcaggttcctagtgctgtaattgcactggtgtcatctatcttgcgaaagggcgaagatgatctagatcagctatatgccttacggacaattgataatatatgtagccaaggaactgaatggacatcccgttttgcatctcaggatgtgattggacatctgtgctacatctataaagcaactggaaagcaagagagtacaaggctcattgcaggatcttgtttggcccgcctctcccgcttcagtccatcatgcattcatttaattctggaaaagatatcattcagggatattgcatccacacttatcaagggaaatggacgtgaacagcagattaatctcaatattctcaattcggcattagttaacagtcacactgtgacaagcatgaaccggtatattctttcattatcagatgacaaacaattggtccctgggctcatttctctgatagaacagggaactgatgttctgcgtgggaaggcctttttgtttgttgctctgctttgcaagaatagtcgaaggtggcttcctcatttcttttgcaatgcaaaattaatatcagctgttgatagatttggaaaagagaaggagggtttcattcatcaatgtacagaagcatttgtgcagttggttgcttctttggtccctggtatccttgaaactgtctccagtgatatacagcagattatgtgtggcaaacgccatggacctgttactgctttagctgggcgagctcatccaaagagcacaattcatctgttccctgtcattcttcgtcttctgggaagtgcatctttcaagcacagagttgtgacaggccatgtattgcttcagttggcaaatcttattaagattttggaggcaccgtttcaggctagggatgatttccaaatgacattgttgcgagttctagaagctgctacagaggagccttctgttatacttgatgaacacacaatattcacaagtcgtatcattccaagcttatctgtcttgtacaacggcaataaagatggtgatgctagatttctgtgtttgaagatactctcagatgtcatgattgtgatcttcagtgactcttcattaacttctgacgaacaaatattaactgatttgaaatcaatctctcagaggcattttctgccactgtacccttcttttgcagaggatgaagatcccatacccatatttgctcaaaaactgctagtaatgctaatggaacatggttatataaaagtctctgatattctacacaaagcaacagtatcccaatgctttgattttttgctaggagatctgtcaaatgcaaatgtaagcaatgtcaagctttgctttgccctggcatctgcacctgagatgaacacccatattctttctcagcttcaagttgttagaaggatagggaacctacttgagtttgtcgctgcaaaagacatggatgattttcttgaaccaaccctggagttttgcagagctttcattattcgtggcactggcagcaacagaagtggtgtcgccctctccgaaaacccagcacttcttgttgacagtgccttcagcatgagtattgctgttgatcaacaaacttgtgtcacggatatatgcgactttggtggcaacatgggtacttttcttgagctagttggcaattcagatccacagataagtaatttagcgtcagactgtgtagtgttgttatccaaggcagcacctcgagaggctacagtgggcttgttgacaaatcttcctaaattaagcactgccatggacttgctgaagcatgagagctccctacgtctgattcgcttattatacggcctagccttctcatgcagacaatacttggcccagggaatgatcctgtcaatatcagtgtcagctttgatgcgagttgaagcacttgtttcagttttcaagggctccaatgatagccttcttgctgatgctgcttcttatttgagcgccgaactgcagcgcttacctcgctgtggttgaagctgcaacttgtccaaggaggcaaggatgcacttgtttttgctgtggttgaagctgcaacatgagctgagcaagtgagcaggacatcaagtacagatatactactctgcttacg

SEQ ID NO: 36430 - DNA, 309 bp, Zea Mays
attatctgggctacagccatgaatacagaagaacctagggtttagaatcaaagaatccatggcctccctgttatgaattttgcccacatgtggacggcgggtgtattcactaaaacgtgaggggctcgtttgcaaatggtgctggccaaaagggtatttgtgattctcggccactggattagatctgagggctgacaacagtttgccctcccaacgaagctacgtgcgatgactacccttggatcaagatccgatggaccagagttaataaagtccgaaactcccacagccccacgatcagacatctac

SEQ ID NO: 36431 - DNA, 267 bp, Zea Mays
atcaaaacattattttttcaacaatgcaggtttttatcttgcgaggatggaatctcaagagaaaaataatgtacattttatcctctaaaatgataatacactatcattagatgaatatctacttgtatgtttgtatcataacaaaccaaaagaatcggtgacaactacaatagttctaaaatgataatacactatcatggtactgtatggattaatttgtactttttattgaaagtctttccgttttttctcacgactcttttgttc

SEQ ID NO: 36432 - DNA, 250 bp, Zea Mays
atggtgttgcgacgcataccgccctcggagtagtgtggcccacgacggcgccattgctccgttgagcgatttggccaagcacgccacaaaatccccgcaccgcagaccatgcacacgacctacgctccctggtgaacatgtacgatccccatacaaggctgaatgatgaccgatgcgtgaagtggctgcggcggtcagattctctcacatctcaccatggtgcccggtaatgatgtctccttgctcacgg

SEQ ID NO: 36433 - DNA, 3071 bp, Zea Mays
cccacacaccctcccccgtgacgccctctcccatgacgctttgtgcgcgtgagtctgcgactgccgacagtcgtcgccgtactggagcccaatctgctggctccccctcgacctcaccaccatgcccccatcggaccccgtcgcgccgtgcgtggcggcgccggtgatggacgcggcgttgctagccgtcatcgtcccgcctcgacgttcgatccgtgctcaccacggttggtgctcgcacgcaatgtggcgtggcgaggttactgcgggcgtcgcggaggtggagggggaaggggaggacgagggcacgggcaagagagcgcatcgcggtggacggtctcgagggaccttgggtgatccgggtgcttggtttcttggttctgcggctttcgctgctgttggatttgccgagtcggagccaccggagatgaccgtcgacgagctgaagctgcaggcaagggccagcggcggccacggcctaaggaccagttccccgtcggcatgcgcgtgctcgccgtcgacgacgacccgacctgcctcaagtgacaacaatgggacaggcagccacggccctgagctgctgagggagaagaaggaccagtttgaccttgtgatcagcaacgtccacatgccggacatggacggcttcaagctcctcgagcttgtgggcctcgagatggaccttccggggattacctctgcacaaaaccccattccaattgatatggttttgttactcgattatgctttggtcccagcccgccatcagtcagatttacctctgaaatgtggcatccaaatgttatgttttctgacatcatgcataatatttgaggaaatgccagtctatcctgatgggcgggtttgcatctctattcttcatccacccagtgaagatccaaacggttatgagctcgcaaagagaaaattaccttgtagtctcattgtttcagtttatggtccaatttacaatggcttcactgtaaatgggaaaacaactcgggattattatattgtttttggtttggatttggaatggtttggggtccacaacgatgatgcgtcagagctgttccaagggttggatgatttccattcccctgctgtcaatttgactaggctcgccgtctccgctctgcccaactggcaccaagcagccaatggaacttgagcatccaatggatgatttccattcccctgctgccaattctccaaactgctttgacccttcaactcaatccgcatgtacccagtaaatgttcaatctgaatttggatcattgctagcaggattctttgcttgctcttctacttctgaaaattcgcaaaatggatagataattccagttaattttaatccattacagtagcctgttgtggcagcaaacagcgaccgggtgcggaagccggaagggagaggcgcttggttgacccggaacggacggcaagacaccgccgggggttcactgcaaccgcacgcgtggtggccggtgtgggaaggagcccactgctcaagcagcgacgacttccgcaacttctcaggccaagttgtagggagggagggcagcaaagaaagcaagcaagaaagaagccgattccactggtggttaaggttttggattaaaggagagaggtgcagagaaaaaaaggcaatcttactcttaatctctgtgtccacatcacttccgatcatgctgtgatcgacagaagtacgggtgccatggataagtgcctcctcctactcaccaaagtaataaggagcagctgctgcaggttgcaactccctgggccaagcagtagcgcagcaagttcagcaccaatggcagccatatgaaatataaggcaaagcagataaaaagcttaattttttttcaagaaggtaaaggcaatgacagaaaagtgaggagggtcagaggtgtacagatatggatgagggctgaaaagaggagcaggaagggcatgatgaaatcagtgtttgctatttagcctccttcacaactaagatcatcctacataatagatttagacaacaaaaacttatggagtttgctgaaatgccctttcaggcatgccccatctgtgctacaagggtcggaatggacttgataggacatttgactatgcaacacggaagttatttcaagatatccttttttaactatgctgccgttgctgatcatttgcatttttacatttttcacattatactacagttgaagatacataggtgtcatggtcgggcgcacgtcacggtcatgttgaattgtaacttttctctggttcttgagccagcaacatgaccggtttaatggtgtttttgagaattctgttgattccttctaaatgttaaaattatgttcactaccaggttattagcttttgtactgcacttccacacacatacatattttttcttttttcttataccttccatgtcgtctggtccagaacttgtacactgtggggttaattatggatatggatctatgaaatattattagcatgaaaatatacatggcgtgtatggaacaaaatggactctaatgctttttcttgtgatgtaggatgcttttggcgctgagaggaggaaagctataagatgctaaatctctccattgcatacggaaaaacgtaggaagggcactgcagctgatgttgctatgtgtgcaatgcttgagatagacagaaatactcgtcttaaggagcttggttgggcgctactcatgtgggtagtttatgcataaagttatgcctgttcgctgcttaaatgttgccatattttgtttttctctttgaaactgtgaagggcacaactttttaacgacttctgtaacttgtgtatctaacatctgtattcggtattctgagttaaaatgggcacatttaattatattttacataatttgttttaaagaatagatggatgattattctgcatgtttttgttatgctctttatgatacattcaacgactttcccatacttcacgcttgtatttgttgtggggacaaacagtaggtggttacttttgcatcccttttcttactttcttgcttcttcgctgcaatacca

SEQ ID NO: 36434 - DNA, 2893 bp, Zea Mays
acactttcttagcaggtaactgcagacggtcactgacgtgtgggcattatctaggcttggtccctaatgtcagtgacggagcaggttccaaatatgaagcttcagtagtgtatcgtgagaacacgtcggtgccaggctgccagcagcaacgaagccgcaccaggccccgcactgcccatggacgcacgcctcccggggctctcgtgtccctgtccgtctcccgtttgccgcctccaccgcaacgcggcgcgcggggtggcggtgctctcgcgatcctcgtgtcgattccagcggcgggggtgccattccctcccctggccgttgcccgcgcctcgcggtcgcgcaccggaaccggagccccgccgcgaatctagggttgcctccgcctcgccccctcctcccgagactcctagcggcaggaattaggacgagggtaacaggcgacagaggctgcgaaggacgccccctcgtcgaatgcgccggcgaccgatccgtggaggagcagccggagcacgcaggaggttagtctaggcacgtatcgcctctcaatccctcttcaccctagacggttcgatccaatgtacttgctaattgctgatcgggttacgcggatgcgtgtagattgagcggaattccagatgtactcccatttctacggagtagcagacctcataatcatatctccttgtcttccgcgattttctgcacttgatcgtctttagttggtggcgaaatgcttattctgggtttctacctttacctcgagcgcgacggtggtggacatttttatgcggtcttgaggaggaccaaggaggtgccctatagcttccacggggccaaatgtgcgagagtgacacggtgatgggtggcggggagaaggttttgtccgggtgcctgactcatcaaggatctagagaaagggaagcaggattggagagattgtttggataattcgagtgcgacgtgagtgaggaactgaggatagccggccagttcatttctaaactggtttagggggtgtttgaatgcactgaaattaatagttagttggctaaaaattgttagtggaattagctagctaacaaataactacctattcatgattattaaaacgtcgtttaaacgacgattaagcgtcgtttaaacgctaaaacgcgattagtagataaaacgtccgcacattttaccaaaactgcgtagaacgtccgttctggacgtttaaacgacgtttacacgtcggaacgcacgttctggacgttctatgcgctatatggacgttctatgctcatagcgttcgtgggccagccgctgatccaacgcgcgcagccattgatccatcgccgccagacgccatcgcgcccagccgcccagacgcctgtgctccagccgccgtcgtgcgcgcccaggagctgccagccgccatcgcgcgcgcccaggagccgccagagccagacgccgtcggccgtcctccaccgccctccaggtacgccgccggccccctcctccctcctccctccaccgccacccccaaagccgccaccgccgccagctactgcctctcccgtaccgccgccgccatcgtacgagcaggccgtaggggtgggtggtggccgaagggaggaggatgacgacgagggcgccggggcggtgatacgggcacacctgctctctgacttcaaggccgcggtgcgtgcaggaaaagtactggtgtccgacccgtcgtctggaaagttgaagggcaagctttgaaaatgtcatccactgtgccgaagtcatcaaatatcttctggcatgattgcctagttggcaagactgatcgccagaagctactcaaccagaaaggctgtgttgtctggatcacaggccttagtggctcaggtaaaagtaccttggcatgtacattaggccgggagctccacacaagagggaagcttgcatatgttcttgacggtgataacttaagacatggtctgaacaaggatcttggctttaaagctgaagatcgtgctgaaaatataaggagagttggtgaagtagcaaagttattttcagacgctggccttgtatgtattgcaagtttgatatctccatataggagagaccgtgaatcttgccgtgcactgttgtcggatggtagctttattgaagttttcttgaatatgtccttggaattatgtgaagcaagggacccaaagggcctctataagcttgctcgtgctgggaaaataaagggttttacaggaatagatgacccttatgaagcaccactgaattgtgagattgagatcaaggaaatagatggtgtatgcccttcgccttctgacatggcggggcaagtggttacttaccttgaggagaaaggcttcctgcacgagtaggctgacgctgaatcgaagctacatccggggaaggtttcaatcagacaagcgcagaataagtcaaaagcgctgccagttaccgtatggttacatagattgatctggatgcctagtatttttctttccgcgcttgctctaccacaagttccattcagtttcattcagatgagcctagatggttcctaatttctttgacctctggaatagattacctgtaatgcaattctgataacagcttggggcagtatcgatttgtcacgggaaggtacgcctaatgttgagagaaactgtattcttgtgctccactttctgcagtgccgacgtgtaccctttccgttttactaaattataattagcttcccttcatttataagtttatttattttttatacactattcttgttacatatctaagtatgtctggatatatagcaaaaaaaaaaaaaactaaaacggattaaattttgaaacttcgaaccgagatagtacagtttagacacgctggaacatgcggg

SEQ ID NO: 36435 - DNA, 1606 bp, Zea Mays
acgggtcaccagtcaccacatccctccctcactgccatttgtttggttgttcctctcgctcgccagtcgccaccaggcagcaggcatcccaatctcgcgagagccagtagcggcggcggcgcttccggcttcccttcccattggcctccgggatggcgctccgcctccacgacgtcgcgctctgcctctccccgccgctcgccgcccgccgccgcagcggcggcagtttcgtcgccgtcgcctccatgacgtccgccgccgtctccaccagggtggagaacaagaagccatttgctcctccgagggaggtacatgtccaggttacacattcaatgccatctcacaagattgaaattttcaagtcacttgatgattgggctagagataatatcttgacacatctcaagccagtcgagaagtgttggcagccacaggatttcctccctgacccagcatctgaaggatttcatgatgaagttaaggagctcagagaacgtgccaaggagatccctgatgattattttgtttgtttggttggagacatgattactgaggaagctctaccaacataccagactatgcttaacaccctcgacggtgtcagagatgagacaggtgcaagccccactgcttgggctgtttggacgagggcatggactgctgaggagaacaggcatggtgatcttctcaacaagtacatgtacctcactgggagggtagatatgaggcaaattgagaagacaattcagtatcttattggctctggaatggatcctaggactgagaataatccttatcttggtttcatctacacctccttccaagagcgggcgaccttcatctcgcatgggaacactgctcgtcatgccaaggactttggcgacttaaagctcgcacaaatctgtggcatcatcgcctcagatgagaagcgacatgaaactgcgtacaccaagatcgtggagaagttgtttgagatcgaccctgatggtacagtggttgctctggctgacatgatgaagaagaagatctcaatgcctgcccacctgatgtttgacggtggaaggtggcggacctgactggtctgtcgggtgaggggaacaaggcgcaggactacctctgcacccttgcttcaaggatccggaggctagacgagagggcccagagcagagccaagaaagcaggcacgctgcctttcagctgggtatatggtagggaagtccaactgtgaaatcggaaacccattgcgactgcttgagttggagcatagtctatcatgcaccctatgacgcatcgcgacgacaagacctggtgtgtcgcgtgacatagttgttcaggttttgaccaaatggtctgggagcatttgttttgccttgtgccgtctcatagagcgttaggatagtgtacgtctgtgttctagctttgttttgtctgctgctttgatgtacaacttgtggccatgaggctggacatggagtgaacatgttgtacattgtcgctggcggtatgtttcggtatgttatttcagttgttgagatctgttaatttttttgtgagctatggaggtcgttctgttctggtcgtggacatggcttgaaattttgcagtg

SEQ ID NO: 36436 - DNA, 1583 bp, Zea Mays
cgcgaggctcgcgctagctctataagtatagtcacgcaagactcggcgcggccttgctcgtgcaagtattccatcgagccatcagctcgagtgctcagttcgcgccagggaggcatggagcccatgagaagggaacctcagacaagcatggcgggcggcacgaggtcacgttgtcccgtgctgctgctgttgctcctcggcgtgactgctcgactggcttcaggcgtcgtctccgacggcctattaccaaatggcaacttcgagctcgggccggcaaagtccgatctgaacggcaccagggtgatgaaccaaaactccgtaccgaactgggagatcttagggttcgtggagtacatcgggtccgggcagaagcaggacgacatgatcctaccggtgccggaaggcgcatgcgccgtgcgtcttggcaacgacgccaccatccggcagaacctaaacttgattcgggagacgacctactccatcaccttctgcgcggcgcgcacctgcgcccaggccgagaggctcaaggtgtccgtcgccgccgagtccggcgtcctcccgatccagaccgtgtacaccagcaacgggtgggactcctactcctacgccttcagagccaggcacagcaccgcgtggttcagcatccacaaccccggccacgaggacgacccggcgtgcggccccctcatcgactccgttgccatcaaggccctgaaccctccgcatcttaccaaggataacatgctgaggaacggagacttcgaggagggcccggtcatcttcccggacacggcgtggggcgtgctggtgccgccgatgagcgaggacgacgtgtccccgctgccggggtggatggtcatgtcggacacgaaggtcgtcaagtatgtggacgcggcgcaccacgcggtgccgcgcggcgcgcgcgccgtggagctggtggccggcagggaggccgcgctggtgcaggaggtgcgcaccgtgcccggtcggcactatcgcctgtcgctcgcggtcggagacgccgcgaacgggtgcgagggccccatggccgtggaggcgtacgcggcgcgggcgacgctgaggacgacgtacgagtcccgggggaatggcgggagcaagcgcgccgtggtcgacttcacggcgatcgcgaacctcacgcgcgtggtgctccagagctacaaccaccacatgaagcccgacgggacgctctgcgggccggtggtggacgacgtctccctcgtcggcctgcgctagcacgcagcgcgccggttgttctcttagtctgcggcgatgtacctgctggtgccttgatgagtttgtattggtaatcccgtgcacgtgtatggccattggcaagcggtcgtagattttttttatacgtatattcgagaggcagatccacttgtacaatgttatgatgctcatggcttcgagttcgactaacgattgtgctgggtaaacagatcatctgcgattcagatgtactcctacttgtaaccacagtgtcggtgttgttagaggctttgactttgctgttcttttctatggacaaaatttgcattaaaaaatactttggccggtgg

SEQ ID NO: 36437 - DNA, 957 bp, Zea Mays
gcggacccgccactcaccgcttctctcgaccgcatctcttctccgcgccgccgctcgcctgcacttctacgtgtgaaacgcgtccgcgcctatggcctgcccgtgcccagctgccccctctccacgcgagcctctctaggcgtcaagcgtgccattaagcaaccgtggcccccacccctcctcggctctctgcgtgagcacaagcatgtctctgtagcccatgttcaacggatttgaaaggtaaaacaaatccattcacattccatcttgggtttccacacatctgatctatgtattcctagttctaggtgtcagtgctagaggatttggaaaggcgctgtttgataagaagacaaacccgtgtcctgtgccgctggaccacatacgattgttgatggtaaagaagttgtgaactttgcatcagcaaactacctcggtttaattggcaacgaaaagattattgattcttgcatcagttcattggagaaatatggtgttggttcttgtggtccacgtggcttttatggaacaattatgtccatcttgactgtgagtcaaagatagctaaatttttggggactccagactccattctttattcatatgggatttctacaatattcagtgtgatacatgccttctgtaagaaagaagatatcatagtcgctaacgagggtgttgactgtttggtgaaatgcttgggacaaagtggccagcaagaatggagtcatggaacatcgacaggaggggtgaggcagcggcaaccgatgtatcccttggacaatctggttttgacatgatgcaaatcaatctgctgtacactgtattccgcacttgcatagattgtttggttaattacaagattatctcagtgttttggtttggatttagagtacacttatgtatgaaatattgattggtactcatgtatattatattaattatattattattaaa

SEQ ID NO: 36438 - DNA, 2653 bp, Zea Mays
ctcgctttcccccattctctccctcctttccgtcctcccccttttcccacgccaagaaaccacgctgcgaccatccgtcctcctcgtcgtcgatctcaatctctcttcgtcacgatcgcaaacagatattgacccgtccgatcggctccgcatcgccagtttgcatctgcttccttcggtgagggtgtgtctggttcgtgctcccgcagcgaaggctggagccgagatgacaatgccgggctctccggcgaggccgagtttctcggccctccgcggtgcccggtggcgggcctatcttggcgtcatccccggcttcgccgccgtctccaccgacgagctccgccgcgccgccgctgactcccgccggagatatgctaatctccggcgaaggctgctaatagatccccatctctccaaggatgaagaaggtgcccctgacttgattgtggagaatccactatcgcagagcccagggagcacatggggccaatatttcaggaatgcggagcttgagaaaatgcttaaccaagatctgtcccgcctataccctgaattgggggacttcttccaaacaagcacatgtcagtctatgcttggacgtgtattgttagtatggagcctcagatacccagagtttggttacagacaagcacttcagacaagtcagggaccttcatgaagagcttttgggtgatgattttgatggtcaaacttttccagatcgttcaaagctgaacagaagtgacaggaaaaacagtgttgagggtagaacaggtaaaattagaagtttggctgaccttgatcctgatactagagatcttttcttgatcaatgatgcatacggagcagagggtgaactgggtattattttatcagaaaagttcatggagcatgatgcttactctatgtttgagaatttgatgaatggtgcacaaggagtggttgctatcactgacttctattctctgagttctgccccagaatcaagtatgggtttaacaccagtaagagaggcatcgtctgcaatatatcatttgcttgctagtgttgattcctctcttcatagtcaccttgtggagttaggagtcgaacctcagtacttcgcattacgatggctccgtgtcctatttggtcgtgaattttcacttgacagccttctgtttatttgggatgagatcttctcttctcctaaccattcttattgtactgacatcaggagtagggcagattatcaatttaaagtgttatgttctcctcgtggtgcactgattttgtcgatggcagtatcaatgatgctccatctcagatcctccttattagggagtgaacatgcgacttcttgcctagtgaggttgttaaattttccagaagatattgacttaaagagcttaattgagaaagccaagttactgcaatcttttgcccttgaagcaaatcttccttcatcctcatcgagaggaaattctctcttgtctacacccaactattgggaagagacatggaagattctccagccatcaatggaccaaaagggtggtggtgtcctcaagatgaagggaaggggcttcttgagaagaagcttgtctagcactgagtcgaatgtttccagaagcaaggctgctaattttgaaaacaacgatatgacttcaactaggcagtccactaccgatgaatttcacaatgctgatgtagttcctgcggagctgataactagtgtgccacacatgcttatagaaaaacaaaagcatcatgttggtaaaggtactgcagagactattgggagtaattcaaagaatggatgtgagacaggacagcatgatggttactgctcaacttcaggtgaaattagagatcctcttggagcagctagcgggtatttatcgaggagtagcagtatcactttgtcatgtggtactgaatatgatcatgatacccatcatctggaagaaccatgtgatccctgtgatgacagagtggttaatgaacctgatccactctctgtgcacaatactggaactgatgaagcagcaacaacagatcgaacatctggaatagtggatacttatcctgttcgacagcgtagactgtgttctgttgatgggaagctgaaaataaaaacccgaaatgccactagtgctaaaggtgacgaaaaagaaacattggcaatatgttcaatttcaaatgtggctgataaagagttgagcagaacattaagatctcttggtgaatctatggttgagaacatacaggatatcgaattgctgttaaaaccaaattcactctcgacttcagtggagaaacttgaggaagcaattcctggaagcacagagcaagctaaggcagtagcagctctaaaagaactcaggaagatcagtgaccttttacgccaaatctaaccggtacaactacggattcttctatacatatggtgttgtagtttttatacgtatctccattggacaatggatgtgatgtaacatgctaacagtatataaccatctgattgatcggtaaatagtaatttgtatgctccctgcaagctgatacattgtaaatgtacatctgaacggctgcctgctggttgtgaagtgaaggcggcaaacatttttttttggcttgtgacccaacaataaatattcaaggtttctgcgtt

SEQ ID NO: 36439 - DNA, 1190 bp, Zea Mays
ctatacacctctgagaccacctttcaaatggtcgtggttaactatgatttcccaactggtgtggaggactatgtccatagaattgggaggacaggtagggctggtgcaacaggatctgcctacacattcttcggtgaccaggattcaaagtacgcttcagaccttgtgaagattttggagggtgcaaaccaatctgtgccgccacagttgaaagaaatggctcttcgtggaggatatggtggaagatcacgtcggtgggcatcttctgatgactcttatggtggtcagggatatggtgctaaaagatcaactgatagcttcaataataacaacttcggcaaccaggctggaggtggttcaagctttcactcgagctccagtggcggtcagtttggtgatactacgagcttccatggcagtgtccgcaacaatcagacgggggacaatgcgagctttccacccagctccagcaacaatcaggctggcgatggtctcagttttcatgaaaggttctatggatcacgtggaagggaccagagcagaacaagcaatgatggattccgtgccaggagcagaagtcctcctggcaagcccgtggaagtttccaactggtgattgcatccactaggtgcaatccaatttttgcgatggtgacgaaaccaagtagaagatggcaccctaacaagttatattatttccttttcttatcctgcttagatccaaggatgtgatggtctgaaccctaacggtctcctgctatcttgatttgacgtctgggagacgcttgattccgtgcctgtgggttgtaaagcgttaaaacttgactttgctagtgtactcccaatgatataacccaatcctgggtaaacaaacgcatggggatgaattttggacgaaaccatggacaactgatgtgtgtttaatgtcatgtacaatctatgtcgaaggctgttgtaaatgccgtccgcatagtttatattgagatgagtgtctgttattgcatgtgttcgccgtggtttgtaaacgcatgtgttgtagacagccacttgacgtagctgttcgccgtggtttggaccttggaggttgtactaaattctaatcgtatggatggctggaacacaaaagtccacgagtctagtcgcgtaaggatgcaccatagtcacaaaaagtttctggatcgatagaatcga

SEQ ID NO: 36440 - DNA, 758 bp, Zea Mays
caacatcaatttcacttgatcaaactcaacgcttcagatcctccttttccacattgagtttgaggaggggtgttaaggcccaggcctacagcctatatatatcatatagtccttagggactcattattaattgttaatctcaagacccgtataagtgcaaaagctcagcgtaagattgcaagagagatcaaaaccgcacgtgcgtttgggttaatgccttttacaacaatgggtagaagaccattcatttttggcagaagtgcggaggagcattattgggatgatggatatttcggctatgtgaagcagaaggatggtgagcctgttgagaatgaggatgctgagccaaatgtggaggctgtgtaaacattctgaagcatccttttgcaagcgctccgttcagtttcttctggtgccttcatgacacaagtcacacaatgcttgttttgcgtcttcagatcatagcgtagctcagcttgaataaaactgtaacatcacgcaagttttgtgaaactcgtgccttgctcaattgtgccactttagcagacatccccagctcacctcatcctggctggagatcatatgcagatatgaaatggaacgtgggatcagagttttagttgacgctcaaaattttgagatagcagcactgatttcagtttctgttggataatgattgtttggctgttcaacgagaaaaatattgtatgcacgtacaaaacgttagattttttaacaacgaaaatattttcttcaaa

SEQ ID NO: 36441 - DNA, 3449 bp, Zea Mays
agatagaaatgctggaaggaatgagtatgcaacaccataccatggagaatcagagttgaaaaggagaaggtccagaagcagggatcatgatcgagaaagatacagtaggtctatctcaccgccactaagggaacaaaggtataattaccgtggacgtgattttggcaatcctccttactactctatggagaaatcaagggggaagtatgctgaagttgataaacaaagatcgtcggggagtggtggatacattggtgggttgcaccagagatatgaaagccggcttggtggatactcaccaaggaaaaagaaaacatcactgcaagctgagcaggcaactaccaagactccttccaaggtcattcagtccccagaaaaaaaatcagccacatgggatcagcctcctgttaaagcaaaccaatctaactttcctaccactttcctgccaactgttggccagatggctcctactccattcagtttcagcgtgataaaggacccttcaactacagctgtgacaatgttggcagctacagaggataagttgattgactgcttgaatgacttcttattgtctactggcagtaaactccagcggtctaaaccatgcctcagttgtacgataaacagagaaaaacgtcaggcttttgtggaatttcttacaccagaggatgctacagcagctatttcttttgatggaaggtctctaaatggatctgtgttgagaattcgacgccccaaagaatatgttgaaacggtgggtattttaattgggtgtgtcataattcacgttcagcagcatcgtgaagcaaaggaattgtaaagcaggcttcctggtgtagtgcaaatactatgtgattgctgctacttcagattttcattggctgattacagtactgcagacaggcagagtccttatggtgttcagttcatggaaacattaggaagacagcttgtacagcatggttcaagtaaatgtaatattagcaaagatttgagtatgatggttgctaagtgctaaccttaattgtgcaaatatctacagccgagtgcaatttggcagcaagggctgtcatttagacattgataaacttcaaagttattctgcatttagtttaacaaactttgactttactttttctcttgtttgtgttcaatctctaacattttcctgttcagcttatttcatggatattgccttacatcttagttcctctatttttgtctctggcctcaacttggtctctttacttctaaaaagacaagattagttcctttacttgtataggtagatatggttagtcgttccacccatagccaataatggaatatatatcacagaaaataccagtgagatagaatcatagaaggagataggttattagtctggtccagtttggtttgcttgactagattgctttgttttgtgctgtatcactataccaacatgaatagctaaacactaggatcatgcaaatatgtgatatgtctcctcaaggaccaggctttcctctacacataacgatggtccacaatgattattttccatcactattagctgtccataatatctgggatagtcaacagcagaaggaaccacactgattttgctgtattatattgagagtgttacaacattgtttttttgagacctctcacctctgttttaaatgtggcggcatctagatttttagatattttattttaaatatcagttcattttttcttgcagaatgtaaatcctgttgatttttctgtattatatttagagtggtacgatattgtttttttggagatctacgttttaaatgcgaggatattcagatttttagatattttattttaaatgtcagttcatatttttttccttgcagaatgttacccctaagaaggcagaagagactgctttgatatctgatgttgttgcagattcaccatacaagattttcatagcgggcattgctggagtgatctcatctaagatgctaatggagattgttagtgcatttggcccattggctgcataccgctttctttttaacaatgagctcggtggaccctgtgcatttcttgaggcatgtgctggcctcaatgggatgatgcttggtggacgtgtactgactgctgtgcatgtgtttcctaatcctcatgtggaggctgctaatgaggcttccccattttatggtattcctgacaatgctaaattgcttctgaaagaaccaacaaaggtcctgcagctaaaaaatgtgtttgaacgagaagagtatatgctactttcaaaatctgagctggaagaaacattggaagatgtacgtgttgaatgtacgaggtttggagcagtcaaatctgtaaatgtagttgagtatcctgctgctggtgtcagtgctgcagaggagaacatagttgagctcaagattgaatgcactgaattttctgatacggaaaacattgcaaaggctgtatcagaatattctgtaccgattattccgagcatagatgttctaaatcattctgtcgcttcggatactaaagatgtggatcttattccagagagtcaggatcagaaggacaaacacctcccttcaaatgcagcactttgtgagagtgaggcacctgtagcagatgaggacgcagagcttgatgaaactcagtctagagctgctctccccacaccgcaacatgctgaagctgatcatacggaagcagctgtggatgagaataaacatacaggagcagggaaggttactgctactgcaacggacgacgatgcagtagaaaagagtcatggagacccaagaacctcagagacctgcaatcctgctggacctacagacaaagcggagaaacctggaaggtactccgaacaaggcgctggtgatgtgactgaagatcgtccagaaaaagaagcccaagctgttgggaccagcgacactggtttcgtgtttgaacctggttctgtgcttgtggagtttttgcgggaggaggctgcttgcatggccgcacattccttacatgggcgtcgcttcgggaacagaactgtgcatgctggatatgctccgtatgatctctacttgcagaaataccccaggtgattctgcgtttgcgactgcatgagttgcgatacgagctttgcctatgtgccagtatttcacagaaacttcagacttgtagttttggcttttgagcctttggatggttcttccggtccagatagtggtaccattagttgaacgaaatatttggaaatgttgttccacagtagatatcggatggacaataggatataagtactggatagagacacaagttgtcgttaacatcgttctttacttcgctattaatgtttttgatgacgtcagacattagtgtggatggatggatggaatggatttattgcaagattttgactgctataatctcatttttttactatctgctcacttgtgctc

SEQ ID NO: 36442 - DNA, 719 bp, Zea Mays
tacacgtaaacatcgaatctttgacatgggcatactgatttagcttttacatagtagttttatgaagaactgaaaacttgagatatattcagatgtctgtaacgtttggcaacaggcatctgcactatctaagcacttgtattcagattcagatggatgcctgtatggtcccgcactctattttaaatgatcgcttccctccacacgatgcggtagacaagtgggaaaaggtaaatgtgcacccaaccttttattatactcctattagcaagcataataaagactatatttgtacctctagcagtggactatattattaaccttgcatgctcttgctctaagatgaagcctacatcagctagctatgtacagaaagcaccatgtttccgatgggcccacccgtccccagagttgcaacggaaggatctaagctcttcaggaacgcgggtgaggtgaagtgaagacgatgtccgtgacgccggttcagagctggtgaagttctctagcaacgggaagaagagggtttttaaggatgcttccgcttcaaaaaagctaaaagaccaattaatggtttttttgccttttagaaaacaggtgtttttagtatgtttctaagaatacttcagacacttttttattattttttttggtttttaatattttttaatgaatggaataaacaatttattcatggttgttgtaagagataaagataagag

SEQ ID NO: 36443 - DNA, 1307 bp, Zea Mays
catgccttcgcttcccctcactcccgtcgtcgtcgcagtcgcagctgcaggccagcagccacaggccacggccagcagttcctgtcgctgccgacgccgccgaggcccgaggggaatcgaccaccatcaccatggggaggactccgtgctgcgacagcaagggcatcaagaaggggccatgggcgccggaggaggacaagctgctcgtcgactacgtccaggccaacggacccggcaactggcgcattctccccaagctcgcggggctgaaccggtgcggcaagagctgccggctgcggtggaccaactacctgcgcccggacatcaagcgcgggcccttcacccccgaggagcacaattccatccttcagctccacgccgtagtcggcaacaagtggtccatgatcgcggcacagatgccgggccggacggacaacgagatcaagaactactggaacacgcacatgaagaagcctcctgccccgccgcccgccacacggcccagtgggagaccgccaggctcgaggccgaggcgcgcctctccctgctctcgtcctcggccgccacgacggtcacctccgccaccgcctcctcctcgtcgtccaccgtcgccgccgagcatgcggcgccacccgacatcttcctgcgcctctggaactccgaggtcggggattctttccgcggcgcagccgcgcagcaggggcacggtccggaggcgagcgcggcgggcgctggcgtgccggcgctgctgcctgagctcggcggtggcggtgacgattcctcggccgcgtcgacctacgaggctgaggccgcggcggacgacggctaccaggcgttcctggacctggcgatggaggagttcgcgctgctgcacggccggctcggcgcgttctcggcgttcccgcaggccgacgtgttcgctgaggcgcactgctgccttttcgctccgtttgaggagtagctttgctcgatctcattgccagtcatcagacatcagagtagtagactagacgtacgtacgtgaccacgtgcatgtaccctgcatgcgtccgtctgcgtacgcgtacgtacatacatacgtacacatgccgcttgtcttggggacgatggcgtatgtacgtgcctgtacgcaacgagcggatgggtggcgcgtgtgacagttcgttattagtctgtgccctagagcaagaggtttttgcgactgctccaaactagccttggcattgctctggtgaacgatgtcaactttcaagtattctgcctctgcgtgtttgtgtacaagctctgacttactgcgtggatgcaga

SEQ ID NO: 36444 - DNA, 1728 bp, Zea Mays
ccccgacgtcccctaatccccgggacccctccccattcctctcctcttctctccctcgcccctccctccccaaaaccctaacccatcgtcgaccggtccccgctctcgtggcgccggcaagatgaccctcctcgcagccatcaccaaccccgccgccgactcccgctccggctccagcgagagggctcaccctatcgtgctcacgccgggtgtcacgccgccgccgccgccatcctccacgctccccaccccaataccgtcttccacctggtcgctctccccagccgaccccaccctcgccaccgccgcttcctacctcgcggcctcgcttgcctcctgctcctccctcccgcagctccgcgcccttctcaccacctttatcaccactctgtcacgatccctcgcactcccaaccccgccggcggccctccccgccgccatccgcgctgtcgccccttacttccccgccgcaatcgcctcccttgtggcctccaaggcggtaagcctcgccgggcacgacatcctccttgctctcgcggaatcccgcctcctcccgcacccgccaccggaactcatctcgtcgctctgcgacaacgactgggtcgaccttgtctgcgtcttgctccgccaggccgccgacatacgttcctccgagatcctcgccgcgctccgttgcttcctctcgccggcctccgataaggcttacgacgccatgatggacgtcaagtgccgatggaaggacgccgcggtgcttgctgtcaacaggtgtcgggagaagagcgccgtgaagaggaagaaagttgacgctgcggcgaggctcgcggcgctgctgctcatgatggggcacgatgggttcacctccccagaggtgtgtctgcattacctatttgcatcagggaatgtggattccgtggtgcttggagcggctctggctgaacttgatggcggggaggtagtcaggttgatgagatatctcaacaagtggattcggaagtactggagcttctcggaagcgcacacttgcccggaggctgtggaaaacctcagattggagcagtgtgacagcgtgccatcgtttggagcagtggctagggcgctaggagtgctgctggataatcatttttcacatcttgtgttgaatgctgatgtgagggaggacttgagggctgcggacttgatggtgagggagctcgctgccgaagcagagtcttctgggccaatcctagacttgctgcataggtttcaactggataagtgagaggaaataatgagtggccttaaatatgaactggtctgaggcccaagcaaaaatcctgcattcagctgctatctcactatggctgttttcttctaaagtccttcgacatgcatgttccttcctcctgaggtttaaacagttctgccaaggattggcaagtgattgggatatgatcaacagactaaggaagcatggattcccaaaaaaaagataaccaaccaaatgggcctgattttctagtagctatagagctaaagtgtgaaactttggcaagagagatgggtctcagatatcccatgccactaggagtaccatttgcaggagcagtcgagcggtccaaattcctatcggatgctcttctactttcttttattgggccttcgtatgaaggggtaatattcgaactaacaaaagattggttatgtacaacagcattatttcaagaagcattattaatattattattattc

SEQ ID NO: 36445 - DNA, 1251 bp, Zea Mays
ggtacacgagatgtagttaagtaaaatttagtccaatgcttgaacaccagtttatgctgcgtctccttgtgtatagtctgctggatttcttttcttcgatcttcagcagttgtttattcaagaatgcaagaaacagttcacacaaacgttggatgattttgatgttcttaggatttttgtatgaggggatactgaagattaatccaatgctataagctctggatactatgcacgtccaatatcgactgcagcaagaatgacatgttttgctaagaagcaacatattgctgccgtgcccttatgtactttggaggccaaaaggtatgaacctatagtcaaaatgtgtggcattacatctgccttcgatgctgagatggctttgaaggctggagctaaattaattgggatgattctttggcccaagtccaaacgctctatcccattgtctgaagctaaagagatatccagagtggccaaatcttacggggctgaatcagtgggtgtgtttgtggatgatgatagtagtactatcttgacagcatctgattcatgcaacctcgatcttatccagcttcatggagatagctcccgagaactacttcctctgctttggaagaacaacaggattatatatgtgctaaatgctgatgaggatggtaaacttatcaatgctcctccaagtgaggaatatgttcttgattggtttttggtggacagtgcaaaaggtggaagtggcaaagggttcaactgggaaaaattccaaatgccaactgttaaaagcaagaacgggtggttattagcaggaggccttcatgcagataatgttcacgaagccgcttctgctctaaagccaaatggcctggatgttagcagtggcatatgttttcctgacggtttacggaaagacccgaagagaatgtgttccttcatgagcagtgtaaaaactttgaatctcctctaacatactagtgctttattggtcgtagtttcttggtgcagtatgtggaaactgaataaatggcagtcctaataaaaataaaaataaaaataaaatgaccatcataggtaagctgtccagaacagaggcattgtcgatctttggcatcaaccagtaaaattcatgcaatgagcagctatatcattttcagcttctcgttaaggcagttcgacacatgtctgtttactgacgtgttgaatgagacatttgattggaatgtgaagagacaactgagtttttgttttgaaattgtc

SEQ ID NO: 36446 - DNA, 2509 bp, Zea Mays
attaacgtcactaaaacaatcaggcttgattggttgctgcagcagctccaaggcattctagactggaggtctcaagttcgattcctcttaaatgcatctttttttgtgcaattactaggggcaacaacgtccaaatcccagacccacgcgcgctatgacttctttttgtgcacgctcggtcacgcgcaggatgacttcttttactgcaccggagggagtactcaaccaaccactttctacttttcaaatttagtccatctgtgaatcatttaggcgttttttatcactccagttgacaggtaataaaactattgctgatggcataataaaaaacagttgaagaaaagaaaacttgtcctcaatcctcattgattcatctaagatgatgtgttacctagctgatgctgaaccgttcgttttcgtaactaaacctcttttacatatcaatgggatgcaaattttttcttgtggttctgtattgcatgaagtacacaagtgtaaagaatactttgaggatgttgaccgaacatgggaaacctttgagaaaacattatggagccatatctctaactttttcaaactttcaaaagagagtcctcagacattggttcgagctttgagggttgttgaaatgcaagagatcttagatcaacaagttgcagaagaagcagctgaggctgagggtgctggtgctatggcgacaataacaaaccaacgtagaactgcaaaaaaaggtgcaggggcaacagttaccccaagaaagggcactcaagaaaaatcgaaggttcagggaaagggctacaaggacaaatgctatgagtctatcaggatggctgttgaggcccgcttcaacaagttgcttactgagcttgtttttgtggaggacttgatggaagctttggaggaagccaaagctattggagatgagcttggcgatatatatgattatgttgcaccatgctttcctcctaggtatgaaattttccagctcatggtaaacctgtatactgagagattcattcagatgcttcgacttctcagtgatagagcaaacgatattcaaaatataaatatcctgaaggtgactggttgggtcgtgcaatatcaagaaaacttgattggtcttggtgtggatgaatcacttgcccaagtttgttctgaaagtggtgcattggatcccctcatgaacatgtatgttgagcgtatgcaggcaacaaccaagaaatggtacagcaacattttggaggctgacaaaacacaaccaccaaagagtacagaggatggaaaactatatacacctgcagcagtggatctattcagaatattgaccgagcaagttcagatagttagagacaacagcacagacgtcatgctatatcgaattgcacttgcggttattcaggtcatgcttgattttcaagcagctgagaggcaaaggcttgaggagccagcttctgatgttggtctggaatctctatgtgcattgattaacaataatctgcgttgctatgaactttcatcagagctaagtagcagtacattggaggcgcttccacaaaactatgctgaacaggttaattttgaagacacctgcaaaggatttcttgaggttgccaaggaggccgtcctccaaactgttagtgttatttttgaagacccaggtgtgcaggatctactcgtgaagctttaccagaaagactggctggagggaatggtcacagaatatcttgtcgcaacatttgctgattactttggtgatgttaaaatgtatattgaagaaagatcatttcgaagatttgtggaggcttgcatagaggaaacaattgtggtctatgttgaccatctcctttctcagaaaaactacataaaagaagaaacgatagagaggatgaggttagatgaagaggtgcttatggatttcttcagggaacacatcaacgtgacaaaagttgaaagcagagtgcggattctggcagatatgagggagctagcttcagctgagagtttggatagctttactctcatttacactaatatactggaacatcaacctgattgcccgcctgaggttgtcgagaagcttgtggcaatgcgggaaggcattccaaaaaaggaagcgaaggaggttgtacaagaatgcaaagagatatacgagaactcgcttgtggatggcaaccctcagaagtccggttttgtgtttggcaaattgaagtgcttgacagcaaagaaaggcatatggaggaagcttgggcagtaagtgtggacttgagcagagtggacagaagtaccacctaggcaaagactgtacgtttcacttctctatgatcattcttttgttcttttgtcgatgctactgttgggtttcacgtttagactatcagtgtgtactcagcttgaggagcaaaaatgtatattccactttgcttagctacagaggattttggtgtaagaatatgtaatttattcaataaaatggttgctatttgcaataagttggcccaagtcatcg

SEQ ID NO: 36447 - DNA, 1828 bp, Zea Mays
accacgaaattttaacttgttgcttctctccctcttctgttctgtctcgtccccttcacgaatcacgacagtattgaagcaattcctgattgctgatcctccacaatttctcccgtggattggagcgatctgaattggagccgtttactgctgacatggcgggaactgatcgcctctaccctgaaattgggacgtatgacctggagcccccgcaggtcccagcctccgccgggggcagcggcgaggaggaggccggggtttgcgacgcactggtgatgtgggacgacgaatccgacgcgtgtccctcccatgaagcggcatcatatgggtgcctccctctgttccacctatgccaaaacatgatcacgatgagtggcaaaagggctttggttacaatagtccgtgcttcccagaggaagaatataagtgggatattgacgaagaaaatttggagatgacaatgtgggatgtgctctctgagatggttgttgcaggaaaggataaaatattatccattgcatcatttgatttaggaatgtatggcacgtctatgatttcagatttttgccttgaagagactttgaaggataaggcccaaacacttaaagatgtcagtgctggttctgaacatgctctccttgagacagaactaacaaagtggttgcctgatagtgcttcaacttcctgtatgctttgtggagcacgttttcatccaataatttgtgctcgccatcattgccgattttgtggtgggatattttgtggtggctgttcaaagggtagaagcttgatgcccccaaagttcatgaactcagatcctcaaagggtctgtgatgtttgtggagtgcgtcttgagtgtatacaaccttatttgatgaatcgattcagtcgtgcttgtcaacttccaactcaagacttgactgacctaagcaccttgaggtcatggataaacaccccatgggcagtcagaatggagtatgagatctacaaagcggcaaattccatacatggctattgtaaggtgggagagctgaaacctgagaagtcgatccctgattcaattctcagacaagcaaaagggcttgcaatcatcactgaggtaaaggttggagtgatgcttacatacaaaatcggtactggattggttgttgctcggagaggtgatggttcttggtcccctccttcagccatctctacttgtggtcttggatatggagttcaggctggaggtgagttggctgactacatcattgttcttaggaacaaagatgccatcaaaacttttagtggaaatgcacatatgtcaattggggctggtgttagtgcttctgctggtcattttggacgagtggcagaggctgatttccgtgctggtgatggtggttatgctgcctgttacacatacagttgtagcaaaggtgcctttgtgggctgtgcgctcaatggaagtgtggtgtccactcgagactcggtaaatgcccggttttacggtggtccgattaaggcctcagaaatccttcttgggtcgctgccaaaaccgcctgctgccgcaactctatacaaggctttatctgtattatttgataagatcgagaagtgaatctcctgatccttctctttagtttgcgacacgcagggtagcatggtgaattgaattatttatgggtcattggttcgctctatttaccttatcctagttggtgatgatgcaagtgtacacctgacgatccactgttttccatcaaactgaggtatttggaaccacaaaccactctgtaaattttgtagacaattctcgttagaaatgaaaaggaaaccattttttcaa

SEQ ID NO: 36448 - DNA, 2627 bp, Zea Mays
ttttttttttaaaaaagcgactgcgcaccacccattcctgggatttcatgggcttgtccaccagtgcagagggtcaggtccctggactgtccaccgagaaccaggagaacgtcattgttggattcatcgatacaggaatctggccagaatcccctagtttcagtgaccacgggatgcctccggttcccaaaagatggagagggcaatgccaaggaggagacgcgaactcaccgtcaaatttcacctgcaacaggaaggtaataggaggcagatattacctcagcggataccaaacagaagagggtggcgccatcaagttcgtatctccaagggacagctcggggcatggcagccacactgcctcgatagcggccggaaggtttgtcagggacatgagctacggaggtggtctgggcaccggaggagggcggggaggagcccccatggcaaggattgcagcctacaaggcctgctgggaaactggctgctacgatgttgacattctcgcggcgttcgacgatgccatcagagacggcgtcgacattatatctgtgtcgctaggcccagactacccccagggcgactacctcagcgacgccatatccatcgggtcgttccacgcgacgagcaacgggatactggtcgtttcctcggcggggaacgccgggagacagggctcggcgactaacctcgcgccgtggatgctcacggtggctgcaggaacgactgacagatcgttctcttcgtatgtcagcctggcaaacggtacctccgtaatgggtgagagcctgagtacgtaccgcatggaaactcccgtcagaaccatcgcagcttcggaagtcaacgcaggctatttcaccccttaccagtccagcttgtgcctggatagctctttgaacaggaccaaggccaagggaaagatccttatctgccgccgtaaccaaggctcctccgagtcacgtctatcgacgagcatggttgtgaaggaagctggtgcggctgggatgatcctcatcgatgagatggaggatcatgtcgctaatcgctttgctgtgcctggagtaactgttgggaaagccatgggtgataaaattgtttcttatgtcaagagcacaaggcgtgcctgcacactgatcttgccggcaaagacggtcttagggctgcgagacgccccgcgagtagcggcgttctcttcgagaggtccgagctcactgacacctgagattctgaagccagatgttgctgctcctgggctgaacatcttggcggcgtggtctcctgccaagaacggtatgcgcttcaacgttctatctggaacttccatggcatgtccgcacgttacaggaatagcagctctcgtgaagagcgtgtatccgtcatggtctccttcaggcatcaaatcggcaatcatgacaacagcaaccgtactggacaccaaaaggaaaaccatagcaagggaccccaatgggggggctgcaacgccgtttgactttggctcgggttttatggaccccgtcaaagctctcagcccagggatcatcttcgatacacatcctgaagactacaagtcattcttatgtgccataataagccgcgatgaccactccgtgcatctaatcaccggagacaacagtagctgcacccacagagcctcctcttctgccactgctctgaactacccgtcgatcaccgttccgtatctgaagcagagctattcggtgacgcgaacaatgactaatgtgggcaatccaaggagtacttaccatgctgtggtgtcagctccgccaggaaccagcgtgagagtgacaccagaagtcataaatttcaagagctatggtgaaaagaggatgttcgcagttagcttacacgtggatgtgcctcctcgaggttacgtttttggctctttgtcttggcatggaaatggaagtgatgctcgcgtgacgatgccgctggtagtgaaactacagacttctggcaaggcctgaccgagttgatccccctggaaagatgcttggaagaggttgctagaatgctagatcaggctacaaatctaggtggtactagaactggaaatactgaccatatcagaagctaaccgcgatcaatctgtgaaaaatatcatattaactatggtatttcatttgtaaatgtcttggctagaacgcaagcactcccagaacaagattcttttttcctcctgatgattgttgtaaaattatttcgtgcctaaatgcaaatcttaagaatgcaggaattgttgggtttctttttctgcggaagaggaatttttggatttagcgaccagctaactaacgcccccaggcttatccaccaggattctggtctttgtaaagggtaggtttggtgacaaggggattgagggagattagaaaggattaagggggaaatgaactaatttccccctcaatcccgctcaatttcttcaccaaaccagccctaatgatgacggatccgacacctcctgaactccatcgatggtgttcgctggttagtacaggaacttgtcgccccgataggaaatacccatgaactgattccccgtgtggcagttgaatggtcgtgaaattagggagagaaacgaagagatggccagaggtcgggtctca

SEQ ID NO: 36449 - DNA, 2114 bp, Zea Mays
ccgcgccaagagatctcatccgaactaaacagcacatgcggagttgacaccgggggcagggagagtcaagttcggtgttgttacctactttttggtgtctacctccgtccgtctgcactaggcgacctgaaaactcagtaatgctagttaacctctccagtatctccttctcggatattgaatcacacacggcaacgccgcaacgcgcagcggactcgggtcctcgcactcgcaatcaagcatgggggccgccgttgggaagccagctttcggtgtcgccgtcgcgccgaagacgcaggcggaggagcggctcgccctcgcggagcacgccctgctccagtggactcgctcacccggcgccgactcgggcatctgggacgccggggcgagctacaccaacagaggcctcctggcggcggtcgacgaggtgctcctcctggcggcggagaaccctttcccgctcccggaggccgcctccgcgcgccgccgcctggacagcgccgtcggcgccgccgcgtcgcgcatggtggaggagttcctgcgcgtcaggcgcccgcgaaaggaacagctcggcgggcaccggcggggtggtcgacgcgtccgacgggagccggtcgagggcgagctcgagcgtgcctcacgaggtcgcggccctcttggacaccgaggtctgggacgacctcgatctcatctgccccgcaggcgtgtccgtccttcacgagatcgcgcttcgggtcgttcgtgccggatgcaccgaggtactcttccgggcgttcgccaacgctccctgcgatgtgctagacagtttcttgtcaattcttcgggtcgaatgctcgcagcagacgactgaggccgtgatcaagcggtggacgacggtgacggagatcatagggaaggccatggtcgccatgcggaggcagctgtacgcgcagaacccaggcgccttcgacggtttcagggacgaatacttgctggccatcgcggagaaccgcatcctgatcctgctcgacttcgccaacggattcaccagcatcacgtcgcacgagaagctcgtgtacatgctcggcatgtacgaggctctcaccgacgccgctcccagcctcctgctcctcctcagcggcgcgcgcaaggaggccatctcggagcggacacaaggtggcgtccacccgctgacacgcgacgccatgacctgcgtcgagctgctggcgaggcaccgcaccacgctcgatctgatcctcgcgggcgccgacgagcgcggctccctcgccggcgtcgtctcggacctgatcgcgggcctggaacgcaacctccagaggagattcgctgtcgcctgcgcggacgcagggggctcgcggcacctcttcctggcgaacaacatcagcttcgtgctgagccgcgtcgcggacaacgacggcgtggcttccctgctcggggacgcgtgggcggcgcggcgccggagccgggtcgagcagcacgtagcgagctacgccgcgtcgtcgtggggccccgtcgtcgctctcctggacacgaccgcgtgtggcagaggcaagtcggcgaaagttctggcggagttcaacgcggcgtttaacagatcgcgcgacagcgagatgtgccgcgaggtcccggaccccgtgctccgagcggtgctgcggaacgccgtgtcggagatggtggtccctgcttactgcgcgttcctgcagaagcaacccaagcttgggaaatctgccaggtacacggcagatgatctggtcgagttgctatcggagttgttcgaaggggaatccacggatggcatcaaaatctagctttcaactttgccaaactgagaacgcttgacttctgtaacactacaaaaaaaagttccatttcttcattgatagcagcagtggtagcagtcagacttctttttttagcatgcacggataatctgaatattccattgtaataaaaaaaagaaaaggggacaatctggacatgaaaatgtgccagaaagcatcgacatttccttgttaacagaagtctacatacattcttatttcgggattgaaggaaaaagatgggacacagaagcctaagatacgatagataaggtcaacattctgggtgcgtattgg

SEQ ID NO: 36450 - DNA, 1287 bp, Zea Mays
cggaaggggaggccactcactaacccctgattagctgctcattaactccacccccgatctgaattggcagtagcagatcggcgtgccattgcatcaccgccagcagcagcagcaagaccaccaaacccaacgagagagcagccgaggcaatttaatgcgttcccctcctctccccatccctctctagctactctgtagattgacagagagacaagagcgctcttgctaccaatctcctcctcgtcgccgccgcggccgctctcgctcccacgatccggcgctgccacgagcttccagatccgccgcccgggcaatgctgtagctgcccgcgccgagatgggcggcgtcggcgccggctctctcgccctgctgcggctgctcctcctcctgctcctccgcgccgaggcctccgctctccacgcgactatattacctagcccagcaccaagtccatcaaaagcccctgaagcgagatcgtttggacctcgaatttccccttcacatcctccgagtgcactacctccaggatctcctggcgttgatgcgcgccatcattcacacaagcacccgcaccacagagagtcaaatcagggcccttcaccatcctcagcacccacacctgaagcaggttgttctagttatatctgcaccgagccactgactgcaacaccaattggttccccttgtggctgtgtcgagcctattagtgttatcgttgatctggacttagctccttatctactgttcatgagcatagctgagttagaagttgaggttgcagctgggacatttcttaaacaaagccaggtgaagatcatggctgcagttgcaagtatccaggatgaccagaagacacgggtgaccatttatttggtgccgctaagagaacagttcgatacttatacggcatccctaatatctgataggttcatggagaaaaaggttcagataaattcatctatatttggagattataaagttatcaatatcagctatcatggattgcaatccccgccatcatctctgcctggaggatcggatccttcaggaactgaagaatatcctataactgcagaggtgcctgatcagaagaaaaagcacaataaatcagatattttggtcatcgtggtagtgttagggtcttctcttggacttctgatgacatgtgctgttctgctgatcttactagtaagatggaagaaacttggacggcttcatgaggctatgacccctgcaactatcccagcagttaatagaagatatggcaccaggccaactttgtcaacc

SEQ ID NO: 36451 - DNA, 276 bp, Zea Mays
tgacttgcacctgctcttagcgttcgtcagttattaaagccttacgttgggctcctggtaccaacaaacagaagcagcaaaactccaaaacaaagcaatggcgttgcatgttgaaaatgctacatttgacttgaatatggagccacctattgagaatgattttggtgcatgttgaaaatgctacatttgacttgaatatggagccacctattgagaatgattttggtacgtacatggtctggttacttgccatttgattttttacttattgttcac

SEQ ID NO: 36452 - DNA, 574 bp, Zea Mays
gctattatgttcttattcttctccaaacccgatgatcgctgtcgtctaatctaccgcgcgcaagcctcccctcggggctagatctccggtctccgcttgcccaatttccaccactgaggcgatgcaggaagccaagcacctcaccacctcaaagcttccgccgcaatcccaatcctcatccccatccccttcggctcccgccgcgaaccctcccccataccatcacgactatggtacctttcaccggccgtttcagccgacgctgcccgtcgtaggccccgcctaccatgactaccatgcctctcctatcgggttcggcagccaggggttcgttgcctccccgggcgccgtccagcagcaggtcttcgtggagggcatccccgtccgagagccgcccctaccgttctgcggcgtcggcgtcggctggtttttgttcttattggggttcttcttggcggcaatcccctggtatgctggtgcgttccttctattctttgttgctttggaccacagagagaagcctggattaatcgcatgcaccgttgctgtttgcttgggacgggagttggctgtt

SEQ ID NO: 36453 - DNA, 1200 bp, Zea Mays
agcaaacgcccacgaatggccaatcgttgcccagcagcagcgggcttcagtattcgtcaaccaaattgtcagtcacgccccgccgccccgccgcctttttatgattaatcagcgagagtccttttgcgccgcgcggatcgcatactagagaggaggttgagcggagtaggcggcggccagcaatgaaggtacagtgcgacgtgtgcacggccgaggcggcctccgtcttctgctgcgccgacgaggccgcgctgtgcgacgcatgcgaccgccgtgtccaccgcgccaacaagctcgcggggaagcaccgccgcttctccctcctgcacccgtgttcttcctcttcctcctccgccgcgcacaagccgccgctctgcgacatctgccaggagcggaggggcttcttgttctgcaaggaggacagggcgatcctgtgccgggagtgcgacgcgccggtgcacagcgccagcgacatgacgaggcggcacagccggttcctgctcaccggcgtgcgcctctcgtcagcgccggtggactctgcgggcccatccgaagaggaggagcaggagaacagccgcggcccctgcaacgacgaatcctgcagcagcggcagcggcgccggcggcgcgaccacggcgaccgccagcgacgggagcagcatctccgagtacctgaccaagacgctgcccgggtggcacgtcgaggacttcctcattgacgacgcgtccgctggcgacgtcggcgcctgctcggatggcctctatcagggacaaaatggacagatcagtggggtgctgcaagaagcttacctgccgtggacggagcgggagcaggtgcaaactgacgtcgcagacgagcgggccagctgggagcggtgggtgccacagatgcatgcggagttcggcggcggcggcaagcgacctagagcgtcgccttcgcctccctgttcgtactggtgattggtgaaaagttcgccgtcttcagcaagatgatttgtattgggctaattagtagagctactgtaggaacgaccgaaaaatgagccaaaaaagtaacggcctccatcgagctcgttttaaattattctctgcctaaagccaaactttcagaaaggagaacggtattttcctgttcgattaattaggtcgatttcgatcgaactcgttccaaaatcccaattgtttgctacctaaagacaga

SEQ ID NO: 36454 - DNA, 2162 bp, Zea Mays
cgagagcccgagaccgcccaggtgcccaccactccaccagccaaccctagagcctctccagtctccactgctcggccgccgcctgccgcagcccgccgtccactggtcccgcctcccggcgtccgctccacgcctccactgctcccggcgtccgctccattgctaccatcgtccggcgttctgctcctgcgccctccctttgattcgttgccagttgtagtgtccgggcagatttgagctgtggcagcaagcaaggattgacgaagcgtgcgttcccatcgcaccaccatgggctacacagagatcgacatccacccctctgggagcggcaagatgtgatagatattagtatgaaagataaaaactagaatgctatgcctgtcagaggagctttcttcagtttcagaacacacctctccatctttcggtgcttggtggatcaccgtctaaacgatccaccaccagaaccgcccaaccccaagataggcagctccatctcagtcgttgtacccgttcaatggcgagctggtggcagcgatgtaggagatgatccatgccgaggtgcacaagtacatgttagtggacggcacctgccaaagatacaccgtttctactgtttttcagttggagaaaacatttaagacaacattttcatcgtttgttctccatatggggcttgtttcacgccacttgaaggaagaagggaatggtggtgttaagttcggacaatacatctacacatcttggagcatcggcatcaatgttctcaatcttctcaaatttcaaattatactggtcattactttgaccattagaataaaatccctataaaacgtggccatgcaatcactggttgtaaactgatgggcagaatgttgtaggatggattggctcaagaactaatatagcttacttatgacaatgtagtaattcatgaagttattgttccttatgttcatggagtttgttctgctaggtttttatgcttttaatttctatttccttaacgaaacctcaggcaccttaaagacagcttggatgattggtttcatgaacagctagagaacttggatgatgattatcttgtgtttgattgccctaatatattctcaaatcatcttttcatgctttagttgtttcttaatagttgcacagtttcatctcactcatattcttgccacttacatgtatgtgacaaaacagacaatccgtcttttttattgcttatggcgttgtgcattatacatgtccaccaattatatacaaataccatttgtgggttacctctggtgtgtttaggtgcgagctgcaatcaaagttaaggcattagtcatcatttgcttcacctcttctggacaggctgcaaggtaattctgacataatgaggaagtccctcttcgtggtcggagaaattgggggcaatgactacaacctacctcttcactagagtgccatttgaaaaggtccgctcattcacaccaagtgtcattcttcactagagtgtcattcttcactttatgattccatggtttgaatgaccaatcatttatgatgtccgtgctcgactgattccttgtactatggtattcaatataaggtattcaatattttcattcatgctgctgaggatgaggtttatatcttatcttgtttatgtttatatttatatgagccatcaacttaatgatgattaaccttgattgcaccagctgaagttggtgcataagttttgcctcgcactaatttgatgtacttttttctagggtgttctggacaaagaaagcttgtaccttaaaacaagaggatacaagaagctggagtggttgtctaaaggcttttgaactgcttgaagcattagtgtagctttggtgattttgtgactgatcagctctggagcagctagagtgatgtagttgtgggcttttgaacaatagctggagtgatatgaaacattagtgatgtggttgtgggcttttgaactgcttcaagctggagtgatgtcgctgtgttgcttttgtgactgatcatctctggagcttttgtgaatgatctaactagctatatgtaaatgatctagttgtgaatggtattataattgtgatgattttgtgaatatataattgtggtgcttttgtgtttatgtgatggatctatgactggta

SEQ ID NO: 36455 - DNA, 1448 bp, Zea Mays
ataaatctctggttgcttgaataaatcggagaatctagtcacgggcttcttcgtcaccgagccttctcgtcctcgcggacttgtgacttgtgactccagtcccttccaatcaacaagttgctatagtagtcccttccaaaatccacactggaaccggaacctccatctccaatccaatccaactccagatccgcctccctgctgcatccccatcccgcacgagcaccaccccttgtcctctccgcctctacatctcatcggctggtgcacctcctccctcctctgctcggcccctccctcccttctcgtgctacggcagcgtggatgcacgagactacagctgtggcaaagcggagatccggcgggagtgcagcggccggcgtgcctctacgtggtatggtgacatgaagatgcgaggcgaggcgagcaaggccagctccggctccggctctggctccagcgaggatggtgagcgaaccggccccgtgccttcccccgctcgtcgcgcgccgcccatccgcatcgacgtcgccatgggctccttctccgcatgtcgccgccacgagatctgcccgcgcgtctccttcggcagccgatgcccgacggccgtccgacctccgacgcatcgtcgccggtccggtcctcttcgccccctctccgctgcgtggcgccacccgtcgtcacctccgcccccttcaccgacctctcctgggtcctccacacactgctcgtcaccatcgtcatgcgcgaggcgctcaaggactggtgattgcggtgtgttggttgaggatgccagagatgagctgaagcttctagcattatgtacaaaaggggattgacatgctatcatttgtatcaattaaaactagagctgttctcttgatataagggttttctccatatttgagatggattgaacactgtatcctttacctgcagcattttttctgtatctcgtgataatttttcagtcactctaatctctctctccatgcagctgataggttttctccatatgttgcttgggaatgcttgattttttttctagctgcataaagctttgtatcatcaaacaattcataaaagaggctgacctgttctagttattggtgtcagatttgactgcagtcccatgattttttgcttcagatgggactggactttggttcagagtttgagataatcaatctgtagtctaaaaattgtatgtgtttgtagttgatgggagcacctctcaggagttaccttagtgctttagatgtaataattgttctgtaactgaataaacatttgcatttgtgatgcattttgactatatatgtgagatgtttataaaaacacgtgcaatatatataatattggctttcctccatgtttttttccagtttttcatttagtgacgcgtctcggcgagacacgccactgatttggggcgctagtgacgcgtc

SEQ ID NO: 36456 - DNA, 692 bp, Zea Mays
gttgccgcaatgttatactaccacggtagactcctcacagccgcacagcaaaacaattttaaacccgtcccccttacgcgtaacagcgtactacccgtcatcagccatcggcacggcgccccctgctagcgtctcttgtcttgtcctacgacggccccaccaccctactgtcgctccgtctctcccctccggccctcctccagtggccgcagcgtccctccacttctcccccagcaccgtctctctcctcctgcacaggtacgcagcgtaggtggagttggggcggatgagatctggccgcggattccaccgtcagtgggctagcgcgaccgagatccggtcgcggggctggcgcggtgctcagcctgcggttcggcgaggacggttgtggggcgaggccaccgcagcgacggcaccgaacaccacgctcgatgaacgcaggagagaagattcaggcgtattcttgtcttttcgctatcttcttggtacgtgtgtctccagctagaagtacagtggaagttctcgtgtaaaagttatgggtctatgtttaaagaatacagtatctttttacgtttagtttatgtatcttctttttacgtttagtttatgttctatgtgacaagaaattaaatacagagagagtgctgctacctatgtacatgaaacgagcatatatgttgaaaccaaggtgg

SEQ ID NO: 36457 - DNA, 2384 bp, Zea Mays
atcctgggctcctggcggttagccaagaattccatcaattgctctatacacgacgtcgtcgacgtgtaatgtaaagctacagcggttcaacttcgacggcggccccagcctcgctacactgtcgctatccattttccccgtcacgagctgccatgagcaattaagtcttcttcacttcctggttcccagtattggtcgaggcgatctgacggagggagcagccaagtcagcaagtaccgcagcaccaagcagtcgaacagcgccgaagatgccagggctcgccgcgtcggcgtccgcagctccggcgccgttctcgttggcgacctcgcgcttaaccccggttgcaagacctgctccaagtttcagaacgcaagcttgtggattgaggtgctggattgctgcaaagctgaaactccgcaaggcattgaaaaggcatcacggatggcaacttcaaagaaatctagatgctcgagggaatgataacgttccagattgcttggaggctgcatctctgactgaaaagagaagtcattggaacatgcatcttgcttatgattctggaggtgaaatggccaacacaagctctgatactttggatagttcaactgttcaggaaaaaccagtggttccgggacacatcatctctgaaatcagttctcatgttcaaaaggaagagtctgctgtgtccaaaagacgctctaacaatgaaccatctctttgcattgctgtaattggagctactggtgagctggcaagaactaaagtttttccagcattatttgctctgtattacagtggttttcttcctcggaatgttggtatatttgggtattctaggaagaaattgacagatgagggcttaagatctataattgaagccaatttgacctgccgggtggatcaccatgaaaattgtgatgacaagctaattgagttcctcaaaaagacgtattatgtagatgccggacatgacaaccaagaagggatggttagattaaattctaggatgtcacaaatagagggcattggtgctgcaaacagaatattctaccttgctgttccacaagaggcactccttgatgtagcattgccactggctgacggtgcccaaactaagcaaggctggaatagaataattatcgagaaaccatttggctttactggtttgtcctcactgcgggtaacacaatctatgctgtcaaggtttgaggagaagcaaatttacaggattgaccaccttctggggaaggatctgatcgaaaatcttactgtcttgagattttctaacttggtgtttgaacctttgtggagtcgaacttacatacggaatgtgcaggtcattttttctgaagaaacatcaaatgaaatacaagggaggtactttggaaattatgggataatccgtgacatagttcacagccacattcttcaaacaatagctctatttgctatggaaccacctgtaagtcttgatggagaggatatccgagatgaaaaggtgaaggttctcagatcaattcggaaagtgaaccttgatgatgttgttcttggtcaacttaaagatatgtctggtaaagttgacagatacacaaaatccatgataccaacctattttgctgctgctatgtacattgacaatgcacgctgggatggggtaccattttttatcaggacaggcatgggacttatgacgaatagatctcgacacaaacgagctggttctacgcgatcaacctgaagaagcaatcctgttgaaagtcaacaacaaggtcccagggcttgggctccagctggatgcttcagaactgaacctgctttaccgggataggtacaacaccgaggtaccagattcgtatgaacatcttctactggacgtgctagatggagatagtcatttattcatgcgcagcgacgaactggctgccgcatggaatgtgctcactccgataatccatgagatagatcagaacagagtagttcctgagctctacgaggctggggacagagggcctatcaatgcttaccatctcgctgctaaacatggggtgcgatgggatgacgactggtgagtcgatacatggcaaagattctcgatgcgcaacgagattcattaccaatttttgtcgttgtatcgcagtcagatgtacaatatgccttctgtaatcggcctgatcaaggactttcaaggagacatgcctttcaaggagatatgcaaacatggtttctttcctgtcctgtagactgtagcactgttgattcaagttggaaaaagaaaaaaaggagaaaagaaaatatgcttgcgacaagccgaggccccatgtcttgtgcgtttagcatctcgtttgccacaagtatggcagtgtttggaaaatggcaatgaaaag

SEQ ID NO: 36458 - DNA, 915 bp, Zea Mays
aaatatccatcgctcctctccccttcaccacttcccccctcatctctctccgttcattccctctctcatgcgtgcttgggttgggttgggtttgggtatagacagttcttgcagtccacaccacctcaagtgagggggtgaccccccaccctcctccctagcgctcctcaccgccatgctgccaagaaggcagagcatcttccacctcggggaggagggtggcgccgccgccgtgcaccaccgcgtcagcgtcgtcggcgcggcctcgtcgtccatggccatgggcggcggcggcggccggcgtgctcgcgagcgtgagcgcctcgtcgtggggctccagatcctggtgcaccaccacggccggcacgggcacggacacgcgcacgcggcgaacgtagtcctgaagcagatggtgaggccgcgcgccgccgctggctcgcgccacggccacggcagccacgccttctcgtgcagtttcctcaaggcctgctacctctgcaagcgggagcttagccctgacaaggacgtctatatgtatagaggtgaccaggggttctgcagcgaggagtgccggtggcagcagatcctggtggacgaggcgcgcgagcgcgaggcggcggcggtgatgagcaacaaggagctgcagcggcgagcgcaggccgccgaggaagacacttgccgtagcctagctagcaggtcctctgtctgctgaggaggacaaaggaatcaatcatggcgcatgacgaggagcactggtactactagctagtacgggtctactggactgcgtgggtaaaaaaaaattaatcatctcttctaatcaccgagtggactgctagagaccagacgacttgcttgtgttgtcatcatcaaccaataatcaatcaagctgcaagtatatattatataccagaa

SEQ ID NO: 36459 - DNA, 3320 bp, Zea Mays
agatagaaatgctggaaggaatgagtatgcaacaccataccatggagaatcagagttgaaaaggagaaggtccagaagcagggatcatgatcgagaaagatacagtaggtctatctcaccgccactaagggaacaaaggtataattaccgtggacgtgattttggcaatcctccttactactctatggagaaatcaagggggaagtatgctgaagttgataaacaaagatcgtcggggagtggtggatacattggtgggttgcaccagagatatgaaagccggcttggtggatactcaccaaggaaaaagaaaacatcactgcaagctgagcaggcaactaccaagactccttccaaggtcattcagtccccagaaaaaaaatcagccacatgggatcagcctcctgttaaagcaaaccaatctaactttcctaccactttcctgccaactgttggccagatggctcctactccattcagtttcagcgtgataaaggacccttcaactacagctgtgacaatgttggcagtaaactccagcggtctaaaccatgcctcagttgtacgataaacagagaaaaacgtcaggcttttgtggaatttcttacaccagaggatgctacagcagctatttcttttgatggaaggtctctaaatggatctgtgttgagaattcgacgccccaaagaatatgttgaaacggtgggtattttaattgggtgtgtcataattcacgttcagcagcatcgtgaagcaaaggaattgtaaagcaggcttcctggtgtagtgcaaatactatgtgattgctgctacttcagattttcattggctgattacagtactgcagacaggcagagtccttatggtgttcagttcatggaaacattaggaagacagcttgtacagcatggttcaagtaaatgtaatattagcaaagatttgagtatgatggttgctaagtgctaaccttaattgtgcaaatatctacagccgagtgcaatttggcagcaagggctgtcatttagacattgataaacttcaaagttattctgcatttagtttaacaaactttgactttactttttctcttgtttgtgttcaatctctaacattttcctgttcagcttatttcatggatattgccttacatcttagttcctctatttttgtctctggcctcaacttggtctctttacttctaaaaagacaagattagttcctttacttgtataggtagatatggttagtcgttccacccatagccaataatggaatatatatcacagaaaataccagtgagatagaatcatagaaggagataggttattagtctggtccagtttggtttgcttgactagattgctttgttttgtgctgtatcactataccaacatgaatagctaaacactaggatcatgcaaatatgtgatatgtctcctcaaggaccaggctttcctctacacataacgatggtccacaatgattattttccatcactattagctgtccataatatctgggatagtcaacagcagaaggaaccacactgattttgctgtattatattgagagtgttacaacattgtttttttgagacctctcacctctgttttaaatgtggcggcatctagatttttagatattttattttaaatatcagttcattttttcttgcagaatgtaaatcctgttgatttttctgtattatatttagagtgaatgttacccctaagaaggcagaagagactgctttgatatctgatgttgttgcagattcaccatacaagattttcatagcgggcattgctggagtgatctcatctaagatgctaatggagattgttagtgcatttggcccattggctgcataccgctttctttttaacaatgagctcggtggaccctgtgcatttcttgagtacgccgaccgctccgttacttctaaggcatgtgctggcctcaatgggatgatgcttggtggacgtgtactgactgctgtgcatgtgtttcctaatcctcatgtggaggctgctaatgaggcttccccattttatggtattcctgacaatgctaaattgcttctgaaagaaccaacaaaggtcctgcagctaaaaaatgtgtttgaacgagaagagtatatgctactttcaaaatctgagctggaagaaacattggaagatgtacgtgttgaatgtacgaggtttggagcagtcaaatctgtaaatgtagttgagtatcctgctgctggtgtcagtgctgcagaggagaacatagttgagctcaagattgaatgcactgaattttctgatacggaaaacattgcaaaggctgtatcagaatattctgtaccgattattccgagcatagatgttctaaatcattctgtcgcttcggatactaaagatgtggatcttattccagagagtcaggatcagaaggacaaacacctcccttcaaatgcagcactttgtgagagtgaggcacctgtagcagatgaggacgcagagcttgatgaaactcagtctagagctgctctccccacaccgcaacatgctgaagctgatcatacggaagcagctgtggatgagaataaacatacaggagcagggaaggttactgctactgcaacggacgacgatgcagtagaaaagagtcatggagacccaagaacctcagagacctgcaatcctgctggacctacagacaaagcggagaaacctggaaggtactccgaacaaggcgctggtgatgtgactgaagatcgtccagaaaaagaagcccaagctgttgggaccagcgacactggtttcgtgtttgaacctggttctgtgcttgtggagtttttgcgggaggaggctgcttgcatggccgcacattccttacatgggcgtcgcttcgggaacagaactgtgcatgctggatatgctccgtatgatctctacttgcagaaataccccaggtgattctgcgtttgcgactgcatgagttgcgatacgagctttgcctatgtgccagtatttcacagaaacttcagacttgtagttttggcttttgagcctttggatggttcttccggtccagatagtggtaccattagttgaacgaaatatttggaaatgttgttccacagtagatatcggatggacaataggatataagtactggatagagacacaagttgtcgttaacatcgttctttacttcgctattaatgtttttgatgacgtcagacattagtgtggatggatggatggaatggatttattgcaagattttgactgctataatctcatttttttactatctgctcacttgtgctc

SEQ ID NO: 36460 - DNA, 275 bp, Zea Mays
ctgcgtggtttggcggagtggacacacatggcgcactgctggcttacttgggtccatgtgtaagaaccaccccaaggtagggttgatggtgtgtttgttcagattgtacataacttcactgtaatgacctgtaatgacacccaagggaggaatattctagggataatgtagataaccaggggcatgatcgtacttatgtgggcatgtccacttacctggttacttataaataccccacattgtatattgatgggacacgcttaacaacaccgttg

SEQ ID NO: 36461 - DNA, 2248 bp, Zea Mays
caaacaagtacgaggagtcgaggactgcagctgccccaccaaacgccgacctgccgggacatggcagctgcggcgccggccgcgggcaagggaaaacgaaagcgccacctctccgaggacgacgtctgcctcctccaaaggtacaatccggggacgatcctgacggcgctgcaggaggtggcgcagcatgcggagggccggatcatcgactggagggcggtggtggcgaagtcggccacggggatcacctccgcccgcgagtaccagatgctctggcgctacttagcatatcaccacgacctaaacgagagcatcgaagccggtgacctgcctctgggcgatgacagtgacctggaattggagcttgaacccaatcccagcgagaccaaggaagctttatctgaggcctctgcattggccaagagatgggcactaaaacgcccaggaggatcaaccaagcctgctagcactaaacacgcctctgttggctcagaagaaagatcagcaactatcaaggcacttcatttggctgtcggtcctatgcctgtatcatctgcactaagatcaggacgtgaacaaagcattcagcataagtctacagcgtttgctcctaagatgccacaagtaagatctgcagtaaccccttcactggcaccggcactggcgctgccagtccaacctctgcgtgtggcagctgaagttcagtctccgcttcgtcatgggcaacaagctcctggccaaggtgcgccaccaaaattgtcaaatgcttcaaataatacacggaagaagcaagcagctctgccaaattctactttcagtccttcctcaatacaagcagcagcaattgctgctggtgggcgacttgccacagcctcaactgccgcaaatcttttaaaagctgcacaatctaagaatgctgtgcacataagatctctaggagcaacatctttgaaatcttctgcaagctttgatcatgggacacaatctgggggctcccagcacctagaatctctaaatgctagcgcagttaatggtgtttcaggagtttctgcagttaatcaatcagggccacctgctggagcggaaactaagaaggcattgggtaccacactagcacctgtcccatgcgacagcgaggaaaatgaggatggctctgaattttgtgcgattacgttagatgacttattccctgaagatgcaaagcagccggaaactgtggataccaaggcaaagcaaccagaaaccacgggtcccaaggcaaagcagccagaaaatgcagatcccaaggcaatgcatcaagaaaccatggatcccaaatcaaagcagccagatacactaaaggttgggatattagatcccaaagataaagacatgctagagttcgatcaatatgttgcttctcaaggagcacacttaaacacggatgatctgaataaaagcaagtgtaccaacagtgcttcccaagcccaaggtcttgttggcagccagaagaacccactgaaactgactcctgtggacgggaaagctaaccctgtaactgcggctgggagaggtaagcctgtagctgctggagtggcatcaaccggaaagaaggctacaatccctatctcacatttggcagcagggaccccacgcggcatagttgacacagtcaatgccaacgccccaattagaagaacactaacaaggagggcagccgcccttgtccccgctggttgccaagctcctcccccgaagcatgccatagacgcgaaaggctgccaaatgacgaatagcattgccacgtttgtcagttctggagtaccagccagcagccaggctagcacgcccgcgaaagatgctaacaaagcaagcccaccgtccagcagctgccagcccaagccggatagtgtggcggtgaacggtgctatcagggccgtgaagagtgttgctaagaaggggaatctgccagcagcagcagccaggcaatagacaggaccctgaataacacggtaaattttgtagtaatacccgtaggacttttgcgcgtcgattgtaccttggaatgtgaatattagtcgttttgcgtgtcattcttttcaccttgcatttgggtgatttttgtctggtattcctgctgggcatcgctaacgtaacttgaaagacgttctcgtctagttcccttgtgaagtgtgatgcttgtgtgtgtgtgtctacttgcgcccgaggcgatggtgccgccatctttgtgcctgtctgtctgggcagg

SEQ ID NO: 36462 - DNA, 3135 bp, Zea Mays
gggtacgggttttttaatgggcatatatatttttcacgggtacgggtttgggacggcaaaacccagcgggtttgtacccgttgccatctctactcctcgatgtcctacagctgaaaaaacaccttttggtgcaaaggttgttgttttaggaggtgatgctagacaaatactcccagttattgaaggtggtacacggtcgcagattatagatgctgcaataactagctctcctctatggaattctattattgtcttatacttgactgaaaatatgagattaaactcatcccatttggatcctacaagtaagaatgagattgcttcctttagcaaatggttgttggacataggtgacggcaaagtacccgcaagagcaagagacagtgaaaccgaaagatattggataaaaattccgcatgacattttactaacatctcaaaataatagtcttcaatgcattgttgactccgcgtatccagatataagagataggtatgcagagatacaatacttaaaagaacatgcaatactttctccaacaaatgaaattattgacacggtcaacgactttgttgtcactctaatacatggtgatccaaaggaatatcttagctgtgatagcatagtaaaaggaccagacaacaatgattcatatgacttattatatcctgttgaattcctcaattaagttactggcaacaatttcccgcaacatcaattaatactgaaaaaaggagtaccaattatgcttttgcgtaacattaaccaatctgaaggtctttgcaatcgaacgaggttaattattgttactctaggagatctgattattgaagccaagatcatgaccggaaaatataaagacaaaattgtgctgattccacgtgtatgtttaactttaaaaacaccaaggctaccattcactctagaaagaagacaatatcccattaaagtttgttacgccatgacaaataacaggagccaaggacaaactctgtccaatgttactgtgttcttgaaaaaacctattttcacacatggacaactatatgttgctttctctagagttacttcaaaaaaggactcagagtgctgattgaagatgatgatggaaaatcaatagatgaaacgaagaatattgtttaccaggaaatctttactcgatttccttcacattaaggaagttctataattgccgcccatgtatagaataatgtctatataagtgagttttatattccattttatatccaagacaagcctattatgtataatatatgcatctactgaagatggtttctatggcttacaacattcctacttcctttattacagaatgcctaataaaccactttcagcattgactctacaagatcgagacatagaaattcaaatagaggtccacaggaaatgggaatttcgaggtgctattgacaatggacccatattacacatagacatgatcctgacggattgcataggcaatgctatccattgtcaaataccatcattcccagcagctaaaagaggtgatgaatttcaagtgggaaaaatatacaagatgtcccgctttccagtagctcgtgcaaaatcttcctacaaacctgttgatggtgatctcatgtttctaacaagttacgacaagattgatccaaatgaaccaaatgcaaggaacttccatgatgtcattagcattattacagaaatctctgcgattaaacctgtgggaaatgcacgcataccctcatcttacaatcgacatgttctaataaaaaacctcagtgatagcattctgaaaattactctatgggggaaacgtgcacaagaattttatttgaccaacacttatgacccacagaaacaaactcttgtcattgtcttatttgttggttgtttaccaaaagaattccaaggggaagtacttttaagtggtggtgcagcctaccattggtacttcaacccatcaattgaagaagctactgctttttacaacaagattgaatctgagaagataaacatagaattacccagccttgacggacaagaaattacacctccacaacttccacaacgagaacatcatgaccttaaatacatattacctctaaacccacatgatgtaccggatgaaggatatgaatgcacagtaaccattacaagtattcctgaaggcaagacttggtattatattgcttgcaatacttgcccaaacaaaccaagcattgatcctatcatccgtcaatgctccacatgtggatcaacaaaatactgcttcaggtacaagctcactttcaaggcatcagatggaactgcagaagctgaaatgtttgctttcgacactgttgcaaggacaattattgggaaaccatgtccaatggttgttgcatcattttccagatgcatcagctatcccacctgaaattacagcaatcgtttcacggaaatacacattcattgtagtgttcaacaaccaatcatacagatttctagaaaaagcattgctcataaaaggaattgtagcatcatatggaagaatgacatcactaccaagagttcaagaaaaacttgatgtgcaccttcctcccaatccagccaaaaacaaactgataacaacagctgctcaatctccctctacagtcatgtctagactttccacggcggactcaccaagtgtgagtcgaaagctaacctattctccagcaaaggataaacctgagacaaaccctcttgatgctgataaaaatagagctcctgcaacaacacttgaatcacctacaaaaaggatcaaacaagaccctaagaatcaacaagagtagacgttgtgtgcaacacagtaaggaatacttctgaacatcacgcccaaacttcaacaaacgaagcatattcctcactattttgtctataaatattatgtgtgccttcttctatgaagcaaaccttaccctcgatatgctatatataatatctatgtattgtcatgtaatataaccatctataaactcatcagttgctacaatatattctaagcaaaccttaccctcgatatgctatatataatatctatgtattgccatgtaatataaccatctataaactcatcagttgctacaacatattctcatgttatgcatataaaat

SEQ ID NO: 36463 - DNA, 3086 bp, Zea Mays
ccggccgcgacgcggcccgcagccacggccttccgtaatgtcataactccccttctcgagtccatctccaacctcatccctcccaccccaataatacatccagccggcgccatcaggcccggcaacgcgcaagcggggctgaccatcgaaccctagtccccggccgagccgccctccgccgagccttgcggccgctctgcgtcatccctcttagtctccctccgttcgacacggcttggatccgagatggaatcaccgcccctcacagctgaagcaattgcttatacagagaaaaagatggacatggctttggaggatataattaaaatgtcaaagaaaaagaatcctggaggcaagaaacccccgaggcagccgataaaaaagcatccattccagaatggcaactctaataaagggaatggcaaggttcaaagttttatggagtctagatcaaccattagacaaggtgttcttgcacagagaaggtcaaatcttggtggaaatcagttccctgctacaaagcaggctgcgaagaaggctgctgttatgccaatgcacaagggggctatccgttggaacaagccaaggtaaacaatgatgttcttttattgcttatgagaaagtttactgcattcaaggggttgttcaatttattgagtcatgcaccttggattatattggctgagaatgattgtgatgctggtgtttacatggaactgccttaacttctctggttatacacacacaagcttataaagaacaatcgatttcatattcttgtggcacaaggcctgttttcttggttgaactgctacaaatatatggtgaatatagcatatgagccttgaagcttcattgaaagttatggccttctcctttatctgctgttgcctgacatttttctatgcagtttcatggtgtaatttatagctgctggatgagtgttattttggacaccagcattaactgtctgtgagggtttcattagtgttatttgtcaactattgttggaaggactgaaggagatgtgataatggttagcgtctcatgccactggtgacggatcatccatatacagggacgttacatgcctgagtttgaattggttttgactactggctccttggcagtgttcagtgtttatttgttgaatgatgaatgcagtgtaaatctagggtagtgctgctaattggacaattgttgtatgcctccaagggagtatattttgctactgcctcatattcaagttggctgtatccgtaacatcatgccagttttgagcatcctatcataatctgctatatgctccccttgttcactgcgtcccacagagataatgcttgcctgcatttctactggataagagtaaatcatggtatcttacgatttatctcagtatgctgggctgtatggatgctatcttttcaaggtcaactgttgggatttattttcatgattccttatgtgaccttgtttgttctggatcagtggtcactatttacatggcttgagttttatcagtttaatcaatcaataagttgtgtcaacttgggacattgttgaaccatgtgcattgaaatttgggtggaactaaacagtctagactccaaaatgtgagggccttggaaaccaagaggatgcactagatattttcaatgaacactttattgtttctgtttcattttatttcaaaacatggtatgtactccctgacttcacttgagaagcgagaattgtatccttgttttgatgggggtatgtgcaagtaccttagtgcagaggaggcctgtaggtggtgcttttcagaatgccaaggtatggagtatggactttgtcaaatcttgaccttaatgctgagtaaataggacaaactggccgaaaaggtaaactgtttcctaatgtattgtatctgatgcataataatcaacttaagatgtaatgggtgatcttttggcctatcaatataatgacatcttggaaaaccattgctattgtaattgatattttgtgttctttcttgatatgttttaatgcatagacagcatagttttctcacataatccatcttttttctggtatcctcgtgtcacttcataatcatctgtagtagtttcagagccgtgatcagtgctatactcgagtccatttttatttttagaagttgcgtgatacatgaacttctatttgtttgattaatatattcgttgaattatcatgtcctgtagttttttttgtcgctgctgatcatacgcccgtaatctatttgtaggtcaaggagtccaaccaggcagcaccaaggacgatggatgcactctttgcacagatgaaggcgcaacgcttgaggacggtacctcaacagcaggcaaattcttccccctggagtcatttcaaccagcatcgacgtgttcagcagcagcagaggcgaggcagagggtatggtggccgtaatgttggcaaccaatgaatccaactagacatatctactgcatcggagccctttctcttcactggtcttttggaccttggaagaaaggacgccccttggaaaatcaaacttggctttgtttattggaggggtgacaatgggctctaacttggctttgtttattggaggggtgacatcgggctctaaattttacactaagatttaaggatctgattaagatcaggccctatttctattcatttttaaactaaaatttatttagtgtcctactattttgtgaagcgtttggatcgtgatccattaccacctcacctttggacgtggacaggatatgaagcgaagtttgtttgagttttctagttgtgtgcagtctgcttccgtttcagcatgtataatgacatggaaattatttggtcagagattatgatgtcttgtttcttggcttgattagcttcatccccaactaagagtaattcaccttacctagggatgacaacaggtcaggtttagatagggtagaataaatatccgtccgctataatatttgcgaagattatttatatctgtctatgactatactcgcggataacttgtaccggtatccgtagctattcgtttgattggttatctgtactatttc

SEQ ID NO: 36464 - DNA, 1755 bp, Zea Mays
atcaggcggaaaccaaataccccgaacgtccacagcgagcgagaggccgcaaactcccgagaccgtacgaaccagacgattcaccaatcaccatggcggcgccggcgcggcgcaggtcctgcatctcctccggtggagccggagcgcctccttccgctgctgcttcgcctcttctccgccctccgccgcccgctgcgaggccggtccaaggccatgctcaaggggatggactactgactactccgaacccgagataaggacatgatttaagacatgtgtgtgtttcaagtagttcgttgattgggtgcaggcgcaggggtttcggccaggccaggccttgatgctgtggaaatgcctgtacgggaacaacgtttgggctcatttttacgacgagctggctggatgttacagatactggtttctattgaagatggttcagtgatttaaacagttatcattccttgcactaggggcaggacaactgtctgtgtttcaaatgaagttggttgggccatgaaatgtcagttttgcttcactagaagggcatgggtcaaccatttcacaatatcgacaatgtaataaaagcctcagcaataatggttcatgagcaaggccattttagccctcgcaaggttactgtctccacaagtggttttgtccctcagttaggaacccaattgcttgctgccgccagtcttaatgcaaggacagatgaggttagaaactggataatgactataaacagaaaggagaaccttaacttgcttcttggcactttaagaggtgaacttaacctcagaaaaaaaaacaaatagtgctatctgaatatgccatgctttctggagtgaacggcagtggatgatgccaaaagtcttttgtagagctactccaagggatcccatgcaagcaagataaacctcatctctttgagttccctcgacggttcccaatccaagcccacatcagacgataaaatgattgagttcggcaaacttttaattcaaggtgggctcactgtctttgttcggtcagcagaggggatgatcagatcagatggctgcctgcgggcagctcagagagcctggagactaccagctgcctctgcaccgtgcacctgagaaaattttgaggtcgtcttgtgatgctagacagtgcattacagtaaactggtcctgaggcctgagaaaattttgaggtcgttttgtgatgctagacagtgcattacagtaaactttagcgtcgtcgagaccgaagtgggctgaaaagcgctgcatcgtgcagccgcgtgacagtgggcgtctttcgcatggttggttcgtcgctgcggtctgagtcgccaaagctgaattctgttgtcatcggggagtgattcgaaaagtttggaacgaacctatcggtggtcaggaatgaggtaagaatctgaaggactacaaggttggcttgcctgagcgagataccttaaccattaaggtgtgcatggcacttggcacctagtcaccagaccagatcaccctaaatggtggaaagaaaaaagcgaaagatctagcgcaagccccacccggatcaaagtttctctctctctcttttccccccaaaagcaagtccatcacgctgcacattatgggcgtctttagcactgatctgaacacgtaagcacgatatacggttgcgccttgcttgtagcgtttggttgaagagccaagtagaacggaaccgttctgtcccagttttgttgttgtttggttacaaagtaac

SEQ ID NO: 36465 - DNA, 1624 bp, Zea Mays
agcagctcgagggggtgacgaagtaaaagagaacacgaggacaggactgaaagcaaaagagagcaagatggtcccatgttcgtgttcccatcccagtgggacgtttgaacgggacaagccagcctgtggctactcaattaccatccgtgaaaccatcactgcgacatcggtggatttcacaggtgctaaagcttttgagatatcaggcacgccggttgactgtgtctcgttggccttatctgggaggttgtttccttggtcgtctcctgctttggtgatcagcggtatcaacacaggaccaaactgtgggtatgagatgtttcactcttctgccattgctgctgcaagggaggccttagtgtatggggtgccttcaattgcaatctcattgaattggaagaaggatgaaaccaaagacagcgacttcaaggatgcagctcaggcatgcttaccattgataaatgctgccttggatgacattgagaaaggaactttcctcagaggatgcctattgaatattggagttccaagtgcaccatctgcaattaagggtttcaagttgaccaaacagagtggatatagtcctgctcaaagttggcaagctgtgtcagcaagcaggccctcatctgctactcacttcatgggcatgcaccaaagccttggtattcagctggcgcagcttgggaaggatgcatctgcagcagcagctgcacgtagagttagtggtcaacgaaaggcggtcgaggttgagtctgttgcaactgctggtaaacaagagactcgagaagtagtgaagaagttattccgtgctgagtttgtcgagaggcaacatcaaggtttagatgaggataccgatttgagagctttggagaatggatttgtatcggtcacccctctgaatgttcatgggcaagtggagcctgaaatccaagccccagcttcagattggctctcagcagctgtatcactagagaaagaaaaggaagctgctccagctacagctgaagctcattcagcagcctaacaaacacgcagacatgtacacactccgtggccctacattttggatgcaaccatgtaggctacggcaactaccagatgaatactgcccagccccccactattttttcagtgtggtttgttctaggaaggtgttgtattcagcatgggatatagttgattttgtcttgcaccggtctgaaccgtggccaccaaatatgttttggccgcttgtaaccagaaatgcaatcgcaaccattcaagggcctgtttgttttatcttaattcacattgatcggagagaattttaggagtttaaatctatagcaaatcaaaatctgtcgacctctcctagtcccctccagtctatatgggatataaataactgaacaaggtctaattctgcaattttacttttgcatttaggtcatggctatcaaggtgattatactattcgttggccttgcaattttgatattaccctttatttttcaactttatgattttacccatcgtgttttgataatgaagttattgtttgccccttcctcttaacgatgttagagaaattcagaattagtgattaaaaaataaaaaatatgaaaagtaatgagtgaaaggtttg

SEQ ID NO: 36466 - DNA, 2934 bp, Zea Mays
ttgcgccgcggcagcagaacaccttcctgacccgaattcaatccgtgcgcaggcaccctccgccggcgatggctcacgcatcgctcggcgcccgccccacgtccccgaggcgacgaccggcacaacgcgccctcgcggcgctacccgacacctgcgacgaaacgcgccaagttcaggagcgcgtcgacacaggggctcgggaacacggtgtcgccatcgcggaaccctagcgagatcgtcgggaaggtccgaaggtgagcacgtgtttgtgtaacctttggctccggttcgcaatggtggacggcgatggtgacagggaacaccagcaatagccggttgtggcagctgccgccgcgtcacatagcgccgagttggaggggcacatcacgtgaatagatctgcgcagtctcgcatcatggcagtgccggcggcctcccgggcatggcgactctccccagtcgaccaggcacctcttcgtcctttgggcccgtaccctccgcttcctcgggcgtgtccgccggccatttggacgccgtcaaaccggttggccgtgtccgggtcatctccgcgcccctcctccaaatggccaaaccctaccttgttgtagctagcctacccctccagacgccattatcttcttggtcagtcctgcccactactcgtctcatcaggaagcacggtgctattggcaaattcgttgaattctatggtgttggtgtgggcgagctatctttgcctgctagggccacaattgccaacatgtctccagaatatggagctaccatgggcttcttccttgtagacaagtagcattggactatctcaaattgacaggccgaagcgatgaaactgtatatttcactatgtgcagactactcttttaccatacccgttccatcattctgatatgtatatatttttattaataaagcaaagttgtatatattgcattaaatgtgattcaggtgtcgatgattgaagcatacctgcgagctaacaaaatgtttgtggacaagcatgagcctgagacggaacgagttttctcttcatatctggagctggaccttagtgaggtggagccttgcgtttcaggccccaaaaggcctcatgatcgtgtccctttgaaggaaatgaagtcagactggcatgcttgcctggacaacgaagttggtttcaagggctatgcggtgccaaaggaacagcaaggcaaagttgtgaaattcaacttccatggaaggccagctgaaatcaagcatggcagtgttgttcttgcagcaatatgcagctccacaaacacatcaaatcctagcttcatgattggtgctggccttgtggaagaaagcatgcgaattgggccttgaggtgaagccatgggtaaagacaagccttacccctggatctgtggttgctactgagtacttgaaacatagtggccttcaagattatctgaaccagcaagggttccatgtcgctgcgcatggctgcgccacttgtgtgggcaactctggtgacctggatggatctgtatccgctgctatcatagaaaatgatatcgttgctgctgcggtgctgtatcctactacctgctcaaccttggggacagcatcaccacggaccacatctcctactcggggaagatccccgagggcacacctgcggccaagtatctgctcgagtatggcgtggagcccaagaacttcagctcctatggtggccgccgcgggaacaatgaggtggtgatgaggggagcgtttgccaatatgaggatcgtgaataagcttcttaatggcgaggctggtccctggacaatccatgttcctaccggggagaagctctacgtttacgacgcggcaatgaaatggaaggagatgctgtcagttttacccaattatcgagtgaaggagtatatgaagaaactttacaagacatctgtacaaccctagatgagttgcagtagattccacccattaaggacaaatggacaataatccatcatcgaagccaaatcataagctaaaaggttgagaagatggtgcttctggcatgtggatggcgctatacgattactgtttgtgactcaagtaatctatacacttatggttggcgcaaatacgttcaactaggacatattgattttgaagatgatttagttccacataaactagaagcattgaaagatagcactatatctcaggtaataccttttacaaacattccatgacatggtttcaaaacttcaatttcgcttttctaggatacttacaaagactagttccatacttctatgcacatgttgacatcgacataccttatactgatggctataatctactttttacatattggtatatgtagtcaggtttacattaaaagtttaggaaactcacaaacaaataggaatatatctaatgctacttagcccaaagccccatacaaaaatatccctgccagaattaattagcatgtcctcagatgggacataccagtatttcataaaaatgattgtctctccaattgtcagcagacttacttccagcaaagttcctaagaagataagttcttttgacagatacaaaatctagcattactctattcttttttatatatctatatgacactcatgatgtcacaatgtgaggtgttcaactgtgtctaactaataattattgtcttctcctatttgttgtacaggaaaagatagaatggaactcaaattttggtggttacactggtgtggagacttgaattcatgtatacacttagttagactcaatgttagtgcaaacagttgatgaccaagttttttaattagtattttagtttggatgtatagtacacttatgtatgagttatttgacaatgcttatttatgagatattgaatgacacttgtctatgttatattaattataatgttattaaatatatgggcatc

SEQ ID NO: 36467 - DNA, 1350 bp, Zea Mays
atgagctcccgctcgtatgccgccagtgcccgttatttgcgaacaaagagttataattccaaacgggcatggggagaagcttgttggtttattacatcgaacaagttcaaagaatcttgtgatcctttgtcatggattccaagccacaaaggatgacagcatcttggttgaccttgctgatgccatcacaaaggaaggaattagtgcttttcggtttgatttttctggaaatggggaaagtgatggtgaattccagtatggaagctacagaaaagaggcagctgatttgcgctctgtagtattacatttctcagaacagaaatatgacataattgctcttatcgggcatagcaaaggaggaaatgctgttcttctttatgcttccaagtaccatgatgtccctgccattgtgaacatttctggccgctttgcattagagcgaggtatggagggacgccttgggaagaatttcatgaggagaataaacgaagatggatacattgatgtgaagaataaaaaaggtctagcctttctttacttgattaataatacgtcatttttttcatgttaatcttattatgagtctgattcaatggactatcccttagttttctaatcaattagcacagggtcatcaaacaaatgcatgcgtctgatctggtgtcaatcttgaaactgtcaaaaactaaactataggctcggtgtttctgctcactctttccaagccaggacacatggcaatgcgattgtaaagaggatcatgcatcgcgttgttttggtggttgtgcaggggagttgcagtaccgggtgtcgaaagcgagtctggatgaccggctgagcactgataccctattctccagccgtgccataagcgaaggctgcagggttctcacgatccacggcgccaaagacgagatcgtcccggcggaggacgcccggcagttcgcggcgaacatccgcaaccacgagctgcgcatcgtcgcagatgccaaccaccgttacaccgggcacagggaggagctggcctcgctggtgctgggcttcctcagctcccatccctaccagatcacgtcgcgcttgcgtccgagactctagatagagtagagcacacccacttgaccgtttgcgaacaaaaaaaaatcccctgtaccaatctaagagttgtgggtgtggtgatgtgtttatccagaaccagaacacgagcacctgccgtccaaatcagcgtgactcgctctcgctctagaatttcaaaaaaagtcagtgccaggcatctaacagcaatctcctcatcattgcgttgcgtccaaaagaagtgacaatggcaggtgggccccgcatggcaggccatcc

SEQ ID NO: 36468 - DNA, 1059 bp, Zea Mays
actcgcagtcgcaccacttgcacacgggcggccaccgcacatcagcacttttacgagccctcctatctctcgatttctcgcgcagcggccctccccttctctcgccgccgccgccgcgtgttccgtcgtctcctctcaccgatggcttttgctaaggtcggtgctgcgacgcaattggagaacagaggcgcgctgtcgaaaaggttacgcaacgacgtgtctgtaagggagggggactggaattgtcctcagtgtggtaatgtcaacttcagttttagaaatgtttgcaaccgtggagcctgtggtgcaccccgtccatcaccgagtccaagtccaagaatgatgccagcacctcctgctcctggatatgaccgactacctctgttttacggaggaggtatgggatatggcccaggacctgagctaggccgatatagctatgggtttagaggttctccaatgccgcccatggtctggtggagcaatagctgaaaacaatgacaacattgcttcacgaaagcgccgtggaggccctgatggactttctgagggtgactggacctgtcccaaatgcgacaacattaacttttccttcagaaacacttgcaacatgaagaaatgtggagctccgaggccaactcctggagctaacacgagctcatctaggaaggacaataaggaagcccctgaaggaagctggacctgtccagagtgcaataacctgaactacccgtttcgttcggtgtgcaacaggaaaggatgctcgtacaacaagtcagccccgacgaataactgaacctaacctccgcacagcgcaccatattgttgagacgtgtcgtcgaactattcttgtatccttagattgtatcctagctagtcgtgtgtaatctttgaactgcacaaaaatgtgtgcctggagacgagcgaatatattcattacgtttaatttgttcgttatgtttaatttacttgctatactttctatgttcgaaattataagtcccgtcattgttcccaacacagtttaaaaatagaagattcatttttttcttgcgctaa

SEQ ID NO: 36469 - DNA, 7743 bp, Zea Mays
atccaaatcaccaaaactcacaaaagggatgaatgcactttcaagaagacgaggaaaaaacagcattcatcactcctttcggagctttctgttatacctccatgtcgttcggcctcaaaaacgctggagcgacttatcagagagctattcaaacatgcttagccgatcactggggcaagtgtgtggaagcttatgtggacgatgtggtaatcaaaacagaaaattcagaaattttcattgaagatttacagctggttttcaacagtctacggtgatatcgatggaagcttaatcccgaaaaatgtgttttcagagtaccagcaggaaagttactcggatttattatcagccactggggaattgaagctaatccataaaagatcgaggctatcatgagaatggaagcaccacgatcacagaagaaagttcaaagacttaccggatgtatggcagctctaagcagatttatatccaggctgggagaaaaaggcttaccattttataagttactcaagaaggtggacaaatttcagtggacttcagaagcacaggaagccctagatgcattgaaaaaattcttgacgacaccaccagtgctgaaaccaccgcgtcgagccacgccgactcaaccagctgaagatctgctgctatatatctcttgcacgactcacgtggtgagcaccgcgttggtagtcgagcgagtaaaagaaggacatgcatacccagtacagcatcctgtttatttcatcagtgaagttctgggtccctcaaagaagaaataccctcaagttcagaagctattatatgcagtacttctaactgcacgcaagctccgtcactacttcgacgaccacaaagtcatagtagtcactggatttccgataggagatattcttcacaacaaagaagcaatcgggagaatagccaagtgggcctgtgagctgggatctcatgacattaaacttcgacctcgcaatgccattaaaactcaagcactggttgacttcgtatcggagtggaccgaacaacaagtaccggataacccggaaaccgcagaagtatggcgaatgtattttgatggctcgttaaagctgcagggagcaggcgcagggatcctctttactgcacctggaggcgaacacctcatatatgcccttcagttgttatttccagcctctaacaatgcagcagaatatgaagctctgattcatggactgaacattgctatatcactgagcatcaagagactgatggtatatggagattctttggtggtcataagtcagataaacaaagaatgggattgtttgagcgactccatgggaaaatactgcactgccgtccagaaactagaagacaaatttgaaggcctggaatttcaccatgtagagagagagatcgaaacacggtggtcgatgtattgtccaagctaggatccagtcgaactcaggtcccacctggagtttttgttcaagaaatatcacacccaagcatctcactggatcgggcagaagaatgtaatactctgagccaaccagagtcagattctgatgactggagggggccaataattaaatatataaagaatgaggaggagccagatgacaagaatgcagccgagcgcatcgcaagacaatcagctcactatacactcattggggaaacactatacagaaggggcgcatcatgagtcctcatgaaatgcattctctcagctactggaaagcaacttctagatgaggtccatgctgggcaatgtggagtacacacagcatccaggaccctggttgggaaggtcttcaggtcaggtttttactggccaacagcaaagagtgatgcgaccgagttagtccagaggtgcgaagcctgccctgctgccagtacttgttaaaacagcagcgtctaccagcacagcagctgcaggctatacccgtaacctggccgttcgcatgctggggattggatatgattggacctttcaagaaagctcaaggaggatacactcatgtactggtggctatcgacaaattcactaaatggatagagttcaaaccaattgcttctctaacttcagctaaggcagtagaattcatacaagatataatattcaggttcgggataccgaatagcatcataactgacctaggatccaacttcaccagttcagaattcttcgatttctgcgagcaaaagagcattcagatcaaatattcctcggtggcgcacccaagagccaacgggcaagtagaaagagctaacaagatgatattagaagcactcagaaagaaagtcttcgacaagaatgagaagttcgcagaaaagtggatcagagagctgccatatgtggtttggagcctgagaactcaacctagccgagctctgcatggaaatacccccttctttatggtttatggttcggaggcagtgctacttgctgatctcaagttcggggcaccgaggttaatctttgaaaacatagcagaagctgaagctactaggctggaagacgttgatgtactcgaagaagagcgactgaatacggtgattcaatcagcacgatatcagcaaactctgaggcgctatcatgataaggccatacaacatcgatccttcgcagtgggaaatctcgtcctccgccgaattctaacgggggaggggcggcataaattatcacctctatgggaaggaccattcatagtagcagaagtcactcggccggggtcatatcgcctcactcagatgaacggcatggaaattgggaactcatggaatatagaacacctcaggaagttttacccctagctacatcccagaagctctcggaacaacgatgtattctgtaaatcgagaaaaatatcatcgataaaaaggtttcaaaggcactcagattgttcactgtcaattggcacgcttacctaactcagggtgaccactatgccctactaacggagcaatcggcttaagtcggcaatgacttaaggcggtgcgacatgctcacgcttacctaactcagggtgaccactatgccctactaacggagcaatcgacttaagtcggcaatgacttaaggcggtgcgacatgctcacgcttacctaactctgggtgaccactatgccctactaacggagcaatcggcttaagtcggcaatgacttaaggcggtgcgatgtgctcacgcttacctaactcagggtgaccactatgccctactaatggagcaatcggcttaagtcggcaatgacttaagacggtgcgacatgctcacgcttacctaactcagggtgaccactatgccctactaacggagcaatcgacttaagtcagcaatgacttaaggtggtgcgacatgaactcagggtgaccactatgccctactaacggagcaatcgacttaagtcggcaatgacctaaggcggtgcgacatgctcacacttactaaactcggggtgaccactatgccctactaacagagcggtcggtttaagttggcgctgatttaaattggcatggcacgcttggcacgtttgcaatcacccatcgtagggcaacttctgtgccccatgatgaaatttcaaaaccatcacactacatttacttctacaaatgtagacactgttgaattctaaacaatgggaaaacaatagtagcattcaatactaaaaggtgtcctctaacaaaacattcgagcacattaaccacgtgttcaaagcatgcaatgttttctatttggcaatgttcttctcaggagcaaccgacgaagaggggcgacttgaggaatcgggagcggcgttcacatctgccattatatcatcaggaacaaccacactaggtctcctcatgaggatccgccccgtgcgaatagctttatccatagctttatcgcgctgggccctcagagtagcagaagtctcttcagcaaccttgatagccaaccgagcggtttctagctcctgggcgacggatttcttggaagcacacagatccttgatgacaacatctttggttgacaccaactgcctgaggcgaatcacatcgtccaaagattcttgcagcttataacgatgattatctaactcctccctggtgaagcgatgactcctctccaagatggtcaatgagttgctggcgtcacggtatagcttatcaaggttgtcacgagaagtagcaagggcacgttttttcttcctacagacaagaatcagtttctccaaacgtcaagcaagaaataagaacacagcaaacaaagccaagattcacaggtcaccttttcagagttgagctgagcatggagagtagagttcagcgtgttaacatcgttcagagaagcagaaacccaggccagttcagtctgaccttgagaatatttttcttcaagatcagagcaccgccgggccagttcagtctgaccttgagaatatttttcttcaagatcagagtactgctgagccatatctgtcaagaaacagtcaagcaaatgtgttaaaataaaaagcagattaatcaggtagccaaaaaaggaagcaaaagagcactgaccgacatttgccacctccaaatcagatacacgccgctgaagcggcactggattccaatgcgccagagacaaagctccttctggaacagaggcaccctgcaacctcagccgactagacatctcatcaaccaacacctggcattaaaaacagacaagcaatgagaacaattatatgcctaggtaaagtcagaccagaagaaaccaaaatacctggaggttgaagaagaatgagggaacccccaagtcgtgagaggtcaactgatggctcggcgaaggatcaccaaccggaacaactcgcaacgaatcaacaagaaccaattcagtgtcatcagcagaacccagaactctatcgtcgggtgcgctagcctctaaagcgactccttgaccgaaggcttgggctatcgccatgcaaccagagtgtggaggagaagaccctacgtgaacatccatggaagtatgggagggagaacccactcggacaccctcgggggctgggtctcagctcgcgttacccatccgagccggatcatctccggcaacaccctcgggggctgggtaagcgctagcgccatccatgagggccgagttctctgcaacagccacctctaaggctgaaggaccctcagtcacttccgtgggggcagagcaatccagaccagcctcctgaccctcaagaccgcgctctaaggttgatgaggcacgggacgctgcccgggatgaccccaacccgacatcgggcacatcagcacaaacaaccatcacgcaaccatctgccggctctggcaacagatcttctggaaccatgtcttcaagagtttgatcaaagttcgccaaagataattcttgcaaaccaatgagggcagacaaagcaggagaaggaacaccactactttccccactagctatgtaacgccggctgttcttccgaatcagagggatttcatcctcttcttcatcatcttcatcaacaacacggacaatacacccattgggttcagcatcagatgggtcacacccattgggatcagcttcagcaaattcaggcactggcacttcctcagcaacaggaacagaaggaccggcaccctgatccaagctagacactcgacgaagatgtctcttcttcttcttctgcccctcagcaggagaagtgggttgatcggctcggtgagaacgtttcgggcgaacattgtcagacctctgagcatccaaagctttgccagcctcagggaggggcgccaccaccagtgtttcagcaggagcggcatcagaagaatcctcagctaacatatccaacatggcacttatctctgcgtcacttggattcaaaggcacctcaaaatgaacctgcctctcatcgtcaggaatttctctgagtgagtcaaccaaagcactaacttcttcaggaaagggtcgcactctaaggcccaaaccgctatcactagcaggaggatttgacacgaaactggtaaaggcctgagaaggaggcagattccaggccgagtatgcaacaggagcgccgatgttcgacaccatgcctctgagtatcatctcgagccggctcaccaagtccacagcaggaattcttctgttagttacccgggttgaatcagccaagcctcgatacagataggccggacacactctgtctttcagcggctgaatattcttaaaaacaaagtcagcgaccacagcttctgcagtcagacccatttctttcaacaatccaacctcagctagcagagcccctgcctcagccacctcctggtccgtgggagactcggtccaactcggagtgcggacatccggctgtctccctgaccgtggggggagggaattcccatgattctccccgatgaaccattccaggctccaccccttgatgctatccttgagtgggatgtcgaggtagtcagtcttcctcccacgacgcatctccaagctcgcacccctcaccagctggtgctgccctccggccatcccaggccggcagtggtacaaatacttccaaaggccaaagtggggcaaaacaccaagaaaggcttcgcataaatgaacaaaaacagaaacttgaagaatggaattggggttcagatgggtcagattcaagcgatagaaatcaaggagaccgtggaagaaaggagaaatgggaagagcacgtccgcggataagaaaaggaacataaatgacggattcgtgggtgtcttctgtcggaacagtgaccccacggtagatccgccacgaacagagctccttcggaggaagaactccgatggaaataagatgaagaaggtcggattcagagacaacagacatatggttacctgcgaaaggcaactgactgttgggatcgatgggaggaatgattgcgacagaagaactcgaagccttccgcttgggcgccatctcaacctcgctagcgggcgaagcggaagcaatattgcaggaaagcagagaaagcatgaatgcagaaaagcagaaactagggcacggagcatggaagcatgcgacagtgcagtacatatggagttttcccgggccagatgtcatttctaaaaagtgcccagtcatcacccagccgttatttctaaaacgatggcatgccaagtcatcacccattcgttgtttctaaaaacgctggcgcgccatgtcatcacccagccgttgtttctaaaaacggtagcatgccatgtcatcactcggccgttatttccaaaacggccgacgcgaccgttatttccaaaacggccgacgcgacccaatttgactcagctgttgtttctaaaaacgctggcgttatctgacttcactcgaccactactttcaaagcggccgacgcggtccgttatcactcggctgttacttctaaaacaccgacgccgccagtaaccgctcggtcgttatttctaaaacaccgacgcggcccgctatcgctcggctatcacctcttaaagccccagcctcgctgataatcactcggccaccactactaaggcgctgacatcgtgaaaaaggcagtctgaagcacgactcaatgattctaagtcgctacataagcattgcgttcaaaaacagcctctgcagtaggcgttaacacaatcgacgatcagcaagagggcagaacaatacacacaagagggatcgaaatcattctccattatacggaaagtactaccgaacttacaaatcaactcattatgagctgatgc

SEQ ID NO: 36470 - DNA, 453 bp, Zea Mays
ctaaacacaaggaaataattaaactagagtcagctctctctgatggcacttctcaacaaggatgctaaagctatgtgctttgcaacccttatcgtgatggctgtgatattctcgtcttgtgaagcaggaggcaataggtgccatgctttcccaggatgtgactcgatactgtgctgggcggaatgtgacaggctagggtacagcaaccctaagccacgctgcctttatcccaagcctaaccatgatggcgatgaatgttgttgttaggctaaaaaaaacctgggtgtgtgtgtgtgtgtgcccctttgttgaaacggtgtatcagtttcatgcaaggtggtgtgtgtgtgtctcaccgccaactatggatgttggtcaactatgaataagaacaataatttgtgatgcttatatatgtttactaaattatttattacgggtgcaaaaccccca

SEQ ID NO: 36471 - DNA, 2960 bp, Zea Mays
acgcaattgctaataatgcaagtggggtcacggcaaaggtgtggcgcgtgcgtggacctcgccctcatctcgtctcctccggcggtccggcctgtccaataattctagtattccaccgccgcacacctcctgtcttccttcaccttcgcgctccgccgccgccgtcgattcgtgctgctctcacccctaacctgtccaacatcgccggggagggaagcagcagaagaagctccccttacctccggctatcgcctgaggataaagtggggtctgtaggggagtcttaggggggagcaaaagggataggatagggagagatgaagcaatcaatttcttcgtccgccttcgcccctgcttacgtccccgctactaaccctaggatcattctgtcttttctcgtttcttatccgactcttcttcgttttatgcctatcagttatgaggttgaacgccttcagaagcttctctactagattagtgtaaatagtagacttgttcgagtttagcttggctggaagaattagtctctggtccgtgtttatatctgctagcaataatggctgcgatgaacggagaggtattgggtgaatgtggaaggaacataaatagtctcaagagaaagcgggagagccccgctgcatatgctgctggcgtattctgcacctctgaattgcatcagcatactgtcaatgattctgctgttaggtttcatcttgataaagaccgtaaggcaaagatcgtgtgccacttcaacaagcaggttttgcagagctataagaaattcatgagtagtgcaccacctaagcgtattttgcttcgccaaggtgctgtctggaaagactttccagaaaagattgtcaaattggcccaagctgacttcagggcaaaaaagatgatcacagaaacaggatatcagaaccagctatttttgctggattttgcccatatgacattcatagacacaaagacaggttttcagaggccaattgcttggatcgatgaaaatgaaaagtgctacttcccggaatcatttatacaagatcagaagttatttatgaagaaagattttggcaacggaaatcatgagtacattagtgaagagcgaaatgggacacgagaaacgaatcaccagtttggagcatcagaaagttctgctgaaagctcaaactttgagtcaagtattggagatgtttctagtcctaagagagctagggctgaaaagaatttcattgtaaaaaaatattgtgatatgggagaagctattggagaaaatgagtcatgcactttgttgcctacagcctgtaacctactaccacaccaagctaatctgggtgaggtatcccgtgctcagcgcactattgaagccgtggagaagctgttgctgcaggggatgggttcagttattgaatccaaggacattattggaatctacaggactccattattggatgaccacggacaagtccgttaccatattcaccaaaagcaagtacaggttaccggatgtcatcgtggaaacgcaaatgtccgttatgcatggcttccttgctccaaaagcactgtgcatgtaatgatgctgaatggtgttttgcaagttgataagcctcccaataagtgtgcagcctatggagagggcactctccttacaccagcaaatcgttcggatgcctgtgtgaaatactctgatgttgatgaaaatggcattgtccgtatgatgttgtgccgtgtaataatggggaacgtagaaatagttcaccctggatctaagcagtgccaacctagtaataagtattttgatagtggagtagacgaccttaaaaatccacggcattacgttgtgtgggatatgaatctgaatagtcatatctattctgagtttgtagtcactgtcaaattgccttctaaaaccaaagattcctttgtatcgcaagaaaactgtcagaattcgtctgatctatcactggtgttgaactctagttcacctgattgtatttcacagaagagttccactgttggagcagcaagagtgcagtaattcagattctgtgatttgactcaataattgacatgattgcattattgagattataacttggagctgattatattcgttatctatgatagaaacctccaaatatgataagtttccctgtgaaaccatgctattttagccacgctggagttggttaaagcaccagttaacaacttccttttatgcataaaacaggagatgaacctggaggcacctccagcattgggaggtggatgtgcagcccccatgctaggagattcgatggaaaaggctccaagctcaccttggatgcctttctccatgctgtttgcagcgatctctaccaaagtgtctcctgagaatatggacgtgattattggttgctatgaagagtttaagagcaagaaaataagccgaggtgaactagtgaagaagctgaggcatgtagttggtgatagagtgctaatatcgacgataatgcgtctccaagataagttacctccagtggataagcgtgaggaaccagacacatcggcgtccaaggtggtggcggaaccatgagatgggtgtcaggaggtgggcgaggaatgcagaaagggaggaaccagccgacttgacatagaaaaccctgtgggaagcagcaactatgaagcctcttgcatcagtcttgtgcatggaggctgctgtttgttctctgtatcgtaggtgtctacgtttgcgaggaaattgtatccggtgtttctctttcttcaaattaaaccacgcacatgcagctgccgtactttttggaccattgaagtgtttcgtccgtgaaaaaggctccttttaccttcccgtttgccttcctaagagcatctccagtagttttgtaaaataaaactccctaaaagacgatgtagagagttgctaaataataatagagagtaaaaaattgcatgttcttcaatag

SEQ ID NO: 36472 - DNA, 2646 bp, Zea Mays
ccgtgctcccccgaatttttttcctctccccttccgagttccgacctcgtcgccccgcggctccagctcttcccgttcattccctcgcgccgaagcaactccggaatccgcctgcgcgccaaaaccctagccccagatcccgcgccgcgccgcgccgcccggtgcccagtcggcggcgcccgcgccggccattgccgctcgccgcattgggggcgcttacggcgtctcctccgctcccgaagcagagatctgggccgaggagacctggttgttcgtgggcggtgcaggggatggggcgcgggcggtgggcctcggggatccgcgcggcggcgctggtcctgctcgcggtcgcggctgccgccggagccgccgcgggggatcctgatcccgacgagctcgagcgcgcgtttccaatagtggagccagaccacgggcacacaaaacttcgtctctcagaacaaggtctagaagcaattcgaaggattgaaactcctattgctgttgttggtgtcattggtccatatcgatctggaaaatcttttctcctcaaccagcttctctccttatcttgtgataaaggttttggagttggtcatatgcgagatactaaaactaaaggtatttggatttggggtactcctgttgagatggatgttgatggttccaaagtttctgtcatttatctagacactgaaggatttgaaagtgttgggaaatcaaatgtgtatgatgataggatatttgctttggcaactgtcctaagttcggtgcttatctacaaccttcctgagacggtacgtgaagctgatatatctaggctttcatttgccattgaaattgctgaagaattctatggaagagtgaaggggcaagatgttgcttttgagccagcaaagcttctctggcttatccagagggatttcctccgtcaatcaaatacgagattcgttggcagttatggggaacaacagcactgcttttagcttgcctcagccgcatcttcaaagaacaaaattatgtgatatggaggacaaagaacttgaacccttatatgtaaaacggcgggagcaattaaagcagcttgtttcgtctattgtaaaaccaaaaattgtgcagggcagaactctaaatgggaaggactttgtgtctttcttgcagcagattcttgaggctttgaataaaggcgaaattccatcaacagggtctctagttgaaatttttaacaaagccattcttgatcgctgtctgaaggcgtacagggagaaaatggatggcttaggcttaccagtaccggtagacaaactgcagaaacttcatgagatggcaaatggtgatgctagaattctctttgataagcagcactttggcaaacatcatgctgctcagtcagctctcaagcttgaagatgatattaaaaaggatgtactttgtaggtgtacagaaacttacttctagctaatgaatatcaatcgtcaaagctgtgtgaagctcgcttttctgagtgtgaagataagatggatcaccttcaagtcttgaaacttccttcgatggcaaaattcaatgcaggctttactcactgcaaccaaagtttcgtaaaggaatgcgttggacctgcaaaagaaagctatgaacgtagaatgtcaaagatgcttgccaagtctcgtgctcttttcatcaaggagtacaataacaagcttttcaattggttggtgaccttctctttggtcatggtggtcatcgggcgctttgtcatcaagttcttcctacttgaaatcgccgcttgggtgatgttcatcttcctagagacgtacacgagaatgttctggtcagcggaatcgctgtactataatccagcttggcacatcattgtttcttcctgggaaaccatcgtgtacagcccaattcttgatctggacagatgggccgtcccaattgtcataatgctattatttggggttctttactggagatgcttcggtggtagaaggaagcggggaaggggttcgctcctcccattgtacaagaattcttataactcgagtcgtcgctcgagatcagactagttatacacgcaatgttgaagttattttcttttaaagaatggtacaaaatatctgcctgtagaagaggctaaactgccgaatgtggatcatctgcaagtgcttttggatgggcatgttttgaattttgatggtgccctgccaatgtatctccaattctttttggtggatgaagagaggcggtgaagctgctagtatgggggcggggcacctgcacaaagcctctgttgtaattcgtaccggggtactttttgtgtagctaggttatccttacatgtcacggtcccaattgattgattattgtttacgtccactgcaattttttttggcaagaattttgttttttaacgtcatagatagaaggtagctgttagagcgtgtaccgtgtcaatcatatgttaaaagttataatctggtggtggaatttggaaacgttccttgtttatactgttgttatacagtttatatccacatatatgctatacttctggctaggagctgtgttgtgtttatgttttgcattaagccagtggcactcagaactagcgagtggcagagcgtgctcttcgatggaaaccgaacttgc

SEQ ID NO: 36473 - DNA, 1325 bp, Zea Mays
  misc_feature (1324)..(1325): n is a, c, g, or t
gcagcttactcgtaacggtaaagccaccgacccaactggtctcgtagccgaactgcaagagggaagagaagcatcgcatctctgagtctgaaaccctagccgcctgtctccctgtccggtctccactcgtccgggcgacgagacgacgacggaggaactaccagggcaaaacatagctccccagggctcctcaactcctgaaatttcttccattcactgacctggccacctttttttcatttgaaaccatctgttcatgtgccctgatgcccactgttatgtctgctcgagcatgtttagcgggattgtgattcatgctatgtcatcagcaccatcatgccttaccatgtcacgatagaagtatcaccaacatgacaacatgctatgttactacattgataagcaagagagttctatttatggtgaagcatgttcaatgtctccggtcataatttcttactttggatataagttgttgaacaccattcttagccctcatcatgaatggagtctaccacactagtgctcttcatgccatcagaattatgcaggtgcagtacttttctgattcttttaggtttgggtataatgacgtgctgaattgttattgtaaaacaaaagtggaaatattctcgtgattgtttggatattagttattcaatttttattgtcctgacttgcatgattacactgtaggctttgcttttgtctactttgaggatgaacgtgatggcagtgatgccatacgtgctcttgatggttatccatttggccctggcagacgcaggctttcagtagagtggtcacggggtgatcgagctgctagacgtgatggcaacaaaccagaagtaaatactaagccaactaaaacattgtttgtcattaactttgatccaatggacacaagagtcagtgatatcgaaagacactttgcaccatttgggaacatatcaagtgttaggataaggaagaactttgcttttgtccggtttgaaacactagaagaagcccgtaaggctcttgaagctactcatgctaccatgcttttggatagggtgatttctgttgagtatgcctttagggatgatgatgaacggagtgataggtacgacagcccaagaagaggtggtggatatggtaggcggggggatagcccagcgtacagatcacgtcctagtccagactatggtcgcccagcaagtcctgtatatggttcgtatggcaggagcagaagtcctgttcgtgaccgctatcggaggtaatgccctaggattattttcattggtttgcatgttgtcttgttgtccatgtcatatgatcatann

SEQ ID NO: 36474 - DNA, 423 bp, Zea Mays
cccgtcagagccatctcctcccttgcgcatgccataacagaattccgtgcaaggttagggaaagatccctattccactggaacccgcgcatgcaggacctcctcctctaccttatagcaagctctgcgcgtgctgtaaccacctctgccaggagcaccttgggtggttacaagtccgtggcctccgcttgcttcgtatagcaccatagtcaccccttgctataagccacgggctggcaccttgaataccccaccgtggacggagagaaagagcagaaagaggtagagagagaggacgccagcgggtgccaatcgatcgggcagcacctttggagctcgagcaattgctcaccggggcatagctctgccgtggagccgccatgaaccctggtcgactctccagatccgatccctaactttggta

SEQ ID NO: 36475 - DNA, 974 bp, Zea Mays
cccacctcgcctcgattcccaccgcgaatccaactgccatgccgctcccgatcccctgcccccgccatcccctacctcctgatctcgcgcgcgcccggccacgaatcacccgccgcgcctcccgcggaacacgcctccacccgcgtcgccctaccgcccgcccgcaaacctcgcccgcgctgtcgcgtccgccatctcctcctcgccccactctctctcagatctgtgtccgcgacatcctctgccagcagcagtaagcgctgccgcagcccctaccgcttcccggcctggctctggacgccgcgtaccacggcgaccggcccagtgttttcctctcgcactcgcaggtggccgggcgaaagcgcaccgccacggcggccgtggccggggacggcgtcgtggagaggacggtggagaccactacttcactcgctgctgtgaaagcctggcaggggtttcgcccggttcgccaacgtcagcgacgaccacagcgccacggcgctacacctcgccgccatatgcaaggccgccccgactacgtgcaggtgctgctggagaacgacgctattgtctccgctctcacaggctcctacaggttccccggcagcacatcattgcatctggccgctcgcagtggggacctagattgcatccggaaaatgctcgcctagggtgtggatcatctctagagggactcaacaggacgattccttacgccgccgcgctagagcgcaaccacggggagtgtgcggtgctgctgaacccatcatcggtggagccagtggtgtggcctccccgctcaatttcatcagcgagctggacccggaggctaaggctctcctggaagtggcactgacggacgccaatagggagagggagaggagaagatcatcaagggcaccaagtattctcagccgtcgccaccttcccctcgcgagcacgaggacgatgccattaacgaagcgtcctcagag

SEQ ID NO: 36476 - DNA, 2715 bp, Zea Mays
ctcgtctccaccacttcccctctgcgcctcggcccccacgaaatctggagaccaggacgccattgctcaccttttccgtccagcgcaaggaaaccgcgcgccagagaggccgcttcaggcgcgcgtggaatcgccccgtggccggcggggatgtccggattcgtcggggtcgtcgtgtccgacccttcgctgcaggggcagttcacgcaggtcgagctccgatcgctcaaggccaagttcgtgtctctgaagagagattccggccatgtcaccactaagaacctgccggggctgatgaagaagctgagggggctcaatgaggtggtctccgaggaggagatcgcggccttcctgtcggagtcgtaccctgatagcgatcacgagattgaattcgaatccttcctccgggagtatcttaatctgcaggctcaggtgagtgccaaggaaggtggtgccggcggtggcaggggtggcaagccgtcgtttctcaagtccagcatcactacgctgctgcacaatctcaaccaggcagagaaatcttcgtatgtcgcacacatcaatacttacctccgtgaagacccattcctgaagaagtacttgcccatcgaaccgtctggaaatcagctgttcgatctcatccgggatggggttctgctctgcaaactgatcaatgtagctgtacctgggaccattgatgagagagcgataaataagaaaagagttcttaacccatgggagagaaacgaaaaccacacactctgcctcaattctgccaaggccattggatgtactgttgtcaacattggcacacaggatttggtggagggaaggcctcatttagttcttggattgatatcacaaatcataaagctgatctgaatctcaagaagacaccgcagctggtggagctatttgatgacagcaaggatatagatgaggttttgagcttgtcaccagaaaagatgctacttcggtggatgaaccatcatctgaaaaaagctggctacaagaaaactgttaacaatttctcttcagatgtcaaggatggtgaagcctatgcttaccttttgaaagctcttgctccagagcattcccctgaaactacattggacaccaaggatccgaacgaaagggcaaaactagtacttgaacaagcagagaagttggactgtaagagatacttgaccccaaaggatatcactgagggatctgccaatctaaatcttgcatttgttgcacaaatattccagcacaggaatggtctgaccagtgacaccaaacaagttaccctcacacagacagcaacacatgatgatgttctattatctagagaagaaagagcctttcgaatgtggatcaacagccttggggttgaatcatatgtgaacaatgtcttcgaagatgttcgcaacggatgggtacttcttgaagtgcttgacaaggtgtctcatggatctgtcaattggaagctggcatcaaaacctccaattaaattgccatttagaaaactggagaattgcaaccaagttgtaaaaattgggaagcagttaaagttttctttagtaaatctagctggaaacgatattgttcagggaaacaagaaattgattgttgcacttctgtggcaattgatgagattcaatatcctccagctgttaaacaaactgagattccactcccaagggtccgaaggaaaagaaatttctgatgccgatattctaaactgggccaactgcaaagtgaaggcatccggaagaacatctcgtatagaaagtttcaaggacaagagcttatcgaatggaatgttcttccttgatcttcttagcacagtacagccaagggttgtgaactggaaagttgttactaaaggggaaactgatgaggacaagaagctgaatgctacctacatcattagtgttgcaaggaagattggatgctctgtgtttctgttgccagaggacatcattgaggtgaatcagaagatgatcctaacacttactgctagcattatgtattggagcctacagaaacagccccagtcacagtctgaattgacagaacaatcagaaccatctagcatgacttctgacgcagcctctgaagttgcctcggaggatggtgcttcaacgacagcaccgtccgagtcagaagaggtgaactcgctgtctgatagcatatcgaatttgacaacggatgatgctacttcaaacgccccatctgctgaaaacggaaatggtgtggcagggtcctgatggttatgattatgcaaaccctgttctttttttccccatacagtgctgttacaggaaatagtgctttcatgatgcccaaagttgtcgctaccagaagcgatatttttaatacttctgcttcctgagcatggtagcttgatagatacaacagtcacagatagatatagatgccttttgttcattggatccgcttatactatagtgggggaagataatagtatgtgtcgctggctgggtattttctgtatttctggcatacacccatgcaaaatttactacctcctctgtatcttatcggtcaattcgttcatatgtttattggactagtcaaagcttgtaatgctgttgctgctctgaaccgtgcctgtacataacatatgcttaaaaaggttttgcattgtcctttagtttctgtttgtactgcttgtggatgcgttctttgcatgagatttgttatcatgag

SEQ ID NO: 36477 - DNA, 2425 bp, Zea Mays
gttgcagacagctacagccgtatgtccgtgtgacattctgctcagtcggccaatcctcaccaaattctccatcaaatccaaccaacccctcaccgcctatgccgccgcgggccgcctagggttccggcggccgccgctccctcgccggcgcgatggggaacacctgcatcggtcccagcgccccctcggaccgccacagcttcttcaacaccgtctccctggccgtgctctggcgacccccggccgccgctgaccgcgccgagccttccccgaccgctgaacccagctcatccactccctgctctcccccctccagggcccctaaccctgtcaccatctccgactccgagcacccgccacactccacctccaccgccttaggccccgccgcgccgcccaatcctaacggcaagcccaagcccaagcccaaggtgaagcgcgtgcagagcgccggcctcctcgccggctccgtgctgaagcgcgactccgagcggctcaaggacgtctacaccctgggcaagaagctcgggcaggggcagttcggcaccacctaccagtgcgtcgagaaggcaaccgggaagcacttcgcctgcaagtcaatcgccaagcggaagctcgtcaccgatgaggacgtcgaggacgtgcgccgcgagatccagatcatgcaccacctggccggccaccccaacgtcgtatccatcgtgggagcctacgaggacgctgtagccgtgcacctcgtcatggagctgtgcgctggaggggagctgttcgataggatcatacagcgggggcactactctgagaaagccgccgcacagttggcccgggtgatcatcggggttgtcgaagcatgccattcacttggggtgatgcacagagacctcaagcctgagaatttcttgtttgtgaaccaaaaggaggatgcacccttaaaggctattgatttcgggctctccatcttcttcaaaccaggtgaaatattttctgatgtcgttggaagtccttactatgttgcccctgaggttctgaaaaaacgctatggctgtgaggttgatgtgtggagtgccggtgtaataatttatatcttattgagtggggttcctccgttttgggctgaatctgaacaagggatatttaaacaagttctaaaaggtggtcttgatttttcatccgatccctggcccagcatttcggagagtgcaaaggatttggttaggaagatgctaaatcgtgatcccagaaagagattgactgcacatgatgctctatgtcatccttgggtttgtgtagatggagttgctcctgacaaacctctggattctgctgtcttaaccagattgaaacagttttctgcaatgaataaactaaagaagatggcccttagggtcattgctgaaaatttgtctgaagatgaaattgcaggattgaaagagatgttcaaaatgctggacactgacaatagtgggcagatcacgttggaggaactaaaaattggtttgaagagagttggtgctaacttaaaggactcagaaattacaacactaatggaagcggccttgcttgaatgaagattatgctctgcaactttcaggcagatattgataacagtggttccatcgactatggagagttcctagctgcaactttacatctgaacaaagtcgagcgagaagacaacctcttcgcagcattctcatactttgataaagacggcagcggttatattactcatgatgagctacaaaaagcatgtgaggaattcggtatagaagatgcacacctagaagatatcatccatgacgttgatcaggacaatgatggtcggatcgactacaacgagtttgtaacaatgatgcagaagggaaataacccactagggaaaaaggggcactgccagatgagctttggtcttagagaagcattgaagcttggctaagtggcatgatcaatcctgtgtgaagtgccattcggcttcatatgccaactttagctgatgaaactaagtccgtgaatttgggacgccggtaccaaaggtggagcaagtgcgcgatacgattagctttgggataccaactaagcagtgagcatgcaggaacacattggtgatctttcgtcgttaaccccccatgtacatggcttttttgaggtgggataggaatggcggttgtgtttcccatggccattctttgcacgttatgaagctcagctgcaggatgctcttatatagagagaaatgttagtcacatcacatcgcgtgtccatactgtatagcgaaacttaacatgttgtaatatcggtcggacaatgtgtgcgtgttgtatgttatctttcttagatagaggcacaggcttagcgttgtcatatatgtattgcaagaatatgcaggctgtatattaaccaaatgatttttttgtgtacatttcag

SEQ ID NO: 36478 - DNA, 2696 bp, Zea Mays
caatttctaagtaaacaaataccgtgcgtccctctccgtaatcttctcccacacgtctgtgtgtccctctccatgcgttcctcttctcacgcagcctctcctcgcgccaccacctaccatcgcgccaccacttgccatcgcgccgccaccttccctctccctctcaccgctccacggtgacgagccccgccaccccgcgcctaccgccgacgagcagtgccactccgtgctaggtctattcaacaacaggcagaacagacacctctccaacaccccagatcttctattcaagaacttgctccaggctagaggtaatctactcgtatccgtctgatctattaaacaaaatacctgcagtgtgcatccatacagattatcagttttgtctgtgcgagctgtgaacaaataattatcagttttgtctgggcgagctattgtttacacgagtacagtagggactagggagccgatgaacagctagtataattatcagaacaactagtataattatcagaatacctactgataatagtataattatcagaacagctagtataattatcacatttgtaagtttagtcactagtttgatttttctaatatgatttttctacactatccttgaacaacagtatgacccatcttcctttatctacacgaacgcggaagagaaatttgacacttagaaatgtaacatttgccattatgcttatgtattattatatcttggctttattagtattatcacataagtggaagagttggaagatagaaaggaggataaagattaaagaacttagaagtcaatgtatgtaccatctaatctgtgagagcaatgttaagtgtataaatgaccttcgcatcgataggaaaatatttcatatattgtgtgagatgcttagagatgttggtggtttgaggggtacaagaaatgcaccattggaatagatagtagccgcattcttacacacactggctcatcatgtgaagaatagaacaatagggggtttcttcttaaggagtggtgagacagtgagcagaaacttcaatgcatgcctcctagcagtattgaagcttcaccaattgctccttaagaaaccagaacctatacctgagggctgcacagactttaggtggaagcacttcaagagttgcttgggtgcattggatggcacacatgtaaaggtgattgtcccaactaagctgaaggggagatataggtcaagaaaaagagaaattgtgacaaatgtgttgggtgtttgtgcacctggcatgtagtttatatatgtcttacctggttgggagggttctgcacatgacaggcgtgtgcttcgagatgccatctcgacaccggatggattacgtgtccctcaaggcgaggttgctattatcttgttgatgctggttacacaaatgcaaatggtttcttagcaccatatcgaggacagaggtatcatctaggaggtttcactactcgacatgaaccaatcagagagctcaagtgttgctcggggaagagggaaaacaaaaggatctggacttattatgaggatgaggagttaattaaagcactatatgagatatcttttgatccaaagtggaaaagtgagggaggttttaagaatgggtattgttatgttctagaaaatgaactcaaagcaaggctaccagggtgtggtctcagtgctattccacacattgagtctagagtgaggcattttaggaccaagtatggtgctattgaggtcatgcttgctaaagagtggttttaattgggatgacaacagaaaaatggtgcaatgtgagaaacatcaatatgaagcccattgtaaggataatcctgatgcaaagggactttatggtgttgcatttccatattttgataccttggctgctatatatggcaaggacatagctactggagaaggggccgaggggcttggtgaggctataactaacatggagaaagaaatagctatgggagaagattgtccagtagtggaagaggatatgatttctatggatacaccacaacggtctatggataataggaactcagatcattcaacttcatcgagcagcaaaagaaggaagaaacacaaagatagtatgtcaagtgacccattcttggatctagcaagtggaatccgtggtgatcttaacaaagcctcacaacactttggaaggatggcagaagtgatggagatggaagcaaaaaaggatcaaatgcaagagttacaagagaagtctgttgttgagttgactagacttggttttgggggtagtgaactcctcaaagccgctactatttttgtgaagatgaagctcaaaggaagtgacttgtcaaattatcaatgaagaatgtcaggagcatttggtgaagagtgattggcatatgaacttctggaagttgaattttcaagacgtttgaagtcctaagacatttctagatcatgaaaattatgaattcttaagactagctttattgcctggctgtgttgttaactgtgtgtgaaaataaactgttgtttgaaacctattatgtttgctagcacaaagctggtagttttatttgatgttcagcaagacaaataaagctgctaactttattggttgtttgtgttgtcaactgtttgtgaaaataaccagtataaagttgttgtttagaacatgttatttgtgctagcacaaagctg

SEQ ID NO: 36479 - DNA, 1413 bp, Zea Mays
ttgggtgatgctatcctatcctttatccgcgtcatctgctggacttgttcttgtgatgcctctgtgacgagtttgcgtgctctctgttctcagtttaatatcgtcatagtcagatgtccaccaaacaaaaattgaaaaaaaaagaaaggtaggaaaccagttttaggtaacccaccactcctaccgcttcttattagatgggcattttggtcatcatacatggcttgaatgagcacagtggaaggtacgtgcactttgctgagcagctgacagcatgtggtttcggagtatacgcaatggattggatagggcatggtggaagcgatggcctgcacggctatgtgccttcactagattacgtcatcgaagacatcgaagtgcttgttgacagaattctgatggagaatccaggggtcccttgtttcctcctcggccactccaccggtggggctgtcgtcctgaaggtatggcaatgcgaagctttccatcagcatattcaggccgggtttagacactgaccccctacttctctgggccctgtgaacgaacgaacggataccctgacggccgggcagagaaatggtgcaaaaacgttagcgaagtagcctggtcgttgaaacctgaaaaatggtctggctgctgctgctgctgctgcatggcatctctgtaccctcacatcagggagaaactggaaggcatcgttctgacatcgcccgcgctgcgtgtgaagcctgcgcatcctattgttggggctgtggcgccgatcttctctctggtggcgcccaggttccagttcaagggcgccaacaagaggggcatcccggtgtcccgcgaccccgcggcgctgctggccaagtactcggacccgctggtgtacacggggccgatcagggtgcggacggggcacgagatcctgcgcatctcctcccacctgctgcaccgcctggagaaggtcaccgtcccgttcctggtgctgcacggcaccgccgaccgggtcacggacccgctggcgtcgcgcgagctctacggcgcggcggcgtccgcgcacaaggacctgcgcctgtacgacgggttcctgcacgacctgctcttcgagcccgagcgcgacgaggtcggcgccgagatcgtcgcctggatggacgggatgctccggctccggcggcaggctggatgaagggatggccgtgctgcttctctccttctaggtggtgttcctctccaaagtataataatagatttgtgtgccaagataagatggatgcatttgtgctgtggaactacgttacgtatctatttatatttataacagcggggtaaaagggtcgttttgttttggtgtaaacgaaccaaaacatatggatcaaaatcagacgtaaaaatcagaaacattattacatagagtataaaaataaa

SEQ ID NO: 36480 - DNA, 898 bp, Zea Mays
caggaagcctccactccttctccctcttctctctcttctctcctccccttgctcttctctggccgccgccacttgcccggacttcctgcagccgagcgcccctgcagctccctgcaccttcatcctgcgcgctccagtcgaccgcgcactgggaccagcgcagtgcccagccgagcagcgcgacgcccggtggcgttcatgtgcttctcgcgggctgattgcaaatttgttcccctaggactttggccgttggatggtgtactctgcgggatccgcaacctcctactgagctcccgcacagaggggcaggcatgtgaggctttcgcaggaagtgcaggcagccggccgtcgacaccaagcaggccttgcgcttatggcagccgtggtgctcggtcttatcaccagtggtgtcgttagatgccaaatgcagtttgctctgcatggggattttgctttctggtgtctgtcccgttggaaatgggtagttcctgagtgacgaacagacttcccatggcagctattctgttgaggatgtgcgaaaggtgcactgcagagtctgagaagtgagagaaaaaaatgacaagtgctgtttaccgctcacccatttttaaccaatgccacggtgatacaattatctgtgctaaagggacaattgtttcaactaaaccaagcaccacagttggaggccagatccttggaaggcaatattgtgaaattattgtaacttgtgtgctaaaacgagatacaattttgcctcgccctggagtgatgtcgctggtggtgcttttgtgactgatcatctctggagcttttgtgaatgatctagatctagctatctatctgtaaatgatctagttgtgaatgatattataattgtgatgcttttgtgaatatataa

SEQ ID NO: 36481 - DNA, 1700 bp, Zea Mays
aagctacgctagcgtctgaagcggtggaaggaaagacgaacgaagctacagctgccgaggtccccgttcccgcccaccgaggcgtcgcgcatgcggccacccgcacccaggcactggcccgggggagcgaggcgtggaggcggagcaatggcgggcggtctggaccgatccgtgcaactgtaggcgcggcgcggggggtgttggctggtgcgtgatgggatctgggagcagcaaggcaaccacctcctccacgtcgcccacggcggcggaggcgggcggcgagggtaagaggccaaatggtagcgagaaggcgaggagggggaggagcctgctgccgctgccgagttcctcctgcttccgtggctccacgacgccttgcgattgcgacgtttccgcagtggcggtggacgtcgagtgtaacaagggaggggagactgcaagcctaccttcactcactcacactacaaaatctgatgaagatgttcttgcaacgcctaagtctcatcccggtgaagagataacactaccttcatcagatagggaaagagatcaagatgatggcgtgctacagaatgctgctgccactaacactttaacagcagccagtcaattgacagatccttctgggaggtcaaggccacgttttggtgtcaactttgggttgagtagagctgtcagcttgggatcatcagtagcctgctctattctgtcatctggcctcccgacttctgctaacccaggtgaaggtcggggtgatgtggatgactcttctgatacagtcatctcccagcagggtagtgcaccaactgctgggattgattcgactctagacatgcttagagatagtgtcacggcacaagctagagcagctcgtcaggctagaagaaatctgcaagaatctgaagatgctatcttgaggaactcctacagaaggatgggatctcaggaaccttttgaaggcagtgttcggtttagccgaacattaagtgttgggcggcttcgggacagagtcctcaaacggcctccattctcagatgggttattcacccctgcccttctttacgatagggcggtatggttgtctggaaatgctagtgctaggcaagattcagcagtaatgcaaaggactaattcagacaggagttcagaatcgcgctctgatccttcaaccaatggtctgtacaacttgagctctgagaggcaggccagtaatagtgacctactggagcgtagatcagtttttcttgagaggaggcggaggatacggtctcaggtcagagctctgcaaaggttgggcagcaggtttgaaaatttatctggtcatgagaggtcctgcatactatctggtcagcatagaacaggaacttgcaactgcagaacaggtagtcgacaaggcaatcctgatgaagaaactagcacaagggctagcatatcaagaattgttatgttagcagaagcactatttgaggttctggatgaaattcaccaccaatctgctgcgttatcgtcatcaagaccagcgttttcttcaattggatctgttcctgctccaagggagattgttgagcgtcttcctgcaaaagtgtataggagaccattgaaataccacagtgaggaagctgcacaggtaaaaaaggtaaaaaggtgcgcaaatagttatgtgtgtgctggttaaattctcacttgagcttgttactgaa

SEQ ID NO: 36482 - DNA, 3204 bp, Zea Mays
ttacaaaatccgaaaatcgccgtaaaatccacctgccgtcctcagtcctcactttcgtccaccgccttctcccgccgccgcggcgttttcccgtctccgtcttcgctcaccgacctctgggccaggagtttgcgctccgattccccgccaatgctcgggccagggcgttctgctaccgccttgctgtttctggcggcgacggcgggagatgtcaagtttgtcatggataggccgcgagctggtcaggctgcggagaggacatgggcacagggcacagggcgggcttgcggcggtacggagagcgcgcgggtgcttaccaccatcatggcgcctgatcaactctctgccatgccacggaatgcttgcatgatcacggatgtgattaccaccattaaactgcggtcctgcctcgatcgatggatgaaatttgcaaggttagcggggagctgagattctactgtatctgcacttttctgcctcattttgtgcatttgcgtgatattggtttccatgtaactcttgacaactgaaaaaaggctgtatgttattaagcctccgcgctgtattgacctgccagctggtcattccagagctacactatgacggaactagagtgattttccttgttgtccatgcacagctagactgtaatgtattgcaacttgtggaaaggtgaacaccaggaaagaactgttctgcaaagagaacatatattgccaagcggttcataagaaaacaggcaatttgggaaccataccttggtatttaagacctcttgacgacttatttttatgtgggaaattttagttccgcttgcaatcatacatccaatatctcaaacagttttttacgatcgcaatggcctgaatgtgttattgtttgttacgattaagaatgagcgatcggtgatagtggtgggacagtatatgctgtaaaaaccgcccgctcgaggaacatgatggtacttgtagtggtcaccgagcagcatggtaacttgatcctcaactaaggatgccacaaacaagtgaagttgtcatttaccgttgttgttttgacaggaataagagtataatggttgggtactataggtaacattgttcattgagatgaatatctgggaggattcatgggtgtggctctggaagcatagaaatgtctgtgtgttcaatggagcctccccgaacatcttcaccattctccaaaatatccatgatgatgctaatctttgggggctggctggggcaatagcccttaggagattatggccttagatcttcagggtgttctccctgggcttgtggtttttctgttttatttggctgccaatctggcgccttgtatttggtctattttagacctttccctttcttcttaatatatttaatgcgcagttctcctgcgcgttcgtgaaaaaagtcagctgaaaagattatacgtcagtatgttccattttgtaagcttgataaaatcgttaatggctattcaggttttttttaaaaattaaaccaactcctgtaccaaatactgaattcatcatatactactcagttaagtttcagtacattgttggatacaataaatgggtatttgtcactttggtgtgattaccagcatttttttcgagtaattgcctaggcggcaaggcgtacccgaggtgccactggacggcacaaggttttagttacgccatatcgcctaggcttagcctagaaggcacctaggtgtccaggcgtactccagtgtgcgtgacaccgcaactccacaaaaacataattttttattaacttttcattttttatgcgtatcttgtattctagactctagcatttaatcagccatgcagaagtttctcttgccacagcaatacaggtacagcttcattctagccataacatttatatcccgatgatacaacggtgttctacccgatgcatttatatactgataatataatgttcttctacattaaggagcgaatctgcattaaatcttggatatcatttttgaaaaggcgaacgttaccgctcctatgcatctgctggctatttatatccgccgtgctagtgtcctctctcagttgcctcataatctccttgttgctccttcacctggaaagcgaggtagcgggtgagcttcacgggttggatttgaattggttacttcatcgatgtctcaagggaacacaacaaaggcatctgagtgctctactcctgcaattctgaatatgtccgatgataatggtccgtctgagatgggtgttggtcagccaatggttgttggcaggaagctgcttccaccaattgtaccaggtggtgaaccaatttttgtgtgtgaaaagcagtatgctgctatccttcgtctgcgtgaacgccggcttcgtgccaaagaagcaagggagcgaaggttgctccaagccaaggaagagcccaatggaggaagcatggtggaatgcaaccctgccccaggagacagtcatcagcacttaatcacaaccagtggataccagcaagtgaccactggtggcagtgaggcgcaaagcagcatcccattaggtttctattggtatgttttcacaaccagtgaaggtgggcaaagcagcacccctgctggaatgggtttctactatcccttcaacacaaccaatggcggggaaaatgtcggtggcgtcgcctctggcagtgaggtgccaagcagcaatgccccaagcggcttcttttggcccctcatcatggccagcagcgaggaaaacaatggtgaggtcacctacggcagcatggtaccgatcagcaaccctgcaggatacttctgttggcccgtggctgtgaccaatgaacacggggaagacactggtgagtctgccgatgggggcgaggcgccaataagcaaccctgcaggagacttctgcagttggcctgttgtcgcaaccaacgacgatgaggaaaatgtcggcgaggtcgcctacaacagcgtcctgaacctcgaatcacctgaccacaccgacctcctcaggatcatgatgggcaacaggtacagcactgatgaagcctcggagcagttccagaacgtggcccgcctccaggctcctggcttcaccgccctcctaaccgtcatgaacaacgcagggtacggtccggctgcggactgtggcccccacgatgcgcacaaagtgatgacaaggttagaagggtggtagaggtagaccag

SEQ ID NO: 36483 - DNA, 3502 bp, Zea Mays
cacggttctgccctgcgacaccacccacgcccgtctctccgaagccgccagcgtctccacccgagaccccgacccaccccgcctcccccgccgccgcgctcgcgctcccccgcgacagccgccatacgccctatctccgccgtgcctgcgcctcctcccccgcccgcccgagacccgccaagtttcccttccttgcacggcgagatccaccatcggcgcccccttccctggcgagccacagccgtccatgttcctggccaccggcgacctcccttctctagcccttggcggcgagccaacacctcctcccatggctgccccccagaccccagtcccgtccgcgcatccgctcttccgtcagcgacgcacctattctcccctctctccccgacgtcgcccatggcgtggacggcgacctccctcaccctgcaactctgcacgtgtaagggccgtgttgcccgcctcctttccccacaccggcgcagccccctgtcgccgcggccccttccccaaacagcacggcaccacatgctccccctgccgcgcccgcactctccttccccaaataacacggccccacatcgctggttgcctcgcctcgccggggacccagcacgatggtcagggagctggtgggtgggggagacagggaggagcggaggaggaggtcaagctcaacatggacattgtgttcgtgacgctgccttccccaccgacaccaacgactcactccagaacccggatctggggcccttcctcctcaagccatggtattgggcgagggtggcgccgcctcgcgtgcttgagttcgccgagcgcgccgccagggtgctcgagcgaagaggtgagggcaccgagctcgagctcgccatgaatctccacatcgctgctggcatccactgcggactcagccaccaagccctgacattgtagccagtttcttgcaatcagaacgaatgccagttgatacaagtttgtggcagagatttctctgacacgccaatcagtcttcgatgcgaatgcttgttgctcatatggacttgtggttgtgataatgagttcatctccgtgcacatttgtcgtccttgtggttacagcagttaactgagtagtctctcttgactgcaaaacaagcaatctgttgcctctgctgtgatggtggagcaatttcagcgccaagaatgatatctcgcattttagattgtgtcagtgcagaagtattaacattgtttttctttgcataatcagaaaggatgaggtcccttagtgcacactcaaccttcaaccactgttcatcattcagagatggccatatatgatgtgtttcagtaataattgttttgtcaggtttgagcaacatctttgccttctcattattcacatgaagtgcacgtagaataagcacaatgtgggagaatgttgtgtatgatgatatacttttcaaccaatcatcatatatattataaagaaccatctgtggttcagttgccttcagtataagatcaccaaacttctcaatcttcaagcaagcctggaaaggaagctgcagctcactgcccttaataacaatgttagggaagtcaggtagatggacctccaagggatccaacatgcccttccttgtcacaacaatttgctttggctgctcttctacaggaagagatcgaaccaatgcagcaacctcctcagcggttttccacttggccagctgcccaagacgcttttgccccgcccatacacttgtgtggataacctgcacattattatccatactcagtttaaacctacctatgttcagggttttacagaaaaacaaaatcacatgaaaactagagcagaaattcgaaaagaacaaaccttaagaaaaagttgacccgttcttggattgaaaaatgaaaatagcaccattaattggtttggtggtcaagttaccctaaaatgttttgtgaatagtgactcgatacacatttgtatcatccacgaaccatatgatttgattgctgaatatctctccatagttctgtgaagacaggtatggttcatatattcaaatatccaaacctcatttggagttgtgataccagcaacctttgacatcgattcaagatgctactggagtgttattcatgtgagtgtaatttagtacatgatccaactggtaacaaactttatgatactagcatatcacataatagatgagattactagaaacagctcatgttattgaatatagaaatttcagttctattgtttttacacaaatttgtttgtgatgcttcaaaccgctaatgattttttttaaaaaagttgtgcaatgagcatatcacataatatatgagaatcttaggaataaaccaagttgctaatgagtaaaattttggctttgctttttaaaaaatatgggttcaagttgttcctgacagatgccactgcacaaatggacgttgacacgttgtagtgatcacactgtcacgagagctgagcaaactacagcctgcaagagctacacgtggcatgcttgaccacatcatggtggagaatgcaagtgttaaagttgcattgaatcgcattgccgttgtttctgtcctggatgcacataccctgtcagtgatgtcttatgaagcttggaggctcatacatctgtttctgttggctctctctagctatatgcagtggagctgctaatatgcatgaagtttgggctaggtgagcttcctctttcacttttcaaaccagtataggtattggccgatgtcaagaagacaaggccggcgacgagaggacgacagcgtgcaagaagagaaggcccatgttaggcgcaactatagggctcaaggtcaatcagttgtggtcacacttttccatttttacgttcagctaaactgaccccctgtctcatggtgcaactgtgcaaggataggcaacaagtgttcaacaatatgtctgtggatcaattgacctgcatttcagcttttagttgaggatcaaaatctcgtgtcgttcagggccctcggtagagagacattaatgtgtcggcaccgtggatcgtcgcagttgtgggtcactgtaacggcactggtcacaggcaccatctgcctctgttcgtcctcctctattggcctcctcagcacctacagggtccaggatgttgttgcaaatgagttgtggagaaccgtagatgcaaatggttggagagcatcttctgcaccacacatctattggcctcacataccagctgaatctgagagcaatgggtacttgtgtgtccggtgcaacggcggcttgaccttacaaatcagtgttgtatgactaatataaaactctctctctctaaagtagcatagttcaccatgcaagttttgtgtattcatggcaacatatctgaaagatttaagattacttctaccttgattttgtagatatgaaatgttgttgtcattgcacgaatcattaatgacttgattttgctctctatatgctatcttagaagtttcagagttca

SEQ ID NO: 36484 - DNA, 2184 bp, Zea Mays
agtttcgactttcgattcccctcgccctcgccgacggccagacgccgaacgtctcgccctctcccgacgctccccgcctcccccttgatccgccgagcgcggcggccgccgccgccgccgaacccgatctccccccctcccgcgtgacaggcacggcctcccctcggttggaagggtttgctgtatcatgcattttttgtggataatcttcattttctcttgagtcaccgattcttttgttgtcttcaaaatgtcgggcttgctgaactcaaaccttaatagttcggcatcaaatctttcagactcagctggaaggccatttacagcatccttttcgggtcaatctggatcaattccaggttttcatcattctggcttgcataacactcatggaagttacaatcttccgagtatgcctggatcacttgcacaaaggaatgctgccatgagtggccttccgtcctctggggttcaacaacctggaggtagcattcctgggagattcccttcaaacaaccttccagttggcatgcctcagattcctcatgcacattcaggtgtcagtggtagagggatgaattttggcgcaggtccggcatttagtagcagcatgaatattggtggtaacatccaaggcttatcctcgggcttgggctccggtggtaatcgcaattctgttcatgggatgccagtatcttcatctataggaaactcgggtcaacggataagttctgtaggaaatatggtaagtgcaagcaatattggaagaaatataggcactggtggtttgtccgtgccaagtattgcatcacgaatcaatttgaatggtagtggtgggagtggtagtctgaatgtgcaaggatccagtcgaatgatgaatggattgcttcatcaacaagcaactcctcagttgataaatatgcttggaagttcatatccaacatctggaggttcattatcacagagccaaattcaagcaggaaataattcttttagttctatggggatgttgcatgatgccagtgacactgctccatttgacataaatgattttccccaattgtctggtcgacctagttctgctggtggtccgcaaggacaatatggatcactgcgcaagcaaggagttggtgttaatacccttgtgcaacaaaaccaggaattcagcattcaaaatgaagacttcccggctttgcctggatataaaggtaacccttcggattataatgctatagagttgcatcacaaggaacaactccacgataatgtacctgtaattcaagcacagcagtatcctatggcaaggtcaggcttaggaagtagctacctacccaatcgacaacaacaccagcaaggtgctaattcagtccagaatggcggatcccacaatattttactgagaccacccagtcaaacttctagtttgggatcatatgatccatttctgcagcaataccagcagcctcagcctcaaaatcatttcagattgcagcagatgtcttcagctgcacattcatatcgggatcagattcaaaagattcaggcgggaccgacaccacctgatccatatggcttgttaggatttttgggtgttataaggatgaatgatgctgatttagcatctcttgctttaggaatagatttgacagcattgggtttgaacttgaactcgccagataatctatacaagacatttggctcaccctggtcgaatgacccagcaaaaggagatactgattttcgaattccagcttgttacctctttgacaaaactcctccactacagaccttactttttcagaggtttcacatagtaacactatttttcgtcttctatagcatgccaaaagatgaagctcagctgtactctgccaatgaactgacggggagaggaacaaagaaacatataacgatctgcaggaaggactaaggaggcaggaagtcgcagaacagaattggggatgtccaattaacaccccttgtaattactaaaactgtgagcgaatgttgcgtttttcttgcactccccccttcgccctcctaattaaactgcctaatgttcaggattagtttttctccagcttcaaaataacaacgcatagatggttttgatgttctgtcctctgtccaaccatatcatgtcgatgctcagcgaaagataaaatcataccatgtcgatgatca

SEQ ID NO: 36485 - DNA, 1905 bp, Zea Mays
aacttcagccattcgattcttgatttgtggtccctggtgcagcgaggccacaagggggaaacgaccggaggcctggttctagagactacacaacatatcgcgatggctctatctgacctgaggtctatgtctggcttgctggcccgcacctctctcgatcccacatcggactcatctccttcgattcagcagaggacagcgctctgcctctccactacttgacagccacggatccttccatccctcgcctagcgaacagacccggctggccatcctcaacgcacccctcccattttccattcggatgtatgcgtgggtgaccagcacatcgaggagttccacaagcacacatgaggtgtggatgggcagcgcttgaagccggtgtgcacgaagtgggctttgcatttggagcccgcagccgcggagggcctagcgcggtgcggcatggcacgtcgaacatcacaggacatgtggcatcgatgggattcaactatgtcaggctcacctgaccgacctacctcctcaccaacgtcgtgctcgctggagcgtgtcggcgtgcaggagtgtgttgttttgtagtccctatttttagtccgtggaaaagccagacgcaaagtgaagtgtagttttctagaaaaaaaggtatctgaaactgaatccaaagtacgaagtcagtaatgaggagtgtgtctctctcaggcttgaactgtcgcagagttcagtgaaactcgacactatctttgaggcatctttcaagttcatgatatatgatcagttaatcggaaagcacaaggtgcatctaggtaaccacagcttccagactgcaagtacgagctctgccatcgcattcatgttacctctgaaagcactcagacaatcctctagatttattgtcaataacagctgcgtatttggcattggcttcatcaaagttgccactatcaaagttaacacgacgctagaaacactgtttgtcaggaagatgaacatcttcaacgaggccaaagtttacacttggaaaatcgaggatttctctgctctgaagaacccgtcccactcaccggagtttgagatcgctggatacacatggtgataaataatcttttcagcttgcagtacttgacatgtactccacatgactgaacgttgatatcataatctgaacttccttgcaatgctaagagtggttctgaaccacatcggttttgaaaattttacttgaaacacaattatagcagtcctgcacgtcgtcaacctgattgtgtgaccctgaccaatttgcaggattatctctttgaatccatcctacgatggtaacagcctgtccttattcctgaaaatgaagaagacaaacgacgtccccaaaggctctgggagcctggtcgagttcgctttatccatcaaagaccaggaaaacggcaaggacaggaaatatccaggcaggtgccagttctcgagcaaacaccatcgctggggatggaagaagttcatctcgctggaggacttcaaggactcgtcaaagggttatctcatcaagggcaagtgctgcatcgaggctgaggtcgcaatcagtggctcttcgaagacggagtactctatgtaatttgatttgtgagagctcatgattagtgtttattctcgctagaaccaactatatagcgtgttccatatgtattagcatgccatcgagactctagcttgctctatagatatctcgacgtatccgctcttcaagcttcgttctgtcgagttgaatgtggtctaataagtgaatatatgcaaactgggatcttattattttaggctattctggcaatctatcttgattgcgacgaatgatttcacagcagttcttttttttctctatctaatttttgctgtcgagtcttattagttatgctcttc

SEQ ID NO: 36486 - DNA, 1302 bp, Zea Mays
aacttctgtcaaggactaccagaatttcaatttccgacaaccttattctcaagcttcatactatgtctctctgatattggaagataaaaaatggcctgtcgctgagaaacttgaagctctttctaagcttgaatcagatttttttgcaaagtttgtaccacacctactatcgaagacatttttggaatgttatgttcaagggaacattgaaccaagtgaagcaaaatctgtcgtacaagagatcgaaaacactatatttaatgcccccaattctttgttcaaatccatgtctccatcagagtatctgactaaaagagttgtcatgcttgaaaatgagttaaaatgctactaccaaactgagggattaaaccagaagaatcagaattcatcagttatccaatatattcaggtacatcaggatgacgccattttgaatatcaaacttgagctgttctctctaatagcaagccagccagccttcaaccagctgcgaactgttgaacagcttgggtatataacaagtctttctctgagatccgactatggagtcctggcactccaggtggttatacagtccacagtaaaggatccttcgtatcttgatggtagagttgatgaattcttcaagatgtttgaaagcaaaatctatgaactctccgacaaggacttcaagagaaatgtgaaatcactaattgattctaaactggagaagtttaaaaacttatgggaggaatcagatttctactggggagagattcaggcaggaactctgaagtttgatagggtcgagtctgaggtcactatgctaagagagctcaagaaagaagaattcatagagtacttcgaccagtacataaaagtggacgcgcctcaaaggaggacactaagcgtgcaagtcttcggcggcaaccattcggcagaattcaagacggcgatcgccgaagccgatccgcccaaaatgtacagaattacagacatattcggcttcaaacgatcgaggccgctgtacagctcactcaagggaggtccgggcaggatcaccatggactgacagccatcacgcagctattccctagttttcatttacagttacagttacatatccagtgcactaagaactagaaggcgccatgaggagcggagagaccaacacaaacagcatcttctacacaccataccaatatacagtttgggactgacagcccgtgccggacgccgtccggagaaccgtcaaggcgccgccatccgcgcgtgcatcgccggcccggcttcagcacgccccggtgtgttcgcgaacggccg

SEQ ID NO: 36487 - DNA, 1610 bp, Zea Mays
tcgaaggtaaacccccgctccacctccacctcagtttcccactcagagctccaatggccgccgctctcccgcactcccgccttcacctcccgctccacacgcccagtcccacctcccgccgccgcccctgcccccgttcccgccgccgccttccctccttcgtcgccgtatcgcgcctccagaacaccaccgccgcgacccacccggtcctcccgcccccggctccgcccccctccgccgcgctcctcgccgccgagggcgcctccctcgcgccgcgccgcgagcaccgcttcccgggctcggtctcctccccaacaagcaccgcctctgcctctaacgaggcggagtacgccgtcctgcttcgcgccctccaggtgcgccgcgccgtcgccgccgaggtgctcgttgccgcgctcggcggcgggaaggtcggcggcctgacctacatcaagaacctcacggggcggatggggccgttcgtggaccgcgttgttgtcgaggccgcagcgatgcggcgggaccgccccgagctcgcccacatgtccttcaacgcccgtgcaaaggcgtacatccaggagtccggccttgtggagcttgtcaagtggttcaagcacaactcgatgacatatccccagatcgcaaaagttgtttgcgcatgttctggcgatttggggaaagttagaaagatgataaagtggcttaggtcaatttatgtaaaaggagattttttggggcgtgtccttgcaaacggtggatctttcttgaaccggagctttgaagaattggaagagattattggctatttggaaagccttggtgtcaggagagactggattggttatgtgatcagcagatgcccacagctgttgagcttgtctatggatgagttggagacacgagtcaggttttatacggatttgggaatggacaagaaggactttggcacaatggtctatgattatccaagagttcttggatttttaagcctggaagagatgaacagttcaatatctgaaagagtttggtttaagtactgaggaacttgggaggttactggctttcaagccacaactcatggcctgtagcattgaagaaaggtggaagcctcttgtgaaatacctgtatcaccttaacatttcacgggatggcatgaagcgaatgttgatggtccaacctacaatattctgtcttgatttggagacagtgattgcaccaaaggtacaatttttaattgatattggtgtgaggagtgatgcaatcggcaatgtgcttgcgaagtttcctcctgtattaacttatagcttgtacaagaaaatacgcccagtggacgagggttgcaatcaacccctctcaagcggtccaaggacccacttgaataccacagtgttttgctttgcttttcttaatcccgttcgcgaggaatctccacaacttggagtctctcgcccttacaaagatgttcacaaagaagcacggagtaagggagggattagcaactcacacaagacacaaagatcacagcaaatacgcacacacaagacccagacttaagctcaaaagactaacacactagaacggagctcaaatcactagaatgttgaacaagtgcg

SEQ ID NO: 36488 - DNA, 1863 bp, Zea Mays
ccaaagagttgagctgcttgcttgaattcccggggttatcaaaaggggggcttgcttgaatttaaagccctgccatctgccccggagcgccgccgcgcgagatgccccccaccgccaccgaagccacctcgtcgtcggcgaccagtgccacctcgtccacggatgccgacgccccgggccccacctcgccatcgccgtcccggcgcgcggcgcccactctgctcctcgtcgccttcctcgccgcactcctcatcttctccaccggcgacgatgccacggcgcagccgctcaacggtgtaagcttgcaaaacccagaggtttcatttgttccctcccccttggctggacaattttgtgagcgagtcctactatctggagtgccaaggttacatcttgatagttatgcaagccaaattcgtgtcaaaatgaatgtgtctcaatctattcctgagaagttccattggaaaatagaggtttgctttcataggaatgcctctatgggtttatgccagtgtgaggcgggtgagtggcaaggttttcaaggtgggatgtggactgctgtaagttctccatatggaaacaaatatgttgatctgaaattggctgataagaaacctgctaggttcactctttccattcaggaagagtttcagaaatggcgtctggcttgccttggtattggatttgtattgctattcctgtcaccaattattagcaaatgggttcccttttactatagcagctctatggctcttggaatcctggctgttgttcttattgttattttccaggtttctatcttcctgctggtagcaattgtcttgactggagctggttttggctattggatggtcaggagatttatcctttccaaagatggaagtgtagatgctgggatagcgcagtttgtgaagtgggctatgcgtgttgttgctacatttttcattatgcagagcacacttgatcctcttctagcactggttgctcttgcttttagctggtggttatgctctctgttgactacaaagaaagttcagaagaccatgacccagaaacaaaagcaatcaaaggttctttctcagcaaatgcttactcaaggattgcccacgggtcctaaaatccagtttttaagtccatctaagacaggctttggaggaaccacatctagaacttccgccacacagtatggtcggagcaatttggccaatcgaggtatggtctgctcagcacttgcaaagcgcgcagtgcccaacgaagacgaagaccactactccaccttccacaacatccagccacggaaatatacgaagcaggaatgggaggacttcacccaggaatcgactaggaaggcgcttgcggagtgcacagctaccccagagtttgcccagtgggtcggtgacaacgctcgtcgtctgcaagtagagaaagaggaggacaacttgtcagaggaagagatcatggagagctccagctcgtcggaagaaactggggatgaagctgatggagctcctggcctgatcagactgtggggctagcatgccggttgaacttgtaagagccccaagcatatatgctcctgccatttcacgtgtaaagagtagcaaccggtcattttaactagtgtagcagcagggtagggtggtagcagctgattgctttcgcagttgttgccacggtggcagtagttggctagccatctcaggtcaattgatgctaggtttagctaactgtctgttatcagcggattcttagttctctagagctgatatatgtgtaatggtttaaacaatctaatctgtgactggatccagcattttgttgatctggttggaagttgggtcgttagcatttcttggcgctcca

SEQ ID NO: 36489 - DNA, 2759 bp, Zea Mays
tctctctctgcccccattctgtgtatttatactcgtctgatcagtctctttctcatatgtctcttgccttttactgccgtaacctaaccatgacaaagttgacaacacaagaaaccaatcgaattctttcggctgccctaatatctcatctcctttgacatctcaagagaaagaggaacgaacaagagagagagaaagcactggctctgtagctagctagctacagcgatagcaactcacaaaaaaagcggcaccacacacccacacacaccagaaaacacaagcacaagcaaataagcagcaccgccagcccggccaccaagaactccaagaataaccttcactgccgtcttcgttcgatcccttacgctaacactagctgcttcaggctgcagccaccagccaaaggtagggcgcgcgcgcggcatccatggaggcgcgggcagcgtcggtcccggacctttcgctgcacatcagccttccgagcagcgccgcgtctccgtctcccgccccggggctgggcgctggaggagtagggcgtggtgcgcagccgtccggaggggacccgtggcgccgtctgaacggatccacggcgtcgaccgagctgtcgctctcgccgccgccgccgcggcaggaggcggctgccggggacgtccttccatggcggctccggccgccagcggcgaattactcctcgtccaccgcggaggcaacgttcttgccggtgaccgtgccgcggctttcgttcgacgccgcggcggaggcggcgccggcaaggccaatcaacggagtgcccgtctacagcagcccgcggaccggcgccgcccatccttttcttggcgccggcggcgaataccggcagtgccaccaccacaaggccgccgtggggctatacaatccctaccactcctcgtcgtcgtggccctcgtccctgcggtcgacgacgacggcgccccttggcgccgtggcgccgccggcgtccgaccccacggcgtcgtcgtacctctcgccgtccgcgtaccaccggatgctgtcgagcaccggccggctccacctccagggcgtgctcgccgacacgctccgcggctacggcagcgggcaccaccaccgccagcacttgggcagcctggccgcggcccgctacatgccgaggctcccggcttcccggcgcggcatgcgcgcgccgcggatgcggtggacgagcagcctgcacgcgcgtttcgtccacgccgtcgagctcctcggcggccacgagcgggcgacgcccaagtcggtgctggagctgatggacgtgaaggatctgacgctagcgcatgtgaagagtcatttgcaggttgagttccggccgatgaggtcttggttctttaattctgtctacccgtgcgattctttaattattctgtgttcttcctgcatttcttgttcccgttcggggctcatgtacaaggaaggaggtcaaatcttgacgaggtgccagccagggcacagactccgagggacgatgtgttcagtgagagagaaagtcgtcagatgtgcttgtgcagactctcagccaagaaactgccatccctagctagcacctagcagagaggaaagggggagctactagtatagctagagagagagcctagagagatggggagagatcatctagtactagagagggaggttggatgtgtgggtgagtgtgcaagaaaaggtgccatcattgcacaataatgcaacgtctgtcgtctgctcctgcaagccgcccaatccccaaagcagtgaagtgagcggtccagccaggcaacacggggacggacgagagagagagagagagaggaggcagcccatagcagtttcctttggacatttctgggcgggtgctctgttttgctgcgatctcctgcgcaacgacgacgaccctttatgatccgctatgtataggaccgtgaagagcactgataagccgcctgcagcaacctcatcaggagggggagggccgcctgtggacggtggtggcgggtccggcgacgacgaccacccgagcgattggcggcgggctccatcctcatcagctggtcgggacgtcagcccgcaggcgttcactggacaccggtcagcctcctcggacggcgcggcaagccatgcgggcggcgacgttgaatgctcctccgccgacgattccgacggtggcaggccgcgcagtgcttctccgccaaggctgccgccaccaagtgcgtgcaatgcagcagacacccttcattcagttggcgtaccatattccactactgaggatatggagcctgcttgtcgatcagctggcttacaacattcactcaaccatgaaatgagctgccctcctagcctggagttcacgctagggcggccaaactggaatggtgcagaatagcatcaccagcagctagctactagacacatgcatggatatatggcacattattagttcgacacttcatctagactgcttacaacacctgattggtttttgcatctattagaaatttagatagttccatgtttaatccaaaaatatcatatatatagtagatttatgacaacatgtacgtgcacgtgtgaaatattactactcacaacaataacagacacctacatgaaaaatatactgcaggaactatatttaacttaacaaatttagagaaaaaaattctgcattgtcgaggtacctatatatgctcaagacaccagtgactacattcacacgaatcaacactatgtgttgctaaaagtagcag

SEQ ID NO: 36490 - DNA, 543 bp, Zea Mays
ctcgatgtcaagcctggttccactgttaagtgtgagcctggatatggttttatgctgcacctttcccagatttttacagatatttttaataatgacctcggtggaccctatgcatttcttgaggctagcccgcacggagcgaaccacacgggaaaagctgatgggaagaaacagaaaagtcaagaaaaggcagttcctgcagcttcaaaatcaagtccggcttccaagaagagcaaggatgacgatgattctgatgaggacgagactgatgattctaacgaggacgagacagacgattctgatgagggattcaagtgatgaagatgataccagtgacgatgaggaggaagacacttcaactcctaagaagcatgaggcaggcaagaagagagctgctgaaagtttcgtgctgaaaactcctctatctgataagaaagcaaaagttgccacgccgtcagctcagaagacagttcaagttgcgttttctacatggccatggggaccatctgccgtcattttctttttgtgatttggtgaaaaagg

SEQ ID NO: 36491 - DNA, 574 bp, Zea Mays
gtcagctcttgcgggaagcactcaattgtaatactgtgaagtctgaaccggctggcctggccgttgctgagggagaggataaagaacaccgaaatgccactcctgctgctcccaccaccggcgtgcaccacggcagcgacgtcgctcgctttctcgcggccccggccttcgcgggcgcgttgggccaacctctcttacgcgttcccccgcctgaggaaatacgggcgtcgccaccgcgagcccgtggccggccccagcctcgatgatgacggcggcgaggaggatgagacggaggcagaggactgggagtccgacgatggcgatgaagagatggagatagacgaggaggagtttctgacgatgcggcccaaaccggcgggatttggcgaggggaaaacatattccactgacattgaggagcagcttctccgggagatgggctttggcgggggcgcggcgcggcgaggagaggcggccccggccaatcgccgcgccggggatagttccaccaaagtagctgccgcagatcatttgaaattggcatcactttatttagctaccactataagcgttg

SEQ ID NO: 36492 - DNA, 1100 bp, Zea Mays
cgttgtcaacaagatagaatattatattccatttcgtataacgttttcatatatcatctgcagatcaagaagtgaagaccgaagaacttcgacgacagagcagagaaagggctagcacttgattaacatggtacatcgactgattaagcaagctacacgcttagcatcggagttggaaaagttcccgagtcctgacgagaagcaacgcattacgtacgcatactcgcgagagcaagaactagagaaatcacggagcaaatggtagacatgctactactagctagcgctagcttgcacaggatgccatcacatcatgcatgcatggcggcgcgtatagaagtgttggctggtggtggtgttcatcagtcgtagagcggcgggcactggaagcccgacggcgcgtgcttgccgcaggtgatgagcaggttgagcgcgatggggaggtagatgttgatgttgagcaggcgcgcgcggatggtggtgcagaggcacagcgccgcgtccaggtccgccaccccctgcaccagcgggcagcacttggacctggcctcctgcccgatcaccaggtggatcagcccgctcagcacgtccacgcacgcgttcagcttcagcgtgtcgatcgggcacgtccgcaccgccggcggcgtcggcggaacgtacggtggcacgtagggtggtgatggccgaggcgtcggggggacgtagggtggcacgtacggtggtggtgatggccgaggcgtcggaggcacgtacggagggttgcacggcgggcacttgggcggcttgccatggtggtgcttgggcggcttgctgtggccgccgccggagccggagccgggtgaaggccacgtcggcgagccactgccgggcgcgcccggtgcacagttgctgctctgccacgccagcgagccggggagcaggaggaggccggcggcggcggcgaggagcaggaggacgggaactgaggtggaggttgccattgcgccttggctcaacgcagcggcgcgcgacgggctgttctgtgcacactgcagcgcacgcgtctccttttatagaggaggagcgtcacgtacggtccctccgcactctgactctctggt

SEQ ID NO: 36493 - DNA, 3451 bp, Zea Mays
accgggtatacgctcatcggttcctcggcgctcgcctcgacctccgactcgaagcggccctcctccctcgccggacgacggcgacggccgtggccgtctaacacatccgtggggaaccgctcccttagttgggcctcctccggccatggtgcacagcgcgtacgatgctgtcgagctggtggctgacgtgccgggccacatcgaggccgtcgcctcccacgctgggaagctcctcgtcgcggtttccgacaccgaaggcttcctctggggctccgactgctccttgcgcatctactccgctccttccccctccgacggcggcggcgagatccggtgggacgggccctacgcgctcgagcggcaggagccgcggttctggcggcgcccgcccttagccatggaggtcagcgccagccgcgacctcctgatctcgctctccgagtggatcgcgctccaccgcctccccgggctcgagaccgtcgctgtcgtctctagcaagacaaagggggccaacgtctttgcttgggacgagcggcggggcttccttgccgtcggtcgacagaagcgactcaccgtcttccgcctcgacagtgggcgagaatttgttgaagtgaaggaatttggagtgccagatattctgaaatcaatggcctggtgtggtgataacatatgtcttggaatcaggcgggaatatatgataataaatagcatgaccggggcactaacagaagtgttttcttctgggaggatcgctcctcctttagttgtgcctctccttactggggaactgatccttggcaaggataacattggggtattcgttgatcaaaatggtaaacttattcaagacggcagaattatttggtcagacacaccagcttctgttgttatacataaaccatatgccgtggcccgcctgccacgacatgtcgagatacgctctcttaggccccccaatgcattggttcagacagttgtgctccgtgatgttcaaaagcttgtccaaactgaccactgtatacttgctgctctatctaactctgttcatggtttgttgcctgttcctattggagctcagatagtgcaattgaccgcttctggagaatttgaggaggcgctagcattgtgtaagctacttccaccagaggattcaaatttacgggcagcaaaggaaagctcaatacacataagatatggacactttttgttcgataacgggagttatgaggaggcaatggaacagttttcagattcacatgtggacattacttacgtgttatctctgtacccatctattgttctgcctcaaacaaatattataggtgatcatgacaagctgctggacatgccagaattagcaagggaatcctccgatgtgacagatgagatggaatcatactctttacagcttcaagaaccagatgataaatctccattggaggtaaagaaaatgagtcacaatgctctagctgcccttgtgaagtatttgcagaagaaaagaagtggcataattgagagagcgacggctgaagtaacagaggaggtggtctctggagctgttcaccacagcttaaaattatctgagccatataagtcaaagaagctgagcaagaaacgagctcagacacatacaagctctattgctagagaaatggcaactgtactggatacttgtctgcttcaagctcttattcttactgggcagtcatcaggggcaatagagttgttgaaaggactcaattattgtgacctgaagatatgcgaagagtttttgaaggaaaggagagaatatatggttttacttgaactctataaaagcaatgaaatgcaccgtgatgctctccaactactcaatcaattagttgaagaatcaaaatctgaaatggagaatacatattttaataaaaaatttaactctcaaatgatacttgaatatctcaggatttggtaaattcatatctgaagcagcatgccccaaatttgcagtcaacttacttagagctaatgctctcaatgaatgatactgggatcaaccctaatctgcaaaacgagctggtacaactgtacctttctgaagttctagactggtacaagattctgaaggaagagggaaactggacagagaagacatattccccaacacggaagaagttaatatctacgttggagagcaattcaggttacaatacagacgcacttcttaagcgccttccccaggacgctctttttgaggagcgagctatattgtatgggaaaataaatcaacacctcagagctctctctctctatgttcacaagcttcagatgccagagcgagcagttgcatattgtgaccgtgtttatgaagaaagagaacaacaaccgtccaaatcaaatatctattttaatcttctacagattcatctgaacccaagaaaagctgaaaaggaatttgagcagaaaattattccagttgcatcacaatactctggaatccaaaaggctagtgctactaagcccaaagggggtcgcgtaggtaaaaaggttgtagagattgagggggctgatgacatacgctttagccccagcggaacagatagtggccgaagtgatggtgatggagatgatgtaaatgaccgaggccctataatgttaaatgaagcactggaactgttgagccaacggtgggacaggataaatggtgctcaggctcttaggctgttaccaagagatactaaactccaggatcttgtatcatttcttgagccactattgcgtaactctagtgaacatcggcgcaattatttggttatcaaaaacttgattttgcgggcaaacttgcaggtcaaggaggatctgtataatcggtgtcaagctgttgtgaagattgatggagatagtacgtgttctctttgccataagcgtgttgcaaatagtgcttttgcaatatatccaaatggacaggctttggtgcattttgtctgctttaaagaatcacagcaaattaaggccgtcagaggagcaaactctgtgaaacgtagataatatggccgtgatccaggtacacccttgaacgggacactgacaaatcaatatcgaggtttggttgatgccagcttatggaattccctctctttggcttcacactggattttagtggactgcttcagaagtttttactggagtaatcttcactctcttcagagatcgagtttatagccgtgcgtgtgtgctcgctctctgttttctggccatcgtactggaaaactggaacccctttcttttggttttcatgtacagaatgtaaatgatactgtaaagtttcggttaacagattgatgatggtcttgattatagtgccgcaatgtgtgctccaaataggtttggacattattattattggatccatgtcattataattctctaagttttgaatggcgctattataattcgtatattcggaggtctacca

SEQ ID NO: 36494 - DNA, 1243 bp, Zea Mays
atcgtgtaaggccaccatccccttctctctcccttctttcatctcccctccccatctggatcctccgccgccggttccccattgctgcctccatcgcccccactcctcgccggttccccattgctgcctccaccgcccccgctcctcgccggttacccattgctgcctccaccgcccccgctccgaggagggccacgacggccggatcctggactcgttgtcgcgcgccagggcaaagagtaaggactacgatgggcgaaagtgctccagagataactatgttgctggactccagacaaattgaggaaccatatcaaagatttgatctttggcacacgattttcttataatcatctgttgttgctgagacaaagcagttctatggtatcaagtacactttcttctttcacttgagttttatattttatcttactttcttctttcaccaacaagttccgattttggtcccggtaatttggttgtctttggtcattgattaattatatgcccaccactataatttggtcctgtttctctacttatagttgtcatttatgaagtaacaatatctgttctcctattttgtactgtgagaaaaggaagttcactttataactctctaattttatttcttcccgctaatctaaaaaaattgtttaattgtctgttcaagtaaagtgaaatttcctgtccaacttctgcattgtagccaaatgaaagcctgtatgagcagaagcccgaagaaacagctcctgtcctgccatatcttgtttctctgcacttggttgcggcctgtggtactggtcgactatggcggcacaatgcctcagctacaagaaaatctttgtggactgctatatcttgcccgacagttcaagctctgcaaggtgaggtctgtttagtttggccagaaaggcatcccctacctgaacacctacgacggccgcaccatccgctaccccgatcctctcatcaaggccaacgacaccatcaagattgatctggagaccaacaatatcatggacttcatcaagttgtatttgcccatggacttcatcaagttatatacttagttaggctcaatgttagcacaaacagttgatgagcaagtttaaatttagagtacacttatgtatgagttatttgacaatgcttatttatgagatattgaatgttatttatctatattatattaattatagtgttattaaatatatgtgtatgtatttttctcttttaaatt

SEQ ID NO: 36495 - DNA, 690 bp, Zea Mays
gtccaggggaagcctttttccggttggaaacagccctggcctcttccgaccagctacccgcgaccgcaactctagcctctagagctctcccctagcgacgccaatcctagcctcaggagctcttccctgagacccggctccatcgtcttctgtgacatcgtccccttctcctcgataagggactgggcagtcatggcggtgagtagggtggtggcctactagcctatggtgggagtttggtttggggatccgctgacctgcatcactgtctgcttctgagtgcaaagtggaagcaatgcatgaagtcgacatgaagaagaaaaatgcaacgaactgtatctagtgcagtttaattggtgttacttgatgttggtgtttcgttgcattacagttttatgttatattgactatctgtttgcgtgaatggagatgacattgatggatggattagcttcgttacatattagatggtattcaaattaaactttgtgtgaatcatatttgtttgtgtgaatggagaccaatctgtttctgtgatgtttcatttgtttctgtttttttctaattttttgtgttcattgcgcctcattgtgtgaatggagaccaagctgttcaaagtgtttcgttgtacgaatggagaccaatcagtttgtgaatggataccaatatatttatgtgatatttttgctc

SEQ ID NO: 36496 - DNA, 1376 bp, Zea Mays
tgaacacatcctcgttcgactgccacagtgccactacactacagtctacagctcctcctcgtcattgcatccacagcggctctccttcacctcgagggcctacaagaatcgaccttgcctccgtcaccttgcagcgaaggaacacgcacatgtaccgtgtggtcaaagaaagcctccagcgactaccttttcaaacttctgcttattggtgattctggtgttgggaaatcatgcttgcttctcagatttgcggatgattcatatttggacagctacatcagcacaattggggttgattttaaaattcggacagtagagcaagatgggaagaccataaaacttcaaatttgggatactgctgggcaagagcgcttcaggaccatcactagcagctactaccgtggagctcatggaatcattattgtatatgacgtgacagaccaagaaagcttcaataatgtgaagcaatggttaaatgaaattgatcgttatgcaagtgacaatgttaacaagctccttgttgggaacaagagcgacctaactgccaacaaagttgtggcaactgagacagcaaaggcatttgctgatgagatgggcatcccgttcatggagacgagtgccaaaaacgccaccaacgtggagcaggccttcatggctatggctgcatccatcaaggacaggatggccagccaaccagccgcggccaacgcaaggccagcgacggtgcagatccgcgggcaacccgtcaaccagaagacgtcttgctgctcgtcttaagcttgcctgatttctctggttccttgtgactattactaccgtttgtgcgagcatgcaaatgtatttgttgcattattgctgatagcatctgttcgttggccagatgagtagagagctgaaaaaatgttaagaacaccatagagagaagtctatccgtgctctctcaacttaaggagcaaacagcaagacttcattttttttctactttactgtttattagtcgcgttacatttgtgaacagttattgtaatgtctttttttttaactctgtattcgtagtgagatgaaatgcgtgtgtgggcaacaaatttcctttttggctagttgagtggtcttatcattgtgcccggtgacggtgacggtgcctctgtcctgtggccttgcaatggtctgtgggcttcgagtgggtgtgatactgatacgccctctagtgcgtttttgacatggagaagaacgccgcttggcccaccaccaccgccaattgctgtgtcctctgtggtgtgtcagcgcgagataacgtttgacaggcgaagcgatgttggggcacatgcgcaccaccgctgatcgtgaggcactgaaaatttcaaaaaaaaaaaaaa

SEQ ID NO: 36497 - DNA, 534 bp, Zea Mays
atcactccatgaccaaacacataaaaaaataaatgcctagataatttctttgttggacctaaagtgtacctagacttgaaacaagaatctcgagccatgtctccatcctaaaccatatccttattcaattggtgcaagctgatgtaccttatccagttcgcctgttcttaaggatcgctatgttgctttatcaacctagaaaagacatgcccgatcaatttcttgaatttgatgcctttggttttcttatatctcccgaaggcatactaatttgatcttatcaccattttcctccgtatctaatcagataccaatccttgaccttgtaattgttgcgatgacatagaaatatgcttggggctgatgttacagtctcccatcgtactccctcaccaaccaatttaggttctggccatgccttgttcatttcatcgggccataatctatttggctctctacttgtaaccgttttgacaggtagagtttctttgtatattgttacccttgctcaatctattggcgtggcgcgagatt

SEQ ID NO: 36498 - DNA, 4598 bp, Zea Mays
cccaaatcccctgctaatcgcgaaacagcgcctcgtcgccttcgtctggcctcttgacccccctcgtgcacttccgagccgaggcaaaatgcgccgtccccatgacgccagcgacggcgacgaggatcgcggctacccgtcgagctccgctgtcaacggggccggcgatgaggaggaggagcggcgccaggcggcgcggacgccggggaaggacggcccggtggacgcgctgtggcggtggagaagccagagcctctccgagatagtgctctcgtggtccgtggaccaaatcctcgacaaggacctgctccgcgacaaggtgtcgaagataccagagacatttagcagcatagagcagtacatgacatcgtattttgggccacttttagaagaggttagaggtgacatgtgttcaagcatggaggacatctccaacgctccatatgcagacctgctctctgttaattcaatgaggaaagggaaggggtcatacgagatcagtcttggcagatggaggggaacgtctcatggctgtgggattgataattataagccaaaatcggctgatgttctactgatttcagaaacgaaaccggcaaatcaatctgatatcctgaaacagtccaaatcctgtgtcatcgtatgggtcagtaaggttaatggtaacaagatgacagtcaaggcatcacagttgatggagactggggctcaaggaggtgaacggcgaccaattggggctaataaatacgataagttgtatgctgaatgtttggacaagtcttgggaaatgctagatcaagaagcaatggcttcgaaatgtagaaactcatctgtgcatcgcaatgtctggaaagagtcacacaaggttgaaaagcgcagcgatgtgcatggaagaaatgagaaagagacaggtgaatcaaagcgatggtccttctatgccatgtacctgactaatatggtaacatatgaccgtgtttgggttgtgctccgaaggggtctgacaatggattcaaaaatcatccatagcatgttgggcagaaacaattatgctcttggacattgtaaacactgcgtcaataaatcacatgatgaaatcaagggtgatctctgtgattttaagctgaatgactcacaacttgatgctgtagcaagttgcattttggcaagtgaatgcactcacaggtcttctatggggctagtttggggtccaccaggcacgggtaaaactacaacagttgcagtgatgctacaaatgcttctgatgaaggaacagagaactctcgcatgtgctccaactaacatggctgtcctgcaagttgcttctcgtcttcttgagctgattggggacttctctctaagacacaattattcattaggtgacatcattttattcggtaacaaggaccgtttgcaaattggcaagttactgtcagaaatatatttggatgaccgtgtccagaagttgttgagcagcttcaacagacaacatgggtggaagcattgtgtggattctgttgtaacattcctaaaaaattgcaattctcggtacagaatgtccgtggatatacagcaaggaagcagtgatgcacgcgaccttacctttaagaaatattttacaagtagattcagcactttagccgatggattggtcagatgtatcgatacattctatgaccatctaccaaggagttccctgggcaagaactttgataaaatgatgttcgtcaaaagattgctagataaattgcagcagtcgctgagcgcagatgatgtgtctgatgagcttctttttacaatctttaatcctgccgatgaagttcctgactcatctggtagtcatgatgatctgatagatgatgaagatgactttcatgactgtaagatttctctagatagccctttggacataaagtctctttgcataaaaattcttatgtctctttcaaacatgcggcttccttgtgaagacaatgagctttcaatccgggacttgtgtttgaaacatgcgaaacttatattttgcactgcttctagttcatttgagttgttcagactgcaaagtgtgaggcctataagcatcttagttattgatgaggcagcacaactaaaagaatgtgaatcactggttcctctattgctacaagggatagaacatgttttactaattggcgatgaaaaccagctatcatcattggtaaagagcaagattgctaaagatgctgactttggacgaagcctctatcagagattgtgcacgatgggctacagcaaacacttgctggaagcaggaggactatgccaagagttatctacctgggcctatttatggtgcttattcattcattcatattgacaacgacatggaaatgcttgatagccttggtcagagttccaaaaatatggctgaggttgctgtagcagccaatatagtcgaaagacttgcaaaagagtgcactgagaagaggcagagaacaagtgttgtaaaatctattgatggatttcaaggtggtgaggaggacattattttgatttcaacagttaggtccaataaagatgggaaagtaggctttctctctgattctgggagaatcaatgtggcgttgacaagagccaagtactgcctttggatccttggaaatggaaccactttactggctagcaattcaatatgggctgatttagtccgtgattcaaaaaggcgcagatgtttctttgatgcttttaaggataaggacttagcagaagtagtcatgtttgcaactaagcctgagcaatggaatcgaagagaacagaggaatagtcgtgcaaatgaagcgccatcttggccatcatcatgggatgtggtggctgacaggaacaacccaccaagaagatggaatggccgtccagcttctagcaatgcaaggagcgtgaccaaatcctatgatcagggaccaaatgcatgtcgatggaccaataatttctcagctagtagagaggaaagttacagaactcgctttcagcacggcgaacccttgcgcagtggtcactacaataatcaatctcgagttgcgcctgctaatcaaaatcggttcaacaactacaatgcttcgagtgagtggcatggctctgtggaagggtatagaggatggcccaagcagcatgttgggccagaaccacatgccaggttgtcacatgaatgcagtagtagttttcaagaaggcgatgtaaggcatactcctagatcagcttatggggaagaatcacatggccaaattagtgttcttggctcatggcaagctccaggaacctactacaattgtggacctcagaatagaactgtttgtcctgagtttcagaacagagggtcttttcaacaaaggtttggttcatatggagctgcagattctggatttggtagggccaatggagacagacaattcaatagtcttgagcgacgagtgccatatggtcgaattggtggtcaaggcagaggaagaacttcctgccaagggagaggagatacaagaggatggcatgaacggtttgtttgccgttggacagaacctcactgtcaggtgcagaatggcggtttggaaattgcatcccacaaactgctagctcctgggcagcaagggacgaagaggaactggtgtaaagcagaatcatcagattcaccgcaacaggacaacacaaaaaggatacttggaagtgtagatcaacctcctggccctgggccagtttgtcatggtggttctggagctccctcccctgaacagcatgcttctagacagggagcagtgaagagaggtgtatgtgaagctgaatcgtcagatttaccaatacaggatgagtcctcagaagtaacactaaaacaaagtgcagataaacctctttgtaccacagaggatggcaattctggagctggttcctgtgaactgcctgttcctgagcagggtggggtggggatagacttgcgtgaagcaggaccaccagatataccatgtcaggttccggatggcagttctgaagcattccttgaactccttgttcccgagcatagggggatggaagccggcttgtgtaaagtagagccatcagatgcaccttatcagggtcaggatggcagtcctggaaccgcttcacatgaacaacctgtccctgagcagcgagggatgggaagagcagactcgtgcgctacagaaccattgtcagtacaccaggacagcacagaaaataaacctgaaaccgtagaacaagatagctagacagtagacacttctgaattttgatatgttacctttctttttctgctctgtatagaaacctgtgcataataagcatgtagggcctgattggttggggtggtccaatcctgcctggctgctttttggagctagggtaagctggcaaggttcaagtagtgcaggctgagttgtttggtttcatttttgagctcgtcctgggtggatgaagaatctgattgatggtcggtttaatgtagggtgaaaacggtcggaaacgatgagtaaacactaaaataattttcgttttcatattttttttctccgaaacgagatcgaaaacggtaactccggaaacgaaaacgactttggtaa

SEQ ID NO: 36499 - DNA, 2755 bp, Zea Mays
gtgtaggcccagcgtgtcagacactgaggctgttgcagccgtgattcccgagtcccgacgactcgcgcggtcgcgcccctcgccttctccgctggtcgactggtccggctggtcttccccctcggcatcgcactcgcacctcccaagcgtgcctgaatctcagacttgtccccccactgcctcggccatggctgtgcgagccacggtctcccgcttcccggccacgccggaggcgctggagtcgtgcgccgtccagtggggcgtcgccgtgacgcccttcgccgccgtcgacgagcgcggccagcccccgaccaccggcgccggcggggaccgcatcccacgctgcgagcactgctgggcgtacttgagcagccactgcgatctggagcgctggggctggacctgcgcgctctgcggcacgctcaacggattcgacgacgaggccgagcgacggttccagcgtcccgacgcctgccccgagctcaattcctctttcgttgacctcgagatcgcaggggctggaggagacggcgtgcaggcgctgcctgtttatgtggccgcagtggacctcgcatgctctgaagagttccttgaacttatcaagagtgcacttcttgcggccctagaagctcttattccgggctccttatttgggcttatgacattcagccacaagattgggttgtatgatgtccaaggtccgattccacttgtgaaaaatgtttttattcctccggacttggaagaagatggtctgcctgttgcccttgaagatgccatgcccctactttcttttttggctccagttgacacatgcaaggatcgaattgctgctgccctggagacactgcgacctacatcttcatgggagagaggggctgcttctgggcatgaagaggatgctgttttgcttggcggacgtggttttgggacagccatgtctgctttaattgagtacctaagttcaggatatggttctacttttgctttggctcgagtatttgcttttctgtctggtgctcctgattatggagctggtctgctagataccaggagatatggggagcaatatgctagtaaaggggtagacgctaaccttgcattgctccctgaacagatacctttctacagagacctagcagctgttgctgttcagtcaggagtttgcatagacatatttgctgtaactgatgaatacacggatttggcttcactgaagtttttaagtattgaaagtggtggatatctatttctttatgcaaatgcagatgattcaacacttcctcaagacatataccgcttactaagtcgaccctacgcatttggttgtgttctaaggctgagaacatcttcagattttgaaccaggcaattcttatggacatttctttcctgaccctcagtatgaaagtgtgcaacacattatctgctgtgattcatttgccacttatgcatatgactttgagttttcccataacaacggtttctccaggcatacagatcctgctgttgtgcagatcgcttttcagtacagcgtgattgaacctgccaaggagacatcaggcgatggatcacaatcatctgcaagttataagttctctctaaagaggcggctgagaataagaacattgcagtaccgtccagctaggaatatcagtgaaatttatgacagtgtagatccagaggttgtactgcatatccttgttcataaggttattttagaatgcgtggataagggggttagagaaggcaggcatcaagttcatgcttggctatccctccttgcagcccggtataatcaggtcctgagttctgatgtgcgaactccactatcgagcatagacattgacttctcgcagtgcccgcagcttcaaacgatacctcaacttgtttttgcattgttgagaagtcctcttcttcgcttgcatgaagaaggtgtacacccagattacaggatatatctacaatgccttttcagtgcactggagccatcttctctagctaaagctatatatccggttttaatatcgtattcctcgcctgacaagcaagcattcccacgacacactctcagccgtgctgctctaatcatgagcgagagcccaatatttcttcttgacacatttaccaaccttatcgtttactattcctcaactgctgatccttcatttccttttcctccaccccgtgactgtcttttgagaacaacaatcaataaactgaagcaggacagatgtataaccccaaagcttacattcatccatggaggggaagatgattcaacattgtttgagagctatctcattgaagagcaagatgtcgatggatcaggtcttacaactggttcaggttttgtagccttccgtgagagcgttaggaatgttgcaggagagatcatccaggaagaaattggaagctagtttcagctagaagacccttttggtcccgctgcagagcgtataaactcggatgctttttaaccctaattaatatcgtagtagttaacttagatagccaaaatggagaaacaatgtcaaaataatatgaggggccacatgatttgtagttgcttctggcaataactgctttaggcttgattaatcagagaagcctttctggtacactggtaaaagggtcgagtacaccaatacaccgtgtgatcctggctgtctgattttttttggagaactcaaattttggtgtatattaatgctgctgtttattccgattaaattgaggccgttcgaaacctagag

SEQ ID NO: 36500 - DNA, 5297 bp, Zea Mays
aagagcttgtactccgctcacacgggccgctcacattctatggagtgtcactgacttggtgagcccaccaaggcgtctggcgcgccgagagctccagacgccaaagcaccactctcccgccgtccccctcactctccgccgccggcgaggtgtgatgccacgaaggtcggcggaggcgccggccatttgatgcgcccacggccgcctcctcacggtgcgctgtccaagcaccacctcctccgcatccgccgctgccttccacccgtttggtttaatgctgccctcgcccaggacccgtccctgccacccgctgcctcctcctcccccgcgtttctctcatccctcatacgctactgcacgaccaagcgcgcccgccgccccggtgagcaggcgcacgcgcgcgccgtcgcgctcgggctcggcgcgcacccctcggtgctccccgggctcgcctccttctacatcgcgctcggcgacctccccgccgcgcaagcctccgtcgagcgggcggcgggaaaggcgcgggcgttcccgtggaacctgctcatttgggggtatgccgaccgtgggctatgggacgacgtcatcctcgcgtatcagaagatgctggcgctgggcgtggccgccgacaggttcacgtacccgtcggttctgcgcacatgcggcgagctccgagattccgccattggtcgggggattgagaagcgcattctgacgtggaggtatggtctggacatgtatgtctggaacgctctggtgggaatgtacgccaagtgcggggagatgaaggacgcgcgcagggtgtttgatggaatgcctgcgcgggatgttgtcagctggaactccatggtgtctgggtacgtgtcggcgggtatgtggggcgaggcgtttgacctgctgcagttggttcctggggcgaacattgtcgcctggaacgcggttgtggcaggaaattttaaggcggggaactacggtgaggtgatgaggttggtgtcgcagatgaggacatgcggtggtccggggctggattttgtgactgttgtgattggcttgagggcttgcgctaggggtgggtatctgaggattggcaaggaattgcatgctgcctctgttcgtctatgctttgataggcttgagcgcgtggagagttcattgatcaccatgtactccagatgccagatgatgagatctgcatacctcctgttcagaacatgctcaactcagagcatagtaacatggaattcattgctagcaggatttggattcatggaccaggttgaggaggctattttcgttttcagagagatgatttattcctctgtctttccaaatgatgtcactgtgttaactatgctttcacttagtgcacgttttggacacctctgtcatggaagggagatgcactgctacattttcaagcatggacttggggcctctaacatattgcagaactcacttgtcgatatgtactcaaagtctggacagatggcaactgccaatagagtgtttgaccagatgcaatgtcaggacaggcatgcctatacttcattgattttgggctatggaatgcaaagagaagggcatctatcactgaagctctttgatgaaatgattgtaaacaatatcaaggtggaccatgtaactatggttgctgttctttcagcttgcagccactctgggctggtagctcaagggcaactacgatttgctcagatgtatgatgtgttttgcattgcaccgagggtggagcatttttcttgcatggttgatttgtactgccgtgagggtttgctgagtatggctgaggagatagttaacaagatgccattccagccaactgccgcgatgttggcaactctaatcgaggcttgccggatccatggcaaaacagaaattggggatcgggctgcaaagaggctgttggcaatgaggacaaataacccgggtcactacaaattgattgcgaacatgtatatatcagcaaaacgctggccagaactagctaaagttaggtcattaatgagcgtcatggaactaaatatgattccaactcattccttactggagtcagaatatgagatatgtccaattgaaaaagattattgcttaaaccgatgtctgcatggaggcttgtctgacgacatgacagatactgatttctctagtagtgaggaagtgaaatggaatgaagctttcggtgggtaacagtaaagctggaatccaataggctgttttgggatcatggctttcatttaaggaaaatatgttaacaacttgtattctttgcatcatggaagagaggagtttttaaaaaaggattaactgaggaccttgcatcgcacttccagtcagtgtttttaaggcgtcgcttaggcggccagacgcttgaagaattatgctcgcctaggcgtccaggtggcagtccaacgcctcgcctcgccttaccgccttaagaacactgcttccagtattgccttcaagcacgatcacaaacaatttggcatgaaaactatcaggccatactttgcataccactaccagaggatcagatacggtaacaaggaagcgttgtgttgggcacacttatgtgggcgtctcagattataagctggttactcagcagtgtggagtggcaactggcaaccataatccataatgacaaaaatggaaggctccacttggcagtgtccaaatcatgtctacgcgtttggtccagccagagtcaggaagctcactggacatggtgccgtcagagccagagatcgttcacctgactccatggctcctgaggtcactatcagtcgtgttgtccttcctgctgaacaggctgctgaatgtggaagcactcatgggctccatccctgtgctggccatgtaggttagcgagctcgcagatgtcatcttcactgccatgctgttgctgctaaactatggcctcgcatatggagccgcattctggctcttcttaaacacctggtcagatataaaccatcgcagcagcagcgatggaggtggagggtacacgctctccacaccgccgccgcctgccagtgctggacagatggttcctcgacacctgccctgtggcaatccatctaccctttggcaagctgaaggacatcgtcgtccagtgacccgaacacgcgcggtccagaaatgtttcttccatttctctgcggagagcacaaagaggctcaagacgaaggcaaacaccgggaactgcaacggtcatcatctcctcattgaagtccctgctctctcaccttgagcgagcagtgtgccaccgtctgcatactttgttgaaggaactctatttttcttttgtgctgttatataccaagtcagcttgcccccccaaaagaattcctcggaagagagacgtcattcacaaactgcggcacaagttcatctgtgttgcgtctgacctacctgatcaaagacgttttggtgacaattgtgcaaaacatttgggatgattactcatgctcgtttcgcaggtgggaatgcttaattggcgacaagttttatctatctagagagattgcttttgttttcagaccgtgatagattagccaacgccatcaaaggaaataattgaagcatggctgtgaacctggaaatcacactctgaagtctgaacacaatgtaaacattcagaattagcacattggtcgtgtagctcattgtacataagctttatttatgctccaggagttgttactgtagttacagtgtcccaccaaatcaagaaggataaaaaatttaacgtgtgggaaaacagaaccggcccaggagaaggcccgtgcgggtgcactctcgctgcgcccaacaacactgactgggccggccgtcgatgcactgcattcccccccttccgtccgctgcatccctccgccgccaccgccgcccaagccaggtgctgaggctttcgttggtctcttcgccggcgacgagcacccaccagggcacgggcctcaggatgcagtccttggtccggaatgtctgccgagccggaagccgtggagcggcggcgaggctcctggaggccgccgcggttcatccgggggcggcgcagccgtcctcggccgtcagacacctcaggcatccttgcgggttcgctcgtccgatcggggtagatcaacccaagcctgtgcagcgccggaccattttgcgtgatggcggccgcgttccggctgccgcctccggattcggtctctgcgcgaaagttctcgttgcgacgaggggtctgtcgacggcgggaaatgctgctgaggttgcctctgattcggacgattccacctctcctgcggttgagcaccccccgcgcatcaagttcaagaggcctgacaagaccgctagacacattatgaatatcctgaacaaagaggcggtcgaaaaggtccgctcggagagggcgattcctgatgtgcagcctggatgtatcattcagatgagattggtaataccacttctttgtgttcctgctttagcgctgttcctataggtttctggtactgatccttcctgtgagtcgatgaacagcaagttcctgagaacaaacggcgcgagtcgacactgaaagggattgtcataggaaggcgcaacgctgggatcaatacaaccttcagattgcgtagattagtggctggcgtgggagtcgagtctgtctttccactttactcaccaaacatcaaagaaatcaaggtcttggacaggaagaaagtcaggagagctaagctgtattacctgagggacaggatgaacgcacttaaaagatgaggatttcaacttgtttctaggatttctttttgccgcgcggatcagcatggtttctcaagatgcaatcacattgtttggtgttccatctttgaaaaaaatcatagtttggggttgtcagttgccatgctccgatcttctttcttttgatttgatgcgctgtaacattagtgcgaaaattcatgtgctcaggtctattacgttactttcccaatctttttttagtatgtgcgtctgacatgaacaagctggaacactttactcatcaaagcgaaactattgtatgatgattcatgctatccggttttagatgtcaaatcatttagtctttattcacagaaacctcctgttctgaaaaatgttctgggcatcctgttctgaaatttgtgtatatgctctattggaacctgtgttacagtacatattcgcagtggcatgctgatccgtgattactctatctagatgcaggcagttcacatctaactatccccttctgccactctgaaaggcacgagtatgat

SEQ ID NO: 36501 - DNA, 2269 bp, Zea Mays
aatattatgtataaaaagtttggtgacaaataaaataaacttattaaactccctcacacattcccatacacacgtttccccataagcccacacaccatccagtgcagtccggcctcttctgtatttttataggagcagtaggcagtagatgctgcctcggctctgcgtgcgaaaacatgtaccggtcgagttcatggtgaccccaccccacagagaatcagagagataggatagcatagcagagcagggggcgcctttgcatcgcgaggtcactcctgtcccctcgcctccgtcccctccacgcagcagcagctacacctacacagctgtgtgtgtgtcggtcgccagaatcccagaaattagatagctggggttgggcgggcgacccgccgcgactgcagcgagaaccttggacatgagttgagaggccctatcttttcatgcccatgtccatctcgcgagtgatgagtgagaaaccgattgattgattgattgatgtgtgatgcctcactagctccttcgtggcaaatctcatcagcaacagagacggctggtgtgacagcttgtgaagaaaacgccggctcgctcgctcgctccagagaaaaaaaactagatttagcgagggcggaccgacgacgcagtagaagcaaccgagacatggagcggcggaggaaggcaatgtggctgtaccccaaggtcgtcggcttcaacccgccggagaggtggggccactccgcctgcttcttcgaaggcttcgtctacgtcttcgggtttccggtgaagggtgcatcgcccggcgtcagagcaggtcatgcagctatgagtgttggatctaaggtatatattatcggaggcgttggcgacaagcactactacagcgatgtctgggttcttgatgtcacaaaccgctcgtggagccaacttgaggtgtgcgggcagcgaccgcaggggcggttttctcataccgcagtggccatgaatactgacatcgcaatctacggagggtaagtttgccggaacagggtaagataccacaagattatcaaacatcaaaaactaacagtttggaaaatttacagatgtggcgaagatgagcgtcccctgaatgagcttctcattctgcagttgggctctgagcatccaaacggccgctacaacatttccatgtgcaaggttcttagcaaccactggagccaggagaagaggaagtttctcagatcagaagctagagatgcaagtgtgagcaatggggagatggctcagaaaccccgagaagcagaaacggagcaaaggaacccgttcctgcgtggcctagagaatggccgcgtgaagcgaaggagaaccggtgaagctcgcccgaaggaggccgagtcagagcaagaggagcactcgctgtccctttcccaacattcctcgccgtcgcagtcggatcaggagcagaccggagctcacaagcttccggcctcggccaacacgtcgccttcagccctgcagccgttcgctcgtctcaacggcaatggcgctcagctgagggccgccggacccggaggcgtctcctcgaggcctctcaaggcggaccagcttctccgcaccatcgcgccacagcatcggcgggaggtgcagttcctttcctccgaccatcagccgcagccccgggggcctcccggcccaccacaccttattggcgcagaggttcatgggacagtcgatggagcctttgattctgggtacctcgtgaccgccgtcgtgaacgggcagctcttcagaggcgttctgtttgctccgggacctggggtcacagctccgaggccggcggtgcatcaccagatcctgacgagctccgccgtgcctccccagcaacggccgctgctggcgcacgccatccccgtccacgcccggccagtgccgctgccgcaggccacgggcttcgtgctgccggactgtgcccaccacgcgcggcaagggttcccggcgaaggccgtcaagtccgagccggagcgaggcagcagcgacctgcacgatgttgtgctcacgctgggagggcctggagggggcaagtgagcccccccatggaaggcctcaagaactgtcgaggtcctggcctgctgctgttggcctcttggattgctttgtaaattagtctggttgaggaaaaaaataagactagcagcttttctataatctttcccgggtgattttagggttctaatatgtgactttacatatataaatatagtgttagcttgatgcagctagttttgttctgagc

SEQ ID NO: 36502 - DNA, 2906 bp, Zea Mays
cgggtacccattgccatctctaaaagatgtgcgagagggctatacatcgcacgggccagacgtggagcaggccagggtcgaggcccaactggagctccaggaaggcacacaggccgaaagccgccaccgtttcttcatctcccatctgccggcgctccatcttcgactccctccccgactcgcgctcggcacgcaggcgacgacggcggcgctcaggctcgggctcgggctctcagcgacggcggggcagtcccaatttcggcggcggcgtcagcggctccccctcccgcctcttgccaatcgcctcgcgccctcgcctccggtcctccgcacaccggccggtgaccctgcgtgcgcgcctcccgctcccctcccgcctccggtggaccgttgacagcgcccggccccggcggctgcactgcgcgccgcgtacggccggcgggcagcgggagccagcagccgctgctctaccaaggcggccgcaccgctttggtagcgcttatgccccaacgaagcgttacccgtccgcttagcgctgaagcgtgcgcttagtgccgcctgttggaaccctgatctatagttggtcttcttataacttctcatagtacactttcagcaacacattggactacaatggagaatatgcgttatgctgaggagctcgtgagggagtttctagttttcaggggtttcacaagtacgctgcaagcgtatgagacagagttgtctactgagattggcaggaactttcaaggagacaagatcgtggatttagtgttctcagagtatgtaccgaaataccaactggacaagttgctcggtctgtttgcctttttcaagcagtgtttcatgtcacctgcggacacagagttgttctcaacccttgttaagttggagctgtcagtattaaggtactatgttattaatgctttgaaatctggaagacaagacaaagtaattgaattctttggtgagagtggcaattatctgatgcaaaagcgtggagattggctggcatggtttgctattccatatattaagaacccaagcttggatccacaattccgtctatatttctccaaagagtggctggacactttggttctttcatttaggaattttttgagtgggatattcaatgatactcggaccccagctcttatgagaattagtagtgaaaagaataccatcaaatccctcaagaatgacataaaacaactgaataataaattggcagagctacaagcatccttagaggagaaggaagatgaaatctctctgttgaggaggaactataatagtggtggttatggaaacaagaatgtagttggtactagtacagctggttcccctcatgaagagatgtcagaaaactatgaagaatcctcggcctcgagtagcatgatacagggttttgattctcggtcctcaagttcagtgaaatcttatacaagaggtggaaaattccatgaatcttctgagatcaaccatacagaggatcagcaggttttggtgactgaggaagagtttcctgaggtgaaagtagatttccaggaaacatttttaggccataacagtccaattagccgatgtcgattttctgcatctgggtcaaatattgctagttcatcaattgatggcacagttaggatttggacatatgattcgtcaactgcatcatccagaaatgctactatatactgtgggtctgaagtcagtgcactttcatgggaatgcagatctgacagattgctgctcataggcacagctaatggaggaattaaagcttggaatgctgatgcaaagagagttgtttgcgacctgagtacatctagaaactttccaagcatcttagatttgaaatgcagccctgttgaacctgtgtttgtctctgcagctgcatcaagacggcatggatcaactacatttgagagaacaggatttgccaacttgacagtgtggcatatgaaaacatggaagccattgactgtcctccctcttggtgaggatccacctgccattacttctctttgcttcaatcacaatgggaagattttggcagcttctgctacagatggaatgattcacatgtttgacatgtctgctggtcttcaaattacaggatggcctgcccatgattcacctgtgagctctgttctttttgggccagcagaaactagcatcttcagcttaggctcggacggaaagatacttgaatggagtttgcacaatcaaggtcagattctttggtcaagagattgcagcagattctgcaatccggagagctttaaaacacgaatgcatgaaatagcattggattcaaatggcaagaggctgctggtcacctccggtttggttcgggccccaatataccaggtacaaggccatgaaagcgaactgaggacactgccgcacagttcatctatcacaagtgtggattggcatccaacactgccaatgtacatcactggatccgcagaccactctgtccgggtcacgtctatcttatgatgatctataaaacaaggtgctggcaacaacctttcccagctagctagcatgcatcaacccttattgacagtcttatccatgcgtgaggctcggtgtcacgctatttcctcgcatggaagatgagctgtgttcttgttttgtggctttggtgtgcgtctaattctgtaccctttggtgggttgctccaacatttttttttcttgttgtaaacaggcatagagttctgtggtcatttgctttaaaatgagtgatagatcaaaataagtaaactttgtagcccgtctctcgaaatctcacgtctgcatacgcagatatgctatatactgtatgtacttgtaaatgaatttgtagcccgtctcagatagtacttcgcattacaatctatcatccttcac

SEQ ID NO: 36503 - DNA, 1704 bp, Zea Mays
tttccgcgaatcggcaccttctccttttttttaagctgaatccccatcttcgacttccgcacctcgcctgaatcgctcattcgctccccaccccaacgctccgtccccgcggcccaccaaccgccgccgccgccgccacagccatgcacggccgccggcacctcgcggcgtcccttacccgggccctgatccaggcgccatcccgctccatctcctccaccccgtctctcctccaaaccctcgacccctcagtgccgtcgcctcccgccgcgggagcagggcggctcgcggagctgcggcggcggctgcaggcggacgcgccgtcgctgggtgacttcacgtactcggtggaggtggggacgcggcagcgcccgctgcccaagcccaagtggatgaaggagaccgtgcctggcggcgccaagtacgcggccatcaaggccaagctgcgggagctgaagctgcacaccgtctgcgaggaggcccggtgccccaacctcggcgagtgctggtccggcggcgagactggcaccgccaccgccacaattatgatccttggggacacctgcacgcgcggatgcaggttctgtaacgtcaagacatctcgaacaccccctccaccggatcctgatgagccttccaatgttgctcaagctattgcctcatggggccttgaatatatagtaatcacgagtgttgaccgggatgatctacctgatcagggcagtggtcactttgctgaaacagtacagaagctaaaggctttgaagccagaaatgcttattgaagcgcttgtacctgatttccgtggagatccaagctgcgtagagaaggttgcgacttctggattgcatgtttttgcgcacaacattgaaactgtggaagagcttcaaaggaatgtcagagactaccgtgcaaatttcaagcaatctatagatgttctggaaatggcgaaagagtatgctcctcccggtacccttacaaagacatcgataatgctgggatgcggggagactccagatcaggttattaggaccatggaaaaagtgagggctgctgatgttgatgtcataacatttggccagtacatgaggccatcaaaacgtcacatgcctgtttctgagtatgttacgcctgaagcttttgagaagtatcgggcccttggtgtcgaaatggggttccgctacgttgcgtctgggccaatggtccggtcttcgtacaaggcaggtgaattctacatcaaggctatgatcgaagcggagcgagccaagggaaccgctgcagactcaagtgcataaccgagatagcacctcccggccccacccaccccttgacttgttccggcgccttcgtgccttggttcatcctccctctcaagtccaagaaaaaaaaagagatccaatctgccgcagatctgaatcagatatccagatcacacacacacacaagaggcagacggagcttgcaggtagtgcggaaatcctggagcactccgcgcgtggctgggacggagtcaatttgaccatcttttgcgcggtcaaccgactcgacatggcaaaagcaggaacgctgctgccctgccactggctcgtacgtgaacgatctgggattatggctggatgatcgtccgtcagatggccgtggcccccagtggaggaggcagctgggcagtgttgcttgcaataatgctaggaacatgtagtgatg

SEQ ID NO: 36504 - DNA, 318 bp, Zea Mays
ctttccgttgcgataaacacagacgcaacaaaacgttctttctccctcctcctgttatcttgttccttctcccagtgaaaaatctttatgtcctcaagctcaagcataccgccaccaccagtctcagcccaacgctctacctcaacaactcacctcgttgtttacatttttgttctttggtcgtcgtccatagaaaagaatccccatcgtcaggtcgtttatctactccaagctggcgtctgtgatagggtgaggcagccaggcaggttacgagtcacttgattgtgattggtgttaagcgccggtgggcacggcctt

SEQ ID NO: 36505 - DNA, 2866 bp, Zea Mays
tcgatttgaacctgccgctgcgagtccacagcgctgcgcaggcggcactgcggcaggctcttcctccctctcctctctctctgtctgagccgagggctttggcgctcccccccccccccccccccccctctctctctctctctctctcgcacgggcccgcctgcctatcccactgcccggtccaccgccgcaaactctgcccgcccgcgcgcgccccaccccgccgatcgcggtgagcccggactccgccgccgccgcttcgctctaccctgaccagccctagatctgtgcgggatccgccgccatgttctggcgcatgaccggcctctccgcggcctcgcccgtggatacaattctggacaaggagaactttacattggaagagcttcttgatgaggatgaaatcattcaggagtgcaaagcgctgaatacccgactcataaatttcttgcgagataaggcccaagtgtcgcaattacttcgttacattgtggaagaagttcctgaggattcagagaagaaacaatctttcaagtttccttttatcgcttgtgagatttttgcttgtgaaattgacattattttgagaaccttggtagaggatgttgagttaatggatttgcttttttcatttataaaacctgaccatccgcatagcacactgttagctggttacttcagtaaggtggttatatgtttgatgcttcgaaagactgctcctcttatgaattatgttcaggagcatccagatattgttgtccagcttgtcgacctcattggtatcacatcaataatggaggtgttggtgagattgattggtgctgatgaaaccatatacttgaatttcgcggatacattgcattggttagagaatacatatgtactggaaatgattgtggataaatttagctcatcagactctcctgaagtgcatgcaaatgctgctgaaattctttctgcggtaactcgatgcgcccctcctgctcttgctgcaaaaatatgcagtccaagttttgttggcaggttgtttcatcatgctcttgacgagtcaagaccaaaatctgttctggttcattcattgtcagtgtgtatatctttattggaccccaaaagactagcatcagtctcataccaagcatttagaagcaacttaactcacgggacgctggttacagccagtccagaaacagttgatggtatactggagagtctaggtgacttgctgaagttactggacattacttcttctcaaaatgtttttcctacaacttatggatgtttgtgtccgcctcttggaaaacaccgtttgaagattgtagaattcatctctgttttgctaacaattggtagcgaaatagctgagaagaagctaataagccaatcagtgataaagcattgcattgatttattttttcagtacccttataataactttttgcatcatcatgttgagaacattattgtttcttgccttgaggttaaaagaaatcaattgattgaccatattcttaatgactgtggtcttgttggtaaagtccttgccgctgaaaaaagttcttctctggcagtggagtctaatgggccaacattaccatcagaagggaaagaacctccaagaattgggaatattgggcacataactcgaatagcgaataagctcattcaatttggaaatagtaacagcatgatccagagtcacttgcagtgagtgggctgtatggcaaatagatgtcctgatcaaacgcaatgaggtggagaatgtttaccattgggcatgtggccgtccaacatctctacatgatcgtgggagggatagcgatgacgacgacttccgagacagagactacgatgtggcagcactcactaataatatgagccaggcatttcgatttgggatatacaggaatgatgacattgaagaggcacaaggatcccacgaacgagatgatgaggatgtctactttgatgacgagtcagctgaagtagtaatatcttcattgtgtttgggggatgatcaggacagcagttcactcttcacgaattcaaactggtttacgtttgatggtgatagaggaatcaatgaccgcctagctgcctctgttcctccatcatccccggattctgaagcgatttccttaaacactgagaatactgatgaagcgctaactggtgaaaccactggaggcactgagtcactgcgggaaagtgcatcccttgccaatgaactagcagaagtcgctaacgacaatgatgctgatgccacggacggtgagaaaattttgtgtacagaagaggacagtcaagcctccgaggggcctgtggatgctaaagaggacaagactggaggagcgtctaaagcagcgaatgaatctgtgcctgacaatgccttgcctgaatcccaccacactgattgtcggtgcgctgactcatctgaatcaggaacagaagaagatgtggagattgatgatgagaagaaatctgagactgctatgacaaatgaatgagcgttatgggcttggaatgataggatggcggatcagattcttttgctggtgagcaatgccactcaagcaggggcgccgtacaattttaacagcgctgctttgctattgaggagtctggttgttactgcatactcgggcacgcacgctcttttatcatctcacctcatcaccatcatcccacatggaccaatgtcgtctggcggctcctgattttggtctcttcgaactgtaatatctgcagtgagttttttccatcagtttttatttttttttccgggtttctgcatctgtaatagctatttcttcaagcgcaaaacatgtcttctctttgttgctataaaaagcatatagtttcaccaaaa

SEQ ID NO: 36506 - DNA, 1619 bp, Zea Mays
ggcgagggtggccttctcctcccatgcaagctcagcagtacgctcatgggcacgaaatgtgttggcttatcttctgccacaaagggaacttggtgttgccgatattgtgagaatagacaacagagggaaagttgtttggcatataacaacaatgcaatagctgctgggagagttgaaggagttgatgccttggaacaaatattcacgcggtcgatacgtattgctacaacacttgagactggatttggtggttgcgcactgtgcaagctccatgatttcagcaaaaagaaattcagtacccgaaccgtgctgctttgtgaccaatgtggtagagaatatcatgttggttgcctcaaggaacataatatggctgatctgacggcattgcccgagggagcctggtattgttctacggactgtgtgaggattaaccagacactgcaagatttacttaacagtggtggagaacctgttcttgccatggatttagatgtcattaagaagaaacgagaagtgaaaggttttaatgatgatgatgctgaccttgatgttagatggagagttttaaaggacaagagctcagacgacagcaaactagtgctctccaaagcagttgccattttccatgaaacttttgatcccattatccaggtttcaactggacgggacctcattccagccatggtttatgggaggagtgcaagggaccaagattacacaggaatgtattgtactgtgttaactgtgaatttctgcgggtcttttccgcatcatgggtagtgaaattgctgagctgccgttggttgctacaagtagggatagacaaggcttggggtatttccaagcacttttttcctgcatagaacgtctgttgtcatctttggaggtgaaacattttgtgctaccagctgcagaggaagcggagtctatctggactgagcgttttgggttcgcaaagataagccaggatgagctgcgcgaatacctcaagggtgggcgaacaactgtgtttcaggggacgtcaaacctgcacaagctggttgcgaaacttgaatgctagttatgtgagaattgtatggcaagagcaaggacatgaagctaagaagcagctcattgtttgtgtgcctctgggattgatgcagacaggaaagaggcaccctgatccctttcttgtaaatgttggtgagcatgttggcattggcatcttgatctgtttccataggtaaggtgaagaggattgtgtaagataaaagggacaagctgtatgtaaagacaagccaaagctgagtgaatttcaggcaccttattgtgtggagggtcctgtgtttgttgagtaggcaacgctcgggctggtgtgagatgatgactgcatttgtgttgtgttggtggtattttcactgctgacatgactgttgtatcggatgacatcttttctgttttatgacagtggcagtgtgatactaggctgttaggaggggacgggggaggtcaaacccaacgtacatcatgagtggagctgctgtaatgtaacagaagtattgcaccccccccccccccccccccaataatatataacatgcttaatttggtgcgaattccttgccgcttgtggagcttag

SEQ ID NO: 36507 - DNA, 1908 bp, Zea Mays
ggtcaagtggacaagagagcaggccgcacagtcgcgcacgccggctcacatgctcggttccggcgacaccccgcaaaaggcagccatgccgcttcgcctcggctgtccgcctgcccccgatcggcggaggcgaaggtacacctgtcggggtgcgcgcagcacagcggcagcgccccctttggaaatagcgccggggcgacgtggccgggctgcgcaccgctcctccgcaccattttttactcctcttcttctcccccaaggccccaaccatcccactctctctatacaacagccacccccgcgcccttccgcccttgtcgagtccaaatccaggttatagatcctctcgcgccgccgctcgcagccgctcgccgcccggtacatctcccccgcgcctctccctgctcctggatttcaccgatctggcatgctttactgtcccgtcatacggtggcagcgggagccgcccccttcctgcctccacagctcatgccatgcatggccgatccattccctcagatcgggattgccgcatacatgccgttgcttccccgttagcttctcccttgttacaccccctcgcttcgttctgcgtagtttcggggtttgacaccgcttgtctatcccgttcctatagcttttagggtttcgagctcaaactccgcgccggcgtctcagttgctgcaagtggcggcagcaagctagaggcagcaactgcataccttgcaagaaaaaatcggttttgttgacgtaccgatgattttcttgcaagttgtgcagttgttgtctcaagcttgctgcctccctttgccagaactattgaatgtgaaagcacagttaagtaatgccacgcccagagaatccaaaagtgctgacatctcaatggagctaaataatcccagagcatgtgaaatcctaatgacgcatgcgtcttgagggacgaaacaggacaagtcagagattggtgatgaacttgctggaacaagcttatgcatgaaactgctgatggttttaacctttttaggatttagctaaaggctataataatcttcaaaggttcaatataaattcttggactatagactgaagtatggctgctgatcttccaagatctctccagttcagaggatgggattatgggagcttagaccagagctgtctaagcaattccagagtacagaagggtatactctgatcctagaaaagatggcatattctatcggaccagagtcaccagaccttggatgaaagggcttcagtttaagtcctacaagagatgaacgatggcaaccaccaaaagtccaactacgtagaacgatggcaaccaccaaaaattgcccattgttcatccgacgggcaatttgccgtttcttctcatggtgagacatgggatgctgcaacatgacccgaaaaactggatttcaattcaagtgaacagtttctccatttgtacggtattccattgcaatttctgcctatgatggtgcgcggatacctgggctaagccatgtggagacacagacaccatatatgaagttggtctttttgctgccaaccaatcatgaacaccaaattcagagttaggaatgaactataactattcatagtcttgttattaccttaagctcttgattttgcaacgaacctgttgatgcgcagttgatctaacacatgagatgtggtttaatagacaatacaagtgtattctagttgtctttttcatagtgggtcagtgaaaaaaagtgttttgaaccattgttccttgacccatatgttcgacgcacacaatttgccaagaactatctgcacatatggttttgtatcggttgcaagggctgatgttgtactagtaaatgctttctccgttcaaagttattttaactatctcaaaacatattaagttgaact

SEQ ID NO: 36508 - DNA, 1553 bp, Zea Mays
cttgtccgcttctccatgcctcacctcctcctcttctctattgcctgcctcgtcctcaccatcacggcgccgcgcgtatgactcgcgcttgcttctctcaatcgcttccgatcctggagctggcggctgggccacccacccggtgcgcccgtgcgagctttcactgctccctccccctacggcctcataggaacgctcgttatggttgtgtcctgatgctgctcaggcttgccgactcgagaccgggcggcctcctcgctcggcaaattctccgccgacgacagggagaaggtgctcactgccgttggagtacacacggcgatatctattgcacaacctacttcctagatacaggaagatggtgataaccacactgggaatcatggcaaaaatcataccaaggtcaaatagaatgggcaggcaacttgaatcgttaagcagaggactgggaatcaagattccaacccaaatcactgaagggaacaaaagccagagccacctattcaagctactaagtttgcattagagctagagggatggtcgccaaggccagggatttactgtcgaggtgtacaagtccatggcagtggctgtttgtggagattagaagctgatgagggagtctcgtagcagaacttcaatgttgagatatggaaaagctacatatgtatcaagatatgtgaagactgtccgcctcaaacaagaggagtattttggtggagcgaagtttatgaagggcatggaggtactgctggtaacaagttctggatgtcattaggtctaccattgatagctactgtgaactgtgctggtaacactggagccaagaacctctacatcatttctgtgaagggaatcaagggcgccttaacaggcgtccttctgcctgtgttggtgaccatggagaatggaaagcctaaccttaggaagaagaagcaagacaaatataaggatgctgaacctagtgcaatagatctttttaaggagatgcattgcagcaaaaagaaaggttttagcaaaaatgttcagaaagctattgttgatatggaagaaatggtggcaacatcagttcaagatggacaacaaccgaaatatcctacagaagttgtttatagtgtgcaactgggctccagtgtgttcttatgcaatcttggtctttagtccgtctccaagaaaagctcaacatcaatagtttttataaaggttcaacaacttcaggatcgactggaggccaagaagcaagaaaaagatggactttgggaagaagtgtaaaccttaaatgctcaggcagtcatctcaggagaccattgatagtatgaagaggtcgaccgaagaaaataacaatctccttagtcaactgttaagcttcaatagaggccaagtgcctccatctcaagtctacttgaccactataggatctgcagccttatggttgctatagtagctagttacaatagctctggatttgaatttataggattattttcaattaagcttaatgtttaattccttgagttgaagttataggattttctttggatcttatgtaaaag

SEQ ID NO: 36509 - DNA, 3647 bp, Zea Mays
ctcccgagttggatctagggtcccgctcgatccgctcccggatttcctgctcgatctgtactacagagtcaatatgtcgcttgacgttactcaagttctcttaagtgcacaatctgctgatggcgcaattaggaagcatgctgaagaaagcctcatgcaattccaggagcagaacctccctgggttcttgctctccctctcaagcgagatggccagtgaagagaaacctgaggagagccgcaggttagctggcttgattctgaagaatgcactggatgcaaaggagcagcacaggaagaatgaacttttccagagatggctggcactcgatactggtgccaaggcacatattaaaggattgttgttgcaaacgctcacatcttctgtcgcaagtgccagatccactgcttcccaagttattgccaaggttgccggtattgagattccacagaagcaatggccagagcttatagggtcattgctcgcaaacatacatcaggttcagccaaatgtcaagcaagcaacacttgagacgcttggctatttatgtgaggaagtttctccagatgctgttgagcaagatcaagtcaataaaatacttacagctgttgttcagggtatgaatgcttctgaggcaaactctgatgtgaggcttgcagctacacgggcattgtataatgctttgggctttgctcaggttaacttctcaaatgacatggagcgtgactatatcatgagagtagtttgtgaagcgacacagtctccagaggtgaagataaggcaggccgcctttgagtgtttggtggctatctcgtctacttattatgataagctggcaacagacatgcaggatatatttaatataactgcaaaagctgtgaggggagatgaggagtcagttgcactccaggctattgaattctggagttccatatgcgatgaggaaattgatattctggatgagtacagcagtgaatttacagctgattccgatgttccttgctactactttatcaagcaggctcttcctgccttggtgcctatgttgttggaaactctcctcaagcaagaggaagaccaagacttggatgaaggtgcttggaatcttgcaatggctgggggaacttgtttgggcctggtggcaaggaccgttggtgatgacattgttcctcttgtaatgccttttgtggaggagaacataaccaagtctgagtggagacaaagagaggctgcaacatatgcctttggctctatcttggagggcccatcagctgataaactggctcctcttgttaatgttgcattgggcttcatgctgtctgcactgatgaaggatccaagcaaccatgtgaaggacacaactgcttggacccttgggagaatctttgagttccttcatggttcagcgcttgaaactcctcctatcatcacaggtgagaattgtcagcaaatacttactgtgctgcttcacagcatgaaggatgtcccaaatgtggctgaaaaggcatgtggagccctatatttccttgcacaaggctatgttgatgctggatctgcatcaccattatcccctttctttcaagatatcgttcagaacctgcttatggtcactcacagggacgatgctggagaatctcggttgcgaacagcagcatatgagaccctaaatgaagttgtcaggtgctccactgaggagacggcccctattgttatgcagttagtacctgtgatcatggtggagctccatcagacactggaagctgaaaagctgtcaactgatgagagggagaagaggagcgaactgcagggcctcctttgtggttgcttgcaggtcataatccaaaagttaggggggatggagtcaactaagtactctttcttgcagtatgctgatcagatgatggatctgtttttgaaagttttcgcatgtcgaaatgccacagtacacgaagaagctatgcttgctattggtgcattggcatatgcagctggcccaaactttgcaaagtacatgacacagttttatcagtatttggagatgggacttcagaactttgaggagtatcaggtgtgtgccattaccgtgggtgttgttggtgacctctgcagagcactggaagacaaaattttacccttctgcgatggcatcatgacccagctcctgaaggacctgtccagtaaccagttgcacagatctgtgaaaccaccgatattttcgtgctttggtgatatagcactggcaattggggaggactttgagaagtatttgatctatgcgatgcctatgctgcaaagtgctgctgatttgtcggcccataccactgcaactgatgatgagatgctcgactacaccaatcagctaagaaatggaatcttggaagcctactctggtatcctgcaaggatttaagagttcacctaagacacaactgctgatgccattcgctccgcatattattcagttccttgatgctctgtacaatgggaaggatatggatgatactgtgatgaagactgcaataggtgtcttgggagatctggctgacacattaggtgtccatgctggccctttgatcaatcaatccacctcaagccaggcatttttagaggaatgcttggcatcagacgatcctttggtgaaagaatctgccgattgggcgaggatagcagtcagccgtgcagtttcgggttgatgccacaacctgctcttcggtgaagtccaacatctttacagcagagtcggagggtccccactaactcatgcatcagtacatgtgtcaacccgcgccccgcttcggcgggaaaagaagggttcaagttggccgcccactaactttcgccaaatgcatctgcaaccttcatgtcttgttggaggtgagatgaggttctattatcgcatgacatgctcacagattcctgtgcatggcatgcctatgatatgtggcccatcatttcctcccctgtatccatcccatgcatcaaagtttggtcagatggccacgtgggacaaaaggcgcagtttcttgctgctgctccagtaagaaagagcgggctcgaatcgcgttgtcacaggattatttttgtatcgatcagggtggccaagtccatttatgtcagacatatcctccctgctgctgctggtaggttgtgaatttcctagcattcttttccctttggccgcttgcattgtctttgcatttcattcttggtcggtctattttgtaagagttgctttgggggcaaaacatgtgtcctgtccggtctgctaccgcacgctatttgtacaagtcaggtccgtgcgtgcattggtttatttcccggtgttatcggagcagcgcgtgtttgtgcctttttccaccgtgtttttggtaatctacatacatgctgctccatttcggtttatgaggagctgtgtgggtgaagaaacagagatagagttatataggtctttgaagtggttcttgctggtggcagaggcaaattgagttgggtgtggtttatgaattgtaccatggtgtggagaagacccactggtaatatttactgtatttggctggtgctccgccgcagagcatatgagcaaagttaagcgtgagtgctctttttctcagcttcatctaaacatggaatcaatttagtaaaatgtag

SEQ ID NO: 36510 - DNA, 1814 bp, Zea Mays
atggaatcggactctgccgatcgtggggaggcatcccgccaccgctcaaagagggagcgaccgcccgacccagagggtgatgcctgccccgacgtcggcaggcgaagggtggccgccgggcccggagtggacgccggtgctaatgttcctgacttgggcgaccaaaaggagtttgaacatggagaaaaactgcaaagaataccaaaacagaaatatcaggttcaaaatgacatgagaacattggcgtattggttgtccaacttatctacattaacagttttccttcaacggtcattcaaaactactaggaccacaatctcaactccacaaaggagaagattttcgtccgagaggatgtttggaaatcaaacttcaaatgctgggcttgcttatctcagtggtcaatcagttggatctgctggattgctccaagttgaagcaaagtatcctgctttgctattcaaacagcagctcgtggatttaattgaaaaggtttatggcatgataagtgacagcgtgaagaaggaactaaaccctttgcttgaattgtgtatacaggatccacaaacttctcagtcaagtattgcaaaaggtaatcttaatggcatgggtcaacagaaccaactcacacattggctgggcatagtgaaaatcctcactagctacttggatgtactaagggaaaatcacgttccctcaattctggtgcataaacttttcactcaaatgttctcacttattgatgttcaattatttaaccgattacttttgcggcgtgagtgctgttcttttagtaacggggaatatatcagagctggactagctgaactaaaacattggtccgacaatgctacaagagagtttgcaggttcagcgtgggaggcattgaggcatattagacaagctgttgatttcctggtgatttctcttaagccaatgaggacattaagagagatacgcactgatgtgtgccctgccctcagtatacaacagctagagcgaatagttagtatgtactgggatgatgtgaatggtacaaacactatttcagcagagtttacatcaagcttgaaatctgccatacgtgatgaatccaatatggccacaaatttctctatactgctagatgatgattccagtatacctttttcacttgatgatattacaaagacattgccggtcattgagctggctgatgacgactttctgccatttgtccatgaaaacccaagctttgcgtttttattgcaaagaggggagtagtcttttttttttgtcaccattgtgacttcacctacctgtggataagtcaggattcctgctaggatgtacagtacgcgtgattctttttgtaccaggtagcaaggcatcaaagattagatgctaggtgagcttataggcttctggtttctattgatttgtttgttggttgtatatttgtattcaggttttccttgccattttttctacttgtagccgttttttgggcttgtatactaggtggtaagggcagaagaccctgccctgtaagcatagttacacaaggtcttgctgtaggtatggaagctgtacatgtgttgtaacggattataaaagggggaaagtagtgcgtagtgatggctttgtggttggtgtgttgcttacctttgatcaatgatcatgtattggttcgtcatatattgtttattgtactgcacaccattccattgtagataacatacacgctcaagacttgttctgggatgtcaaatgagtaatctgttacggtacagaaatgtcatgcttacttccagatcttctgtaatgaacacaaa

SEQ ID NO: 36511 - DNA, 2365 bp, Zea Mays
tgaaataaatacaacgttcacgctggtgctatctgttgcagtttacaaccactataaacggatataccatcaatctttacaaaagggtaggtctggagcagatttgggtggttttgatggggaagctgatgacgacaacaatgtggaactagagaaaagcaatgtcctgttaatgggacctactggctctggtaaaactttacttgcaaagacattagctcgttttgtgaatgtaccatttgtaattgctgatgcaacgacattaacccaggcaggttatgtaggagaggatgtagaatctatattatacaagttactcacggtggcagattttaatgtgcaagcagcacagcaagggatggtgtacatagacgaggttgataagatcacaaaaaaggctgaaagtcttaacatcagcagagacgtatctggtgaaggtgttcagcaggcattgctgaaaatgctggaaggcacgatagtcaacgttcctgaaaaaggagcaaggaagcatcctcgtggtgataatatacagatagataccaaagatattctttttatatgtggtggcgctttcgtggatttggagaaaactatatcggagagacggcaggattcttctattggcttcggcgcaccagttcgtgcaaacatgagggtcggtggcacttcaagtgctcaagtgacatcgtccttgttggaatcggttgagagtggtgatctaatagcttatggacttatcccagaatttattggacgtttccctatccttgtgagcctcaccgctctaaatgaggaccagcttgttcaggttctcactgagccaaagaatgccctgggtaagcaattcaagaaattgtttagcatgaatgatcattgggtttcaggttaagcttcactttacagatggtgcacttagaataattgccgaaaaggcgatgtcaaaaaatactggtgcacggggtttaagaaccatccttgagaatattctcatggattctatgtatgagattccagatgcaaaatctggggagaagcgaattgatgcagtggttgtagatgaagatgcagtaggatcagtggaccaacctggctatggagccaagattctttatggtgacggtgctttggatcaatatctatcccatataaaggtggcgggagatggagtcgcaagcgaaatggatggagaagctgagctttcaccatcccgagccattggcatgtgattcctggctctgaccgcactagtgtaacctgtaaaatctaatcccagttgtatccatgtaagtagcagccttgtaaatgaaataaatatgtgcagcgtccattgttcctttgacacctgacacacgttgcccggcagcgctcacgccttgcatgatttgaagcaggattcggaagagtgtattcgagcaggttcatgtatgtaccgtcagttatgaaatttcctataagtcccagtagactccttgtgtctaattggaagaaaaaattgataaaaggcttcaatcttggaaaggaagggccctttccatcgctggtagaataactctcattaattcttgcatcacaaatactcctatctatcatatgtccatgtacctgtttcccaaaacaacagttaaaaaaatggactccatcaggaggaaatttctctggcagggaggaggcgatgaaaagaagtaccattttatcaactggaaaaagtttgtaataaaaaagaatgggggtcttggtatcaaggaccttatgttgttaaacgttagtgtgctttataagtggtggtggaaattagaaaatgaggaaaatctatgacaagaattaatcaaaaataaatatatgcacactaagaatgtgcataaagtttctttcagtgctgatgactatcatgtttggcatgacttgttgaaggtcaagaatttgtatttaatgtgtagacaagttattacgaaatctggagataaaacgagattttgggaagattgctggttggataatcaacctctctgtcgtattaatccggagttatatgatatctgcgattgcaaagacattatggttaaggatgtcatggaggcgaacgtccagatatcttctccatgatattatagaaaaatgggaaaatattggtatgaaagctgagaatttcaattatcaatctgtctcggatataatcatctggaaattggagaaaactcgtatgttctcgatcaaatctatgtattctcagttgattaagacagaccttagtccccatttgaaacatatatggaaaagcaagattcctcccaagatcaaaatctttatgtggtttctagaaaacaatgtgcttttaattaaagacaatttgattagtaagaggtgg

SEQ ID NO: 36512 - DNA, 1028 bp, Zea Mays
gttctgcctcccactcccacccgcgacaccctccgctctgctcagcaccaaccgccatccccgcccgccatctgcgcgcgtctggccgtctctctcgcccccgttctcctctctgctatccgcgcccaaatctcaccgtatgtgcgcgtctccatctgcgcgcatctccccagatccactctactcgctccaccacgccgaccccgacccgacaccggcaaccacacggatccactgtgctctccatggccatgaaagggaacgatcttgcgccgacctcaaccaggctctccatggaaggtccgcgtggttccctctcctgcatcccatgatccggatgccgccacaccatggtcgatggtcggggccgtcgaatccggatgcccgcgctctgcgtcgcgtggatcttctagatcacgcgggagctcgaccacaagtccgacggcgagaccatgaagtggctgctagtacatgcttgtcatgctctcccctccacaccccacctcgatcgtgcgggtacagcgccttggctgccgagatcaatgggggcatcctcgccgtcggcaggcccaggcagcactgagttgtgctctgctgcggccgctacttccagatggatggatttgatcaaatagtgaatgtgaaggttgtaatggcaactaatagggcagatactctagatcctgctttgctgtgaccaggtagacttgacaggaaagttgagttcccttgtcccgattggcggcaaaagaggcttgtgttccaagtctatactgctaagatggatttgagtgatgaggctgatttggaagattatgtttgcagaccggataagatcagtgctactgatgttgagttggtttcatggcacataccaagatttttatgcatttgttgttttctaagtattgtattgctagggtacttatgtcctgtgctggccaaagctgtcaaaaccatgagaaaggcagagaaggtgcttcttatagcaaagccacattgttttcaagtgattatagccgagcttc

SEQ ID NO: 36513 - DNA, 3269 bp, Zea Mays
ttccgcgttcccactgcgcagtccgcgctcctcttccctcactggtgctcgccttggctgctccactcccagctccaaaaccctaaccccgcgagacatccagcagctaggagcgggtccaggagctcaccgtcgagcgaccgctacactcgacctcaccggtttctaatgctgatcaaagcatgagcttcactcctgttccaaggttcaggggggcagcctattcgcagttgtgtcctcagtctagcagttgtgctgaacatttggtaaatgtggatggggcgagtgcaaaagacttgtcagttgacccaagcacattttgtattccgcaagatgctaatcagggattttgtagccgagctttacagtacactagttctgtttcaaagcagggatttgcagctcaaggtcttcctgtaaatgctgcagagtttggtctgaataatgattcttctttggtgggaggatatcaacaatttgactaccttctggggcctcctcaaactgaagtgtgtgaaggaatgtggatgaaaaatatcaacacaagtatcatccaccggcgtagaccttctaatgcatcctgccttgatcatacagaagaactaacttcctatgaaaatgatgagggagctatctcatttggaagtagttgtagcacaggaattgcgagttatccatatagtactcctttgcaaagaaatagccacatttcggatacgcgggatggaacttgggatgctctcgtgcaaatgcaagaggctttggaagcatccaacagtgacaatggactcaatgaagagtgcagtgatttgactttcaatcatgcagaactttcagaactttgctgatctccaacataagatgaacaacaatgagcaaaacaaattatctagtgaggttgaactgcctcgtcagaaagtgcccatgacaaaccatgttaatggaagtggaggtgaaatgcattctgctgaatggggaacgaaccctggtctcatagaatcttctggctttatgccaagcaatgaagacagacaaaacgatatatcacatcaaccgtcaagttcatttgtatacagtgcagatggaactgtggatcattgctcaaaaaagtcacccctcatgtatgaatgtgaagagcagatggaaattgattcacttttaaattcattcggtgtatcaactgattcattttcacaaacatatggaatgtttgagcgaagcaacaatttggttgagtttgatatgaagaccgaattagatgaaagtggttctgctgcatgctttaataataatgccccatatatgcaaactggaccacctgagtcagctatatctgatggatcttcttatcctgaacagtatcagtctacttctcaaacatgtggcttagtttatgcttcagcatctcagtggcaaaatatgtcaagttctggattgcctttactggattgtcgcaaaagtattggtgagcccacttcaataattagcctggggggaaatggtaaaggacacttgctgcccacaagtgaagatactttattacagaaaccacagagtgttgctcctgatgctagattggaaatgaccgacaatgttgctgattgctatctggagtctgctgctagcttggatggccattcttgtccactaggagcttccgcatgtcatgatgaagcaatggcagccaaagatttgcagacagcacaacatggcgtagtcacagattgcacctttggaatacatacttcaaaccacgctggacattcagacatgctgctacccattacacagactacttctgttcaagagcctggcttgagtttgtccaaggatctgaactcatcatgtattcgaggaacagaggttaagaaagtagatttaacagcaacatacaattctgaacgccatggcatcctccgcctcaagtcttttgaacaaaaaactcctgagagtatgggtatgaaaacatacatatatcattgtggtgatcatagccagattgttgatcctcagcagagtatcatactcgctgcaagcaaaccttcacactcaagtgttttgccagttgacaaatctgatggcaaggtcgtttcacagcaaaaaaagcggaaaagggctgcagaaaaccttttagcgtggcatgatcacatcatgcccgggcatgggagcatgcatcgtagaagaacacctgaattggattgggctcgtgctaccaaaagattggttgagaaggtagatggtgagaatgcaacaatgggaagtagcacctttaatactccagctcggaagagacttattttgactactagcctgattcagtatattcttcctgttgtaccagctagacttcttgccgcaaatgttactaattccattgaggccattgtataccacatttctaaatccgcactcagtgacgcatgtgacactgctctatctgttgtgaatgacacgctaccgaaccagagcagcacttctggtaaggaaggctcaagaatcctatcagaagttctggaaacatatgagtcgaggcttggcaagctggaaatttccttgttaaggcgacgacattgcatgatctggcatcagagctacaggacttggggcggtggtatattctctatcatcttgcaaagtggcatgggtacactaacaattctgagctcgaccctggcgcagctactgtcaagaaacatgaaggagctgctgcagcaccagtaaactcgctgagtgatatcaagtgtcgcttactgaactagggcagctcagcgactactaacaagtcaacccaacccgtgttatgctgaactgcgtataggaatatagaaccatagaacatactgctgctgtggataggcctggcgcggtggtgagaagccttctactgagccaaaggtcttgggtttaacacaacctttctgcaaaaatgtagagataaaggctgactctgttatttcttctctagaacctcactcatgtggaagtcgtcatcactgggtccgtctttagaacgtactgccgccccgttgccttgttggctttttttttgtttgtaaatgagaggcaacctctccgtttagacttaggaatatggtgatgtgacttaccatgtgctatgtgatcattagatgtaggagcacgggaagatcattttgcaagtatagctaacgctagctgtctggaacttccagatgttactgttcttttggccagtttgctagatggttatgatccggtggttgcagtttttgattgtcttttatctggtg

SEQ ID NO: 36514 - DNA, 4964 bp, Zea Mays
ctcggcggctcaagcagcgacagactcatcatcgagttgtcatcgattcctcgtggaggtcttgctcgcggcggaggtatatatttatatatctcaggtgaattcagacatggcagatgccctatttgtagttcttagtaaacttgctgattccttgggagaacagacactagagaggattagcacaaagctgattgaagtagcaccagttttgacagattttgagcatagcatgaagcaaatcgaggctgagctattgattcttcaggcttttattgcacaggttgggacaaaagtcggtgataaggcatttgatgcctggctggaccaagtgagagatgttgcccatgaggtagaagacatcattgatgagtatgcttaccttgaggttcaagccgtggatactggcagcttctttaagaggaagttccttcagataaaaaagttcgctgcatggcagaagtttcatagccagatcagtcatgtagaagctcgaattcagaggctaggtgaaattaggaatcgatatggcatcttgtcaggtgaaatagacaggagtaagaaattgaggagccccaatcggctctttatgtcagattcttcttacttaactgataactctgaaatagtggggcatgttgatgaaattggaagattgacacagtggttacttgagtacaaacaagagcgaactcttattgccgtttttggtatgggaggttcaggaaaaactactattgcaagcagtgcatacaagagtcaaaagatcacaaggactttcaattgtcatgcatgggttactgtatctcagacttaccaagttgaagaactactaagagaaatcataaatcagctaatagatcagagagcaagcatgtcaagtgggtttatgactatgagcggcttgaggctagttgaggtaatacaaagctatttgcaagataaaaaatatttcattgtcttggatgatgtatgggataaagatgcatggctatttctaaactatgcatttgtcagaaacaattgtggaagcaaagtgctgataactactcggagaaaggacgtatctagcttggcagttgatcagtatacaattgagcttaaaactcttcaatatgctgaatcctgggaacttttctgtaaaaaggcatttcgtgcatcaaaggataaccaatgtcctgagaaccttaggttttgtgcagagaaaattgttgctaggtgtcagggattgcccctggctattgtaaccattggaagtgttctatcataccatgaattcgaagagcagggatgggaatctttctacagccaacttagctggcagttagctaacaatccggagctgaattggatatctaatgttctgaatatgagcttgaatgatctcccgagttatctgaggaactgctttctgtactgcagtctttatcctgaagattacaagattaaaagaaaagtgatttccaagctatggatagcagaaggtttagtggaagatagagaagatggaacaacaatggaggaggttgccaattattaccttgtggagctcactcagcgttgtcttcttcgagtcacagaaagtaatgcatgtggaaggccgagagcttttgttatgcatgatcttgtgcgagagttaacctccaacattgctaaaaaggagaagtttggtattgcatatggcgatgctagtacaacccaagttccccctgaagttcgccgcttatgcatacaaagaggtgcccaaaccttgaattctataggtagttcgcggttccatgattttcaacaaagatcattgaattgtttaggcgcaacaaaaattcctgttaacatttgtcatctaaagaatctgcaagctatacagatcgttttggccaacaaagatttggtttcacaacttgggaacttgaaattaatgagaagtttggctatagcggaagtgcggcaaagctacattgcagaattatggaagtccctgacaaagatgcctaacctgaataggttggctatttcaacatgcaacatggaggagattcttgattttaaaatgctaaagcccttatcaaatctggttttcttcaagcttgcaggaaagttggagtcaggcgtgcttcctttgatgttgtattattttgagaagttaacatggttacaattagactggtccggtctaaagaaggaccctatgagctccttatctcacatgtcgaaccttgttcatctgttcatgtgcgggtcatattgtggggaacagctaactttttgttcaggatggttccccaagctcaattatctgcaattatctaaaatggagaatctgaattggattgagatagaggatggaacaatgatgtgtctaaataatttgtacttagttgatttagggaatctaaaggctgtgccctatggcatcaagtacatcaggacactgcaccagatgcatctgacagatatgtcaaaggagtttctaggaagtctgcaaggaagcgcgagtcccgttgttcaacatatatgcaacatccatatttttgaatcctctgattctgaagcagtaaataaattcttctttgagccataccttgccaccaagttcggccctggtgcaactaagcatgcccctacttacctgggatcatctggcatctgacagtcggtgagaattcttcttcaatgaaccagccgcgcaatatgctgttcatcttggtgccggaacttgagacggaactgattgttcgtgttgtgcctcgtttatggcttttgaacctagctagtggcctgctatggacttcctccacacaggtgttgcttaatggatctccagggcagcatatatctcatcggcgtgggctcagacaagatgacccactttccccaatgttattcattttggtgatggacgttctgggctttcttattaccaaggctgagaatgaagggttgcttcggccccttgctacaagaactctccatcacagattctctatttatgttgatgatgtggttatatttatccaaccaacagtcggggatatcaggactgtactggacattcttcatatctttggggaggcttccaggttgcgaactaatatccagaaaagcaatgtatgcccaattagatgcggggaacaagacttgaccttactgcaaagcttgctgccttgtgagatctcacaatttccctgcaaatacttgggtctacttcttgccatcaagaaacttaccaaggaccaagtacaaacgattattgataaaattgccaaccaactatcggggtggaaatctgatttgatgactaaggctggatggaaggtccatgtgcagtttgtcctcacagggatggtcatatatctcgcaatggctgtggatttacctccttgggctctcaaagctattgacaagatccgccgaggctttctttggcgatggcgcaaagaagcgagggggggacactgtcttgttgcttggggaaaagtttgtcggccgcttgagcttggtgggctagggatttccaatctcattgatcttgcttgggcacttcgtatgcgttggttttggttagcaaaaactgatccgggacggccatgggcctcccttgctatacaagttcccagcaaggctaaagttttcttctcggtggctatgcaaactgaaattggtaatggagcctctactcttttttggtctgaccgttggttgatgggacacagggtcatggacattgccccaagattactccagaatgttcctaaaaggagggttaataagaggactgttttggatgctctcactaatcagacttggatttcagacatacaaggagctcttgctgttggggttatttctgaataccttgctctatgggatattgtcacctcggttcagcttagacgcgaagtgaatgacactcacttctttcgtctcgccgccaatgggaagtattcaacaaaggcagtctatgagggtttttttccttgggtcgacgatttttgaaccgtaccacataatttggaaaacccgggctcctccaaaggccaagttcttcatgtggctggtcgcgacggctttggacagctaacaggttggaaaagagaggcatggatcaccctacgagctgccctttgtcaggagcaggccatttgctgattgggtgtgtgttcgcccgagatttctggtttaaactactatctcaagttaatctccaaaacatggcctctcagcttgttgatgcatcttttatgggctggtggagatggctgggcaatcagatacatggagtcagtggcaggggaagcagtaaactccctggtaatttcaggagcttggacaatatggaaacgtcggaatagctgtgtcttcgacagaaacagacctaatgtggctcttgctgtcagaatggcgatcaagagcgagagaagcgggagctgactggggcaagaaaactatccttgctgactagtcacatcccgggtctgtaggaatttgtagttttgggtgctttattcatggatgagtatcagtatgtctgtatttggccccctgtgaggtggctgttttgtattatctctgtttttttcttcttaatggaatgaaacacaactctcctgcgttttttagaaaaaaaaaacaatttgcagccaccaacaatgctggattcaggaaacatccgccatctgtctgcatggcggctgaagcatgggtcttgcttgaagattccgtgtttgctgaaaacggccagcaggaaaacagtagacgtttggttgaacagggtgccactgccagagatttgagataggagagtggcagtggttttgcttgagctccgtgtcacctgaaatactttgttgtagcaaggcctgtaggagaatttctcattgtaccatcgctagacttggtcagtctgtactttatacggttagtcgcatgtaaactgtgagtttaccaaaaaagaattaccagac

SEQ ID NO: 36515 - DNA, 2843 bp, Zea Mays
ctttcttcttcgtgcacgcctaggagcaagctgctgccctctccctggccagccctctcccatggccgccccctccctcagcttcgtcttcagccgccgtcgaaccagggcgagcaccccacgcccgtcgccactcccatcccctccccctctctgctgatggtcacgcgccctagcatccgctcgcccctgcgcgcactcctcccccatggcgagctcgccctcaactccctaccatggtgctcgcccaggctcgccggcatccatggccgcagttccctagatgctgccagctctggctccctagacgccgccagctctggctcgccggtctccgggctcgttggagatggcatattacctccaagacctacaacctagtgctcctcgacgtcgacagtcacgaccgcttcctcaagtccgtttgctgcaagcacgacgaggtgctgctcatcatcaaggtctacttcaagcgcaccggagcagagtggaggctggagaggattaggaacactttcaaggggatcgagggatcccacatgtggccctttcagatgaggattctatgcttagggcttaccgtcctgattctgattctagggtgtaggttgtagcttcagaaaaaggattggcgacatttttccaatgcacaattgcatgttctaaggcaaatttaagtggggtttagcaaatttttaacccatgtactgtatatttgtttggttcagataagtttacactaaggttttgcgcttttggcattaacttggtttaactgccttttccagcggtgtagtattttttgcctctatatgttgtgagttatccattttgattaagtcctgatgatgttagtgtagccactttattaggatgtttttgcacaagatagcatgtgtctaacatagccattttatagcatgaatcgatgaatgtacattgcttgtcggttcatatgctgatttggcttccaatgttgttcttggctgcaaatagattaggtagcatatctcctgagatagtacttcttcatcaacttgcactatcgattgagtacatgccctttctatagtcagattgcaaagaaatggcttgactctcagttgtaggaccatggctgaagacaagagtcatccatggttgaatgagcggatcatgtcattcctctcaaaacggtcggtcgttgtgcattcctgacaagacttggagataggtgagtacatctacttttgcattgtagtatgattctagtggtttatacaagctgatgctttatattatacttttgttatattaaaaccgatctagggctttattaaattttgatccaccagtgtcatcacttactattataacagtttcctacgagcgcggggcacgcccaagttactagtatatttatagtatgtctcctttatatgacacaaatggatgtgtgctctagcggtataagttgcttgctttgagccgaacatcttgggtttgaatcctgtccacgcataatttttttggtattattccgcacgagccacacgaagactgggtatttgattgaatatgtacacagaaagctctgaatgcattatgcaattctaatattttgctaaatgtggtcacctattatgtttgttaatctctgaagtagtagtccagtctagtgagttgtggttgaagtaatttaactcataataaactattcttaatcatagtcacattttctagaaagggacaactgaccctagtcagacatatgagagggatacttatgtgttgcacttctatcgaagagcatgctataagttcaaagtaaaatagtatagaatcaatttttaattttcaccctataaatttaagataagcttatatctaaaattcaaaatgttttgaaatacaaattagcctagcccattaagtagattacaattccaacaaaaataaagggatccaagtgggccctttgaaaagttgaatgattctaatgtgctatatcatacaacgatgccaattaatatcttttgttttttctactaaccatattgctatgctattggcaaagctttcattcattcttaatttaccaacaaaaggctccttgagataaaaaagatactggaagtcattggaggcgaacagatggtaacatatcatgtacatataagattgttgtatcattagaagtacctaactaataattgtagcattagagccttacaaatcaattaaagtactactacattaatacattatggaggccattatcaccaatacagagcatgctaagccagagcacaaaggccttttgagagtccatgaagtgggaggtggctctacgatgggttgactccactcaattggatctgatcttactcgtattcaagagctactagagctgcggtagaatgtgtccatgcagagcgagcaagaggcctctgcagtgggtatggattcaagcaagactcacaacaagtgtgcatgaggtatatatgcaatctgatgtcctagcagtcaagaaatggtatagtctagggtcttggtgatctcaaatattatgttaaatgtatttgttagaataattagtgtgatcttaatttagttggtgtgctatacataatagtctagattagtagttctaaaagttagttgaagtatttctattcattattgaggattgtcactctttattgaggattatgtataacttctttattgaggattgtcactctttatgtatttctatctatagtttctttattgaggattgtcccttaagctaataagctaacatgtactttaaaacttataaatgttttatacattcaatttgtaatatttttgaatcaatt

SEQ ID NO: 36516 - DNA, 633 bp, Zea Mays
aattcccaccacgtgagcagaagcagcacaaccaagagccaacagagcaacgcccaggcacaaacgacacgaaccaggcaaccagctgccgagggaggaaccctagcggaacaggtgacggcggcgcgctaccggtgacgggggatacggcggcatcgtccccctcggcccctcctccatccccggcgcggcggcgccagcagccggcctgcagtttttcagctttataatggatcccaacatgaagcagcttcaagaggctctggttgatattgagactgatgcagaaaaagttcttctggctagacatcagttggtggaaaatgataagataagaaatggtaacagggaggctctgacagcccttcggaaacaagctaggacgtccaagactagcgtgccatctccctttgaggtcataatgaaagagatggaaggaagctctggcaagcagctgataaaggagatatgcccaacttgtggagatcatgaccccaaggaacatacttggctaatgtttcctggatcagatatgttttctcgtgttccatttcatgtggcacacactgttgtggaaaaaggactggatgtaaagaagtctgtgtgctgacacttggttctttttgtttactg

SEQ ID NO: 36517 - DNA, 4641 bp, Zea Mays
aagtgacgaaaatgaggcgcccaaatcgacgcatgccagctcctccaaatttggcttcccaaacacccttcttgcacctcgctgtccaccctgtccagcaacctgcacgctcatcagctagcgccagcaagggagctagcgatagggacagcgagtggcagcggcactcacaagtcacgagagtgaagagaagagaagagtgacacacacgcacacgcactctccccttctctctcctcacaaaatcccaaatcccagtcttatcatcctgtcttgctgcctcccttgtgcctcctgcgctcggagctcccacactcccgaggggaaaaagaaagcgagaaagcttcgagctttgcctcccccgtccccccacccccacccccaagggtaaaatgtgatgttgccatccatccgaatccgagaatccgattgcttctagtttgtctccccaactcctcgcctcgcctctcctcctggttatgggcgccggcgagttggatggacgcgccttgtcggacgcggagcagcagtagcggcgggcaaccaggcgggggatctggatccgaggcaccaccaccgggctcctcacggcggcgacgcaggcggcggcggagaaggaggaggaggcggaggagcgcagcaagaagcagatgagcagcagcggcaccacaacaaccggctgctgcagttccaccagcaagtgcagcagaaccaagacccgccgccggtccccctctttcagctccagcacctgcaggccgcggcggccgtgaggcagcggggcggcttgtcggccgagtatgcccttctcgaccccatgggcgacgccggccagtcccactcccaccgccaccaccacggcttccagccgcagctcctgtccttcggaggagtcggccagcaccacatgcaccagttcacggcgcaggcgcccgcggcgtctcactcctcgcggccgcggataggaggggtgggcgcgggcggcgaggccgcggccgccacgtccgcgtcgcactcgcgcgcgaggggcggcgccggggagatcgtggccgtgcagggagggcacattgtgcgctccacggggcgcaaggaccgccacagcaaggtgtgcacggcgcgcgggccgcgggaccggcgcgtgcgcctctctgcgcacaccgccatccagttctacgacgtgcaggaccggctgggctacgaccgccccagcaaggccgtcgactggctcatcaagaacgccaaggacgccatcgacaagctcgagacgctgcccgcgtggcagcccacggccaatgccgccgcgccgccgtcctcctcgacgcaccccgactccgccgagaactccgacgaccaggcgcaggccatcaccgtcgccgcgcacgctccgttcgacttctccggcgccggtggagcaagcggcggcgccgcgggcttcctcccggcgtcgctcgactcggactccatcgcggacacgatcaagtcgttctttcccatggctggcacgggtggcggcggcgaggcgtcgtcgtccacggcggcggcgcagtcgtcggccatgggcttccaaagctacacgcccgacctcctgtcgcgcaccggcagccacagccaggagctccggctgtcgctgcagtctctcccagaccccatgttccaccagcagcaggaccggtcggaagcccacggcggcaatggctcggcgcagcaggcgctcttctccggcgccgccagctactcgtttggcggcggcgccatgtggggcgagcaggcgcagagccagcgcatggtgccgtggaccgtgcccgacccaggcggcgggagcgctggcggctacctgttcaacgtgtcgcagcaggcggcgcacatgcaggcggcgtttggcggccagagccagttcttcttccagaggggaccccttcagtccagtaaccagccctccgagcgaggatggccggagagcgtcgaagccgacaacccgatgcagcacggcgggctcagccccgctgtgtcggccatcgggttctcgcccggcgtcggcttctccgggatccgcatccccaccaggatgcagggcgacgaggagcacaacggcggcggcaatggcgacaagccgccgccgccgtccgtgtcctcggcttctcaccactgacgacggcagagcagtggagcgcagattactccgcgcgcccaccatgccaccaaccaccatcacgagcatttcagcagcataccatgcatgaattcagcaaacacatatcaccgtcagctagctcctcaacatgcaccgcccaggtagttactttgctgctgcttcctacgacaacggatggctgcagcaaaatggaggagcaaggttgggagcgaagcactctttttgactggctggttggttggccggtcggtcggtcggtcggtttctctaccatctctcgctgctttgtgtacgtcactggtttttgctccaagaactcactcactcactcggagcttctcttgttagaaattaggcctgtgagaacgcagcacattggctagccagcaggttctttcttcactagatctcttgctgcttgtccgtttgctgcgttgttacagtaggtttagttgatgttctagttgctgtagtagttctcaagcttttgcatcttaattttgctgttgttctcgctggcgctctgcacggatcgatgggggttaagctagtgtgcttcctcctggggttcagggagcagctataagcggcagcgcagcgccagccagcggatgatgttgttgttgttgttagcctgataattaagcggatggggacaggagtctttggttctttttaaaataatctctctgatgtgattggcgtttgagacggattgtgcgtgcctgcctgccctgctaagatcttgttcagcattttaaaactgtcatgtgcatgtgcacctagctaggatggtgccattgccaatctccaagctgctagctgctgcctagctataacacgcacagtagtaatactttatcttgtctttgttcttgttgcatgttgaaccattgtttggaattggaagtgagaaatttaaagaccttccccacttaatggcagcgcagagcacaggagtaggggatttagcgcgcgctcttttgtgttacagtacagtagtacggggatggaagaaaaagaaaaggaaaaaaaagaaccgcaaagctttgcgtacaggttcattgcatggcctcatactaatgcagcatgtgattggcttgttctcttgccctgcctgccgctgctgtagcaggacgtcctgctacagcgacagcagcagctttcctgtgccatccatccatctatcactgggactgggcacggcaagaatgacacgaggaaaaggttttgtgtcgcttcgcgtgtcattggtacaggatctggcgcctctggtgcgtgtcattaacgcagcgctagctacatgcggacaccggcggcacagtacattgtccccccccccccccccggctttttaaccattttacctcaggaccgtaggtagactcactgactgactgactgcaacggacactgcctgcctgtcttctgtccgacgcagtcacgcagcccaactctttgtgacagatgccaggaggaggaggaggaggagggagtcgagatgccatcccggcatgcgccatggccatgcatgcccgggcccggcctctctctgattggagtcatccacatggagtcatcgactcgcactcccttaatttgtctgccctgccctgtcgctgttttaacttttaccatggcgctagctagtagctggtagattgatgagaggcacgtcatcttggatccctcttcatccatctcctctggggtgcgagtgcgagtcggccgccatgcatagatgaggagctttgcatgctggcggcatatggaatgaatgagcaaccgacgcccgctctacaccccatgctactcgcaaaatctcattcactgatgagtgcgcaagtggttgtcacaaagtacactgtagtcctttacaggctttagcagggcccggccgggcagctacattgccaagtttgtgaagatattatgttccactagctagagagaatatgaatgtagcacactcgcttttatcttacttatataaataggggccacgccatgcaggctattaaggttatactagtttgtcgcctgtcactagtacaatttggctccatacaagcggtagactttttacatcacaggcggttcggttagaaagcattttttcattaactaccatttttcatgaactaccatttttccgcatgtatggctttaagttcttatcaattttcttttccacacgcttgattctctctggaccgttaaagacgaacatctcttcatacttattgtattcctcttcttggtctcccacattctcaactccaacatttttttgcttttcagaaataactacatgcatcttctcatctgctggatcgagtacatagaacacttgtgcaacacattcggcgagaacccacgggtcatctttatatcatactttctttaagtctactagtgtgagtctgtagttatccactatcacccccacgagatgttgtacccattggcacttaaataagggtattttc

SEQ ID NO: 36518 - DNA, 1628 bp, Zea Mays
cttaaatattagttggcaccgtacacgtgttatttctgttttttttgggaaattttactgaagtgtacgtatttaagacaccaaattcttattcatctgttagttataactgtttcttgtttatatatagtagaatggcaggcttggtttagtggtgagaggtgtctcactgagtcaccatgtcgcggctcggtttatcccttccccagattccttgggcactgggtctgcccttgtttgggaagagaggtattgagaagcagcctttccagcttcctgactttatagctgcaactggaatagaaaagataagacaggcgtatattgagaaagaggatagcaagaagttgaaacagaaacagcgggagcgcatgcagcccaaaatgggcaaaatggatatagattatcaggttttgcatgatgcgttcttcaaatatcagacaaaacccaagttgtctagtcatggtgatctgtattatgaaggcaaagagtttgaggttaaactgagggaaatgaagccaggcatgctgtctcatgagcttaaagatgctcttggtatgcctgatggtgcccctcccccatggcttataaacatgcagcgctatggtccacctccatcttatccccaactgaagatcccaggtcttaatgccccaatcccccctggtgccagttttggttatagaccaggagagtggggaaagccaccagttgatgaggatgaacctgttgatcgcagcaaacactggggagatttggaggaagaggaggaagaagaggaagaggaggaagaggaagaaccaatggaagacgaggaaatggaagacggaattcagtccgtcgataccatttcaagtactccgactggtgttgaaacacctgatgttatcgaccttcggaagctgcagaggaaggagactgacaagcaggcagaacggccgttgtatcaggttcttgaacagaaggacaaaaggatcgcccctgggacactatatgggtacgtgctgggagcacaagataaatcatcagctccgaaaagagtggatctgcttaagaatcaaaagtcagacaaggtggacgtcaccatccaacccgatgccatggatgatgttgtggcagccaagtacgaagaagcgcgagaggaagagaagcttcggaaccaaaaggaggacttcagcgacatggtggcggagaatgctcacaagaggaagcggaagcaagagaaggaaggcaagtctaagaagaaggaattcaagttttaaggaccggcgggagatataggccgcctaatgtaaatttaacatttgttttgttccttggctcgactggatttgcttgcatgaagcaccatgtaggaagctgttattttggttgtgttgtggtcacgccttgtcctcttatggatataaggctattcacaaagttggttttatggtggtttcatgcacatttaatagtgtcattagatttttttatgacatagcatatcatttaaggtgattaagttttataggatgaaagtagtttcatggagattgagttttatgagatgaaattagttttatggggatgaaaccgtgccaagtcgtttttaagttcttgtaaactatgtgaaacatttattaaga

SEQ ID NO: 36519 - DNA, 854 bp, Zea Mays
gacctccccccgtttcaatcaaaatggaaaaaagtttcctcccttcccctctcttctgaatccggcatcaccatgcagaacaccgtcgcgaacccttccactgcggccgccgccgctgcggcagaacctggcgcaggtgacgagctccatccagaagacgctgggcctgctccaccagctcaacctcaccgtctcctccttcaactctgcctcccagctccccctcctccagcgcctggcctacggaagcatcttcttgaggagcttgaacaagctttccctgaggacgtagaagcatacagggagatacgtgctacttctgctgctgaggcaaagcggttggctcagtcccagggtactttgcctaatggagatgtcaaagtgaaagctgagcattgagcgaatggtacgactacagagggcaagtttgttatctctgcttagttttggggatggctttgttaaccagaaacatgcatatctttctattgcacgtcccctgatcagtgaatgtgtacatactatcgtagcatgtgtggcccaatgtattcaacttaactaataacttcaaaaagatatccggagcatatcgaactacggatagctgagaccatttccttatttcttttcgttctttacaagaccattctgatactctgaaattgattgctccgaaacgcgagggtcctggagctttcaattggtgaacaattcctgaagcaggtaatgcattgctaaacaagtagaaggtgtaactgtctccacttatgaacgagaagatttttgtagtagcagttatctgatgccttgctaaattgtcgggtgattagtattgatacctacacgttgccgta

SEQ ID NO: 36520 - DNA, 2895 bp, Zea Mays
ccggcgtctgcgtcgctagcagctgcggactgcggctgcggttgatgggccagtcggcccaaccacgcgtaccccttcgccttcctcagcgcgtcctcgtccggcttcctccgctcgatgcagcagcagcgactgcaggcggcgctcgacagaaaacaacacggctgcgaccggatctcaccggaaaagttgaggagtggagggtcttagctgccggagttgggtaatacctccctatatcccctattggtaggtccgccgctgctccaacctccaggtccaggcaccaggtcgctcctcccttctcttcccgtcgggttcttgtccatcgtagatagcctctccttcgccgaggtcaccagttcctcctcgtgtccttctcgctagtcgctacagtcctcctactctgcttggctcgagtggaatggggatccatcctgacctgagtggtttcttctttgcttggtagtcgcgcatatttggtagccgcgtccgcgtgacgtcgtcggtgcttgggtccattcagacattgttcttatttgatcagtacccctatttagcgcctgcaagatcgagatcgatcttacttgactccataagatgtattggggatttggagtgccttgtactccaacttaagactgggagtgaacccgcataccccaagcccgcccttccaccgaactgaactagacatcctcaagcgtcatcaattctaatggatgatgcagcagaaaatattcttgcatcacttggccgtgtgcatctcgttgatctaatggcctctgagggccttccttctgacagctataagatgtgtgtgtcgactctgatgcagtcactcgctcaatattcggcagccatcattcagctgtcaccagctgatggtgccttgttgaggtcaggtttggactcggctcgctttttcttccaccagcgagggtataattcaaatgaggctgtacactcggatgattcccgtgaatggtgcaagacctctggttactatgttgattctcagatgtgtctggaaatgtatgattacaggcctggtattactgcaactgatcccagcggtgaaatggaattacctccatcaggtttgcctgacatattttcggtgctgggtaaagtttctcgagatatattggacgcaatcagtttctcattgaatttacgtagctgtgcatttactgagatactcgacaacatacccttgagaagccaggaagtatcatcttctgttctttcagcatgttgtcattcaaggccatcgcttgaaggaggacatcagcatagcattgcttctcaagataatggtcacttgctcatgttttctgagcaggagcaacagattgataagactttgcttaccctagttaagtcagatatgtcaggtctatatattaaagacttacatggacactggattcttgttgatggagatattggtccacatgatgttattgtctattctggccttgcactttatcaggaaactgctggctatgtaaatccagctgtacataaaacagaggttggaatacatggatgtatgtttgggcgatgctctttgatgttcaagttcatgcctagatcagttgcaaggctgagtggttcagagatgagagctgctggccatggtgttgatgcccagtttcaggttcccatacaagttaatgatttcatgcagacagatcgtttttctgatcaactgtttcctaagactgaaccatcattacacacagaacaagattcagcatcattcaactccgtgatgaataaaaagaagggaaatacaagaacaaagccgctccctccttctaaaagacttcgccaagaagcacagagggtcctgaaggagcgtgttcaggacattgcagataagaaaggcgtcaagctgagattttgcaatctcaaggaatgtgaaagccacatcctgtcattggatagtccatgtgagaacacgagaactgaaattggatggccacaaggggttccgtttgtccatccacatgacctcccaaacaaggcaaagcttgggtttttggaagcttacgaacctggatggacggcctcccaacaagaaatggagttaagttctattgaaacatgatgagtgcattctcattttatctttctaattggcaaaggttggacaactgcttgcgacattgtgaacctcatcctgatcattccagcctgttctcaaaccaaattgttctaccagtccattgcaccctagcaaagtctgaaatttgtgttgattcagccttgtgctctgccctggagtatcagtcactccaaaaaaaaactgacttggatggcacctagccttctaaatgacattcgtaaaagtgtgctgacccaagattgtctaattcaaggagccagcctcagtaaattttgatgtattaccaaccttggatatgttttgaatttcggggctggtcatcaattcattccttcaacatgttgcagaagcagtaatgtatactgacgccaaataatttgtatacatagatgtagtatttgagaacgtgtaaatgcgactacccgctgcttagattgaaagttagattatataatctgggtagattataatcctaaacaaacaggcctttaatccataatgcattatacggaaatgtttgtaatatacttcgcaagttcgcatcaacaatgacaatgctgatgtggagatgtttagaaggagatggagaaaacacaattaaaagtcaagcaataagagcaacaagaaaagacacaagatcactctctcatgttactaatcattaataatcactagtcacaattatgacacttgaagagatttgaaagcttatgtcttatgaagtgcttgctcttgtattgaatgagaggcttggatcctat

SEQ ID NO: 36521 - DNA, 2039 bp, Zea Mays
tttctcagcaccttcttgtgccgttcttcacccgtcgtctcctttccgcagcaaccatcagcgtccaacctcctctctcaccctctccgtttgcaacaaccgcccaacgccaggtgcccagatcggcgtcccttccagccattttccgcgtccttcgccggtgtcgaagcacccatcagcagtgtacctgcttcagttaatagttatctgatatctacccttggccaaagcaagctatctattgtgcctgtgatttttgttgggagctgtcatagttcagtttttggtaggaacggtcacagctctactcaactgaaggcatggctgtaaaatctagtagaagttcagatgaaagctatatagagcctctcctatgctggaagaaggaattcagatcatctgtaattaaaattgttgattcgtccttaaactcgagtttgatgtctgccgacagtatttgttcaattcctgcttcagaatatggtttctattttaataaacgaatgaagatggatgaggaatatgatcaccttctgacaaatggaaatatgaaagatagtagcacggcaaacttcacaaccactggatatgtctcatctccagagcgcaacatggatggtcaatcatgtatggttagttcaactacagaatttttagcaggatcacattctaatgttaatactggtcagccatcatcctcatcaagtgcaccatcttatatcagtcagagtattaaagaagcttgggagtgttcattgcctgatacaaatactccaaaaccattaacagagttaatatcagcgagggacctttgcatctccatcctcaaaaggaaaatatgttccgccaaagactcagaactaagcagaacatcaagtactatagaccgtgatgataatctaaacaatcctttatttgaatgcacaaaatgcggtctgatggaagatccatccaaaatgttaatttgtgattgttgtgaaggagcatttcatttattgtgttgcaatccacatgtcaagaaaataccagaggaagagtggtattgtttggcatgtaaaagaaagaaacctaagagacaacgtggaaagtttgcaaatcccaaagttgaatcatccaagggcattcaaagaccccgccgaggtcttggtcctattcgagatatgttactggattctgaatcatatgaaagtggggttcggattggtactaagtttcaagcagaagttccaaaatggtctggtcctatttctagtagagaagatgagtttgctgagcccactgaacttgatcgtagtaaaacgacaatgctgagtttcgaggataagaaaaccagtatcggtaactggatccagtgccgggaagttctagacacaggagttgtttgtggcaaatggcggagggcaccattgtttgttgttcaatcaagtgactgggactgttcgtgctcagttgtttgggatcctatccatgctgattgtgctgttccacaggaattggagaccgttaaagttcacgagcaactgaagtacataaataagctgaagaatcgtctaggtgacagcaatcagaaacgctgaaaaacggtactcttgctgtcctgcaccagtgctgtccacagatgggtgtcgataccgtgtaccaattttcctcggatgcctcggatgaagtgagagccagtagatatgaaatccgtgtctacgcatgacatcttgacacataaaaatgctccttccagtcaaccggcatacgttatacgagtttcagtgtcgtgtgtaaataagagaaagaaaaggcattttaaaaacaaaagccatagcaaaagcaaaaaaaggaggaggagaagaaaatactcgatgctgctggagaactacaactcggtgagatggaaacagaaaggtctgggttgtatcatgaggtgtaaactggggtggtgggcgtgtggccgtgtttgtgtgtgtgtttacagttttgtcacctccgctgcttgaattatgatgaccgaagaatggatcacaatgctatagtttgatttcttttac

SEQ ID NO: 36522 - DNA, 4561 bp, Zea Mays
aaaaaatatcggttccgtttttgatttggaggggaggggagcggcggttcggagtgggcaggctcgctgttggttcttgcagcggcgcggcagagaggggtgtgcggtgcggccgtgctgttgaattatcctgttccttcagtgctcgcgtctcgatgcgttttctctgatgatggtttcatggccacctgcgtgtgctgctgctgctgctagtacgccagcgctttgattcggcagaggcgttgctttggtttcgggttctttcgcctttcctttcgccaaagattgcagctttcgcagccgcagccttttcttctccggccgattccaaccttggccagactacccccccttcaaaaatcgcgcaaggggtgggggttttacccggcccgtactgcgagcagcgccgaattttttcccctgggcgtgcgattgtcgcttagttgagcttcagagcctggttttttgagagatttctttttgaattttgagcctggtgtggaatttgggggtttgggtgtctgccagttttcaacccttggagagtcagaggctattgtctctgaagatatcgcctgttttgatgcgaaatggggaaatttctggtccctgtgctgttcggccattggatttggcgagttggtgtttgagccctggtatacatcacctgtctgtgctggtggccgtttgatttcacggtggtgatgctctctgcagcctccgtgatggcgccggcagcagccacacagaagagctcccttgaggtcttgcttgagacattaaagaagcgcgatgagcagcccaaggatgcacctccaacattgccagcccggccgacgtgccgtggccggctgcccaccaccagacggtcatcactgcctgctggctttatgctcgagaacggcatggcaacagttgctgccacagaagctgcagtggttgacaagaaggcagatgctaagatggagattgttgggctggaggccaaggaggaaaagctggtgaaaggctgcatctttgggactaagaggaagttccctaacacagaagtgctggaggagtcgccgtatgttggtaaatttcttgaggagaggaagggtacatcagtttgtaagaatcctccacatatttcctcggcaacgataaggatgaatgggaatgtagcatgtacagatatcttggactatattctccagaagaagctaagagtttggtgttcttcaccaaatgcaaagtgggaacttggacagatccaatcaatgtctggagatgatgctgaaatactcctggctaatggaaaagttttgatggtgtcaccagaacaactcttgcctgctaaccctgatatcctcgatggagtggatgatttgatccagatgagttacttgaatgaaccttcagttctttacaatctgcaattgcgatattctcgtgatcttatctatacaaaggcaggacctgttctgattgctgtcaatccattaaaagaagttgctctctatgggaagtcttcaatcatgcaatacaagcaaaaggccaacgatgacccacatgtgtatgcagttgctgatttggcatttaacgagatgctgcaagatggcataaaccaatctataataataagtggtgaaagtggatcaggaaaaaccgagacagctaaaattgcaatgcaatatttgtctgatcttgggggtgctagtggtacggagtctgaggttcttcagaccaatgttattctggaagcattggggaatgcaaaaacatcacgaaaccataactcaagccgatttggcaagcttattgaaatacacttctctgaatctggtaaaatgtgtggtgctaaaatccagaccttcctgcttgagaagtcgagggtggtccaaagggcacaaggagagagatcttaccacattttctatcaactgtgctctggagctcctccccttctcaaaaaaaaattgtttctgaaaagcgccaatgactacaattacttgaagcagagtaattgcttgaaaatcgatggtgttgatgattcaaaaaaattcacagtgctagtggatgcattggatacaattcaaatatctaaggaagaccaaatgaaattattttctatgcttgcagctgtcttgtggctggggaacatatcattctgtgtgattgataatgaaaaccatgtggaagttgtttcaaacgaaggattgtctactgctgcaaagctattaggctgcactgcaaatcaactagtgattgctttgtccacttgtaaaatccgagctggaaatgacagtattgttaaaaagctaacattaactcaggccattgacgcaagagatgcactagcgaagtcaatctatgccaatttatttgactggattgttgaccaaattaaccactcacttggaacagggaggcaatttacatggagatccataagtattttggatatttatgggtttgagtgtttcaataagaatggttttgagcaattttgtataaattatgccaatgagaggctgcagcagcacttcaacagacatcttctcaaactacaacaggaggaatacttggaagacggaattgattggacccccatggaatttgtggataacactaattgcttatctctctttgagaagaaacatctagggctattgtcattattggatgaagagtctactttcccaaaggcatccgatttttcctttgctaacaagcttaagcggcaattaagtggtaactcttgcttcaaaagtgaaaaagaaggcacatttaagatttgccattatgcaggggaggtgacatatgatacagctgggttcctggagaagaacagagacccattgcactctgagtcaatccaactactctcatcatgtacatgtgaactttcaaaacattttgcctctgtcatggttgctgattctcagaataaatcaagtctgtcatggcattcagtaaaggatacacataaacaaagtgttgtcatggaatttaaggttgctgcactggaaaatgctaaaagacagatgcttcttggaaccctccatattcaaacacagttccggggtttgcattctcggcggggatatcaacgactaaagaaaggggcgatgaatttgcaatcatttatacgtggtgaaagaacaagaatacactttgataatcttgtcaagagatggagggcagctgttctcatacagaaacacactaggcgtcgacttgcagctaacatgttcaatgatcaactgaatcatgtcattcttcttcagtccgtgacgcgtgggttcctggccagaaggaaatacaagtgtctgcagaatgaaaaggagtcaaaggccagtcacagcatagttcaagggaacacaaggaagaataactcagagtcaagaatatgccatgaaatgaatgggcattatcctcacgaaccagtcatcactgagcttcagggtcgtatcacgaaagctgaggctgcattgcggggtaaggaggaggaaaatgtaatgctcaaacagcaattggaacagtatgagaggaaatggtcagaatatgaagccaaaatgaaatgtatggaagaggcatggaagaggcagctctcttctctgcagctgagccttgttgtcgctaagaagagcctagctgctgatgatgcagccactagagcagctcggactgattgtactcctacacatgcgcagtatgactctgaagatacattatccaccgggactcgtacacctgaagtgatcgagtcgaaacacgacaaccacaaccctgaagctaaagtttcagcaggaaactcggataggcgagtgaatgctgtgaaccacctagcaaaggagtttgaagacagacgacaggtgttcgaagacgatgcgggcttcctagttgcagtcaggtccggtcagattggttcaaatatgaacccagatgaggaactccggaagctcaaggaccgctttgcgacatggaaaaaagactacaaatctcggttgaaggagactaaggtaaaccttagtaaggttggcacccatgatgagaaatcacggaaaagatggtggggaaagaagagctcgaagtgaaacgtgtaagagaatctccacaacattttgcaacgacactgggtcaaggaaagtggccaggaatgccagggcaggcgagaagaatctgcctctgatcccaaaagcttggtgagatgatgaactcccatgttggtggcagtgccgttactcatctgatgtcacgagtgtcgaaaagatcaaagtagacaataggtgaagccagagttctgtacatgtatattagtcagctctgagtcatcacttgacagtgtgtttatgtcatcgtgtatgtagagtgataaatccgaggcgtggaagggtaactaaatgcagattatccaccatgagcgaagagatgcgaaagcagagtactgtaatatgtgtacagtgagaacattgttgaaatgtgcaaggcattttactctgaaaactgtgattgcatcgccccatattttgcactatcttttgagacctttacacttacacatcagttttattttttt

SEQ ID NO: 36523 - DNA, 3155 bp, Zea Mays
ccaatcttattcgttgcatcattacttttggacacttttgcaaaatacacggcaaggacatcatttgagcgaccgctactcaatggggtggcatatgcacagcgtgtattccatcatgagagggaaatgtttgaaagccagcagggatggattatgaatacaatgcagcgggagcctgcacccccgcaggttgaatatgctccagtgattttctctcaggatactgtttcctacctcgcacgcattgacatgatgtctggagaggaggaccgagaaaacattttgcgggccaggactactggcaaagctgtgttaacaaacccatttcggttgcttggatcaaaccacttgggagtagttctcacttttgctgtgtaccgccctgatctccccgctgatgcatcagttgagcaacgtgtggaagcaactattggatatcttggtggagcgtttgatgtggagtcacttgtggagaatttgctgagcaaacttgctggcaatcaggatattgtggtgaatgtctatgatgtcacaaatgcttcagaggctatggttttgtatggaccttctagttcggatgagcgcgtgcctttcttgcatgttagcatgttggattttggagatccgtttaggaggcatgaaatgaggtgcaggtatagacaaaagcttcctatgcagtggtctgccataaccaatcctttgggcacatttgtcatatggatgcttctggggtatagcattgccgctgcatattctcgatatgacaaagttacagaagattgtagaaagatggaagagctaaaaacgcaggcagaagctgctgatgttgcaaagtctcagttcctggcaactgtgtcacatgagatcagaacacctatgaatggcgtccttggaatgctggatatgcttttaggaacagatctaactatgacacagaaggattatgctcaaactgctcaaatgtgtggcagagcattgataacgttgataaatgatgtccttgatcgagcaaagattgaagctggaaagttagagcttgaagcggtgccttttgacctgcgttctctcatggatgatgttatttccttattttcttcaaagtcacgggagaagtgcattgagcttgcagtatttgtatgtgacaatgttccgaaggatgttcttggagatccttggaggtttcggcagatactaacaaatttggtcggcaatgcagtcaaattcacagaacggggtcatgtatttgtgcgggtctgtttggctgataactcaaatatggaagccggtcaggtcctaaatggagccatgaatgggaaagatggtagagttgattcaacaactaatggtgccttcaatactctgagtgggtttgaagcagcagacagacgaaatagttggcaatattttaagatgctcctctctgataaggagtcccttttggatgatcttgagggaacaaattctgatcaaagtgattcagaccatgtcacactagcgataagtattgaggacacaggtgttgggataccattgcaagcacaagatcgtgtttttacaccgtttatgcaggctgatagttcaacttcaaggaattatggtggtactggcatcggtttaagcattagcaagtgcctagctgaacttatgggtgggcagataagttttgtcagccgtccttttgttggaagtacattcactttctccaccacactgaagcgctcatacaaagatatttcagttgattcaagtaggagcttgttagaggcactaccaactgcttttaagggaatgaaggccatcttgatagatgggagacctgtacgtagtgctgttacaagatatcacctcaagaggttgggaataattgttcaagttgtgaacaatatgagtgcagtagtaaaagctttccctggacaaaatggagcaactgtttctagggaaaaggcaaccattctttttattgagagtgacttttggaggcccgagacagatgttcagttattgaaccatctacgcgagcacaagaatcgtcagttgtctgatgggcataaggtagttcttttggtcacctccgaagctgataaggacaagtatggatccatatttgatattgtgatgtgcaagcctataagggcaagcatgattgcttcatctattcaacaactgctcaaagtagagatgcctgaaagaagaaataatcataatcggccatcatttcttcgcagcctgctggttgggaagaatatattggtagtagatgataataaagtcaatcttagagtcgctgcagctgcactcaaaaagtacggtgctaatgttagctgtgttgagagtggcaaagatgctatcagtctacttcaacccccacattgctttgacgcatgttttatggatgttcagatgccagagatggatgggtttgaggcaacaagacaaataaggcaaacagagatgagagttaacgaggaaaggaagaataagttggtgttgattgaaggctcaacatttgttgagtaccatttgcctgttttggcgatgacagccgatgttatccaggcaacttacgagaagtgtataaaatcgggaatggatggatacgtgtctaaacccttcgacgaggagcagctataccaagcagtctccagattaatagtgggaacgacagattcgactgtttaatatttagatggctatgaatctgatttctcattcatcgaattgaagcacaccaccatgttgcttctgtccaagtttgactctaacccttaacaattgtctgacctggcctctcgcagcactagatgaaaaggatgaaagtgccacgagttggctatgtatcagcaccacagatgaagttgcctcaccccggagtgtaggttggtagatcactctcttctttgatgtttataggttgttgtatatcttctgacaattcattggaaaccacatctcgttgcgacattggaggacatcttcaatgctggtaaatttgttataggaatatcctttaatgctggtatttggtactccctccgtcccaccaaaaatataaaattcgttttggactaagcatatattaattaattaatttatggatataatttgtatatatatcaacatttattatcatctatttgaatgtggatggaaaaaag

SEQ ID NO: 36524 - DNA, 1981 bp, Zea Mays
gccgaacccaaccgcaaaagttggcaccgcggcacggcggcaccgcccgcgaaaacgcaaccaccggcgccgtcaccctccctggctccggccttcagccgcctcgccagcgacgaccacggctgcgtcacatgacaagacacaacatatcgaagtcgctcgccgtcgtcctccgcgcccgcatgcagcccaatcccatctcctccccgcctccgccgacccctccgccgccgcccacggaccccgaccccgccgccccgcttgtggcttccgtcagccactggctccacgtatctgcctccgccgcctccccgccccccgcggcgctcgacagcttctccgatgggtaccgctccctcgaccttgtcgggcgccgcgaggtcctccgttccctcgccgtcgactacgatgtgccccgcgcgcgtgtccgggatctcatgaaacagtacatgagcgtcacctccgccgaaccatcaggcgtggatgacgtggaggcggaggaggggaaggagggcgccgcgtcggccctgtaccggatggagagggggctccgggatgcactccggccccggtacgccggattccttgaggccatgaacgcgcagccaggtgggctcaagctcctcgccgtgctccgtgccgatctcctcgccttgctgggagaggagaacgtttcagcgctgcgggctctggactcgtacttgaaggagaaactggtgacttggcttagtcctgctgcattgacgctccaccagataacctgggatgatcctgcctcgttgctagagaagattgtggcatatgaagccgtacatccaatcaggaatctgatagacttgaagagaagattgggcattggtcgccgatgctttgggtacttccatccagcaataccaggggaaccactgattttcattgaagttgctttactcaaagatatggaagcatctatacaggaggtcttgtgggatgaccccccaactcctgaatctgaagctagttgtgcactattttactcaatatcgtcaacccaggtattaatctagggaagtttcttctcaagcgtgtgattgacatgttgagaagagatatgccatcagtacagaattttgcaacacttagcccaatccctggtttgatgcaatggcttcttgctaagctggcctcccaaataaaattatcagaggcagaatcacgggaggggaattcactaggagcctgttctactttcaaagaatccatccttcttcctgatgaagagagaatgattcatgatgccatcgaacaagctgatggaaaacaagggattgaactattgcaagatatactgaaatcaagacagtgggtaaagtctgacaaattatctgctgcattaaaatcacctcttatgcgtttatgtgcaaggtatcttgccagagagaagaagcgaggaaaagctctagacgctgttgcaaattttcacttgcaaaatggagcaatgattgagagaattaattggatggctgaccaatcagagaagggcattcaacaaagtggaggtatcatggtcaattatctttacagattagagaacatagaagagtatgcattgtcatattcgagtacagggctcatccattcttcacctagcctgtctgagtatcttgagccgaaggatttatgagacaaaatatttctggaacggacttttgcttcctgaggtcttaaaagcttctggcatatgtttctgagttggtcctcgtgtatacttaactagtttgtaaaagggtgacaaattgactgctgtaactcggtctttatgatttccttttcttttggaacatgttgcagaaaaaagatactgcagatatgtcatatgcgtatgtcatgcgcgtgagactatatctagcttatccatacttatacccatatttaaacatatgtcatatgtgtatgtcacgaacgtgagactatatccagcttattcatacttatacccata

SEQ ID NO: 36525 - DNA, 1418 bp, Zea Mays
cggtttccataatggcataaatccaaatttctcgtgaatatctcagcgccgagctcgagcccgcagtctgccatcccctttcggtggcaaccaaatccggcttgcctgcagcggatctccatctggtcggagtggatcgggtctccggtggtgtttctcgcctccgtggcggttagtggcgccggacggaccacgtccccgcagcagcggtcagcggcggctggcctagctgcggtggcttgaggcggctctcggacgggtgcctcgagctggcaccagcgggtgggtgccgcaactctcaccgctagctggtgtagaggcggcgagtcccggcgccatggagggtaggccgcaagtgtccgcttagagaggggtcaacaaagggacttgtcaagctacgacactgcggtcttcggttgccctgctcagcttgttgttgccgtacatgatccttcatgatttgtgagagatctatattccccgaatcttcaccggctctgccagatcactggcgatcttcttgccagccgcctccgctaacctgcgcggcacagtagagctcaggaaaagcggtgggactgagggagaaaagaggagatgactagcctgtcgatcacagtgatgacgctgaacttgcatgaaggcgagcagccgagcgagagtcccaacagctgggagaagcgccgggacatctgcgtcagcgtcatcaccagctactctcctaccatcctttgcacccaacaaggcttaagatggcaactggactacctacaacagtgcttgccaggttatgaacagtttggaatctcaagaaaaggctcacaggacaacactgatgaatactgcacaatattctatgaaaaggaaaaggtggagcttactgaaggtggcactttttggttgtcggaatcaccatctgttccaggaagcatttcatggggagcaaatgcaccctgcattgcaacatgggcaacgtttcaactcaaaagattagaaccacctggattcagttttcagatcgtaaatacaaatcttgatgaagttagccctcgtgctcgacgaagaagtgctttgcttacatggcaacatatagcatcgctggcccccaatttgcctgttatctattgtggaggcttcaatacacagaaggaatctatgactgggcggtttttgcttggcagatccagagaacatggtgttgttggtgatatgagagatgcttggccaaatgctcgagtgcgaaaaaatgtgtcaataatacacacatatcatggatttaaagagtagacagttcagggaataaatcactgtaagcaactccccatcacacatgaagtggtcacacggaggactctttcgtggagtggagaagctctgtagtggacgtttggtgaagaagctctgtaatgggcacatcg

SEQ ID NO: 36526 - DNA, 1829 bp, Zea Mays
agggcaggcagaatattacgcacgcgtgttggagtatttttaaaggatctcacgttacatgtggaataacatcaacaaagttgggggggaaatgtcgagaggcaatttttttttggcacagagaaaaaagaagttgcaataggcggagcggagagaagctttagataccttttcggccacccatcatatactctgtctgctgttcttccctataaattcgtcgacctctccatatcacagagagatagagagagagagagatagacaggagagagagagagaggggaagagagagagagagagagagagagatagatgtggtaactcaagaactgttcttatgcatgcagcagccataagcattgctactaggtgccgattcccctcttctttgttttttattcccctcttgctcttctttgatgatgattggctgggaactacatcttggaattccttttttttctctctctcactcgatttctttgtttgattattggccatggtgggtgattcctcgcctgttttatctcgaaactggattagctgcgagtttttttttcttctttcaacccgctgcgttattctaagctcggtctactcgttgcatcaggccaacaatggcaagtggcttccatgaacatggctgtccatgaaaaatcccccgtatgcatgctcggtctaatctcctcaagctagcgaaacgaaatttcctaaaagccggtctggtcctcgaatacagcttgttgcctgagccgctgggagtcctatggagtagtagagttcttcaccttcttctgcgcgcgattactgttagccggcttgaggagaagctggaacgatcttgacgtgcattcagagaatcgatttttccccgtctcccaaggactcctcgtccattacgtctcctgcacgtgctgtgtcgtttccagggtttcatgcggggcgaagcagctggtctctgccgcctgaacgccgccggaatctgcgaggcctccccgagctgcgtgcgtcgtcggataaggcagccggcacggcaatgccggttccgcttgctccgtacccagctcctccggcgccattcacgccgcccaatggggcccagagccagctcgtctgcaccgggtgccggaacctcctcatgtacccagctggtgcgacgtcggtctgctgcgccgtctgcagcaccgtcaccgccgtgccggctccaggaactgagatggcgcagctagtgtgcggaggatgccacaccctcctcatgtacatacgcggcgcgacgagcgtgcagtgttcttgctgccacactgtgaacctggctatggaagcaaatcaagtcgcgcatgtgaactgcgggaactgccgcatgctgctcatgtaccagtacggggctcggtccgtgaagtgcgcggtctgcagttttgtgacatcggttggaacctcacctggtgcagagcagaagcccagcagctgagctgatagtgtccctgaaagtgctgtgagaccacctatgaaaaggatgctttgagtgcacatgtatagagttcttccctgaagcgattctttcactttcttttcttttgttttcttttgttttcttttcttttttggttcctcctcaccatctccaccccacccgtccacttctgcgttccttcgatggatctcgcgagcccgcggaataaatgagagttttggatatatagctagggcttaacctcgtcgacttgtctgtaaaatcgaatgagacatatatataaacctatgttgttttccttgtttctgaatttctggatgcttctctggctgctctttgatctgaacaatttgta

SEQ ID NO: 36527 - DNA, 1759 bp, Zea Mays
cttcaaccggaatgtctgtttgccacacacaaagctctagcggcgtacacacatgtattgagtttgaagtaccgaatctaccttagaaagctcggtgatggcacactgaggagttctagtccatttgctgatgaaactgaagcatttcggagaaacatgaatgtcccatccttcattagctcttcgagctcaagcaaccattttgcaaagatgaattcctcatcactaattggaacggagacattgctacccacagagtcagtttatatcatgagcccccagaaaaacttgggcatttctcggtcaaacatggaaccagttagccatggtgttaacttacccaaagatgttattcctatgccagtgcaggatattagcagattcatttcttctggcaagtcctatgcacctgtatggagtgatgggctgctaggtagaagccagtgcttcccttctggtccttctggcagctcctttgcaaatatttcaaatagtgtggtgttgaacgcaagcaaacctttctctgttgatatttctgggagatcattagcaaatggctcaaatgacaggccaccattgacctcgaacatgtgcttttcttcgtctcattcttgcagctcctatgcgagcatattgggtggcaagattttgggatcaagcagacgtattcctttcgaagacatagcagatggtgagatgttggctcctggtaatttaccattgcagtctcctcagttggtgaaacagccttcttctgctggcctatttaacgaggttgccagagacgttcaccaatttgcaggacttagcaactcctggaaagttgctgtgccgccaaggttttctgatcttggtcataatgttggaacatctgaaggtcattcgcagggtaacattttcaagatcaaccggttgtcaagacttgcacgctcctctgcacagattccaacgttcagaaatgagtatcagaagaaaaccacaggaatcatggggaaagccgtaccagtggtaggtttcagagagcaggtggcaccattcagctttgaaaacaacacacgctctacagtgacgctgataggcaattctgctttgtctagttcttcaagcaccagacctggccttaacatcaacaattctgccatgctgacccaggtgctgaatggcggtggtgcaaatgacaacctccatggagttagcaccgttaatcagcaagctgttaatgaccaagtgaataacgaattcttcatgggaacaaatgaggcacataatgcggagagtgatgatttggatgatttccttgcgtacttagttaatcaagatttcatcaacaatggtgattctttcattgacagggactgagaatctgccccttgactctggaagagagatgctgctgaccaattcatggttcttgcatgttgtatgaacaaatttgcactgtttgtagtaggctagctaggagcaggccatcttggatggaatccccatgtttctctagtgtagtcatgctggttctcttatgtatcagttgtagcttttaacctgtggtgttcagtttggtgggaggtgtgggtgccacccctgccaaactcagaactatgtgttcctctttggcttgaattttggtggtcacttttagttttatgtaaaacaacctactctctcatagtccttcggatgcatggggatcataaaggattgaggaggattaaatctcttcctattcaaaattaagtaggaaggaatttaatccactcca

SEQ ID NO: 36528 - DNA, 3885 bp, Zea Mays
gtggcttcctcctccccaaattcctctcctcgtgtcctccctcgctaccacgcttgggtgaaatgccctcgccgcctctccctgtgctcgcccaaatcgtcgcctctccctccctgtcgcccctgcgccacggtgcttcacgccgttgaagtcacttcactcatcccgccgatgcagtcgcccacaccgcctcctcccctcctccgctcaagccgcaccgcgacagctacacgccgcgatgtcagctgccagcagcgcccccctcttaacaacgtcgcgacgtcctcgtgggctaaaccccctccatcacttcttcccgtcgagatgcacaacaccgcgagatccatccaccttctccagcacccccacccccgctcaaatggtgtcgcgatgtccgccaccaacagcgccccttcccccctctcaaacaacgtcgcgacgtctgcgagttctagtaccggctgacagcggctgcggcgaagctatctgagcggtagcggagtactaaggggtggagagagggagcactgtctcatgcatgaaataaagtctccaaaacaaaagatttggtccagagcgcggccacacgggcccaacaatagcaacgtcacatggtggttgccattgtcacgtcgagctctccctctccaccaactaacagttcctgacggtggagcagaaattcattaagagcatatagggattcacaagtgattttgagcccaacaatcttgctgccatcgatactcctggttcgtatatttggttactcaaaacatgagatgatcctctgaagtagaaagggaaacaccgaatatgctcttgctgaaatattctatagaaagacacaattccattttggcagatgcaagtgtatggttattctactcatggaagatctacagggaagaaattgaggtagcatataactgccgcaagggaaaatatggtgtagcagatgaggatataatcttatatggtcaatgtgtttgaattggtccaaccattgatatttcttcgcggttgctagacttgagagtcgcagttttgcatagtcctatattctatctgcactaagagtaatatatacagccaagcggacgtttggtttaacatttacaaggtatgtttggtccttttgttttttggaattaatggttgtccgatgcttgtcattcatatgagttctaatatcatgcccccttaaagtactcatcatcaaaagtttccatgtgaatgttttaaatgtagatttaaagggttgaaagacatcaaacagttattcaaacatgatcttaagtgtcgtgaaagactacaagtgaggttcaacttggcaaattgtttttctagtaactaaggagcaacaatgctatgtattttagcttgacttatatatctaagtacttacatttttggaatcgggcaaacagtgatagtttgaatcacatgttttgccaaaaggaattattagaactgttcaaaagttaggaaaaaatacatatttatgctttcttatgcacgggtaaattgctctgttcatatataaaaaaaataattgtagtattattgcttatattgattttaaatgatgaccttattagatgtgccatcgagaccacatatattagcattttgtaactaaatacaatgcatgaatatatatagatagcctttacatcgtgctacatgcttcctagaaataaggaaccattacaacatatatatttttgatgatgtacaacttcgtcatcggatataccgttccttcttttttacatacattttgataagaatgtcaaaatgttaaaaaaatagcgcgcgcatggcgcgcgttagacactagtagatttcagaactatcatgaagcgcgtgctcgctggttgttagttgttacagagcaacagcccagggaggccaagatgctacttagctactaaaaccaactgacaacaagtgcacagcccagtgggccgctaagctgcaagaaaaccctcgcccctcgttctggattgagattctctgcagaggctgcgatgttgggccgtcctgccctgcccggtgggtatatgtaagctcagaccgccaccggaaccttctcgagcccgcggccgcacacctccgcccgaagccgccagtcggactacgaacggcggcggcgcctcggctcccctgatctccctcaccggaatggacggccaggctccgccgcttctcgacgccgtcgtgctcgagccccttgcagttggcgacgagctccatccgcggcgtcctgtcgaggtggaggacgctccggccgccgctccgccctccggtatggacggccaggttccacctctctacaacgtcacgcgggatcctctgaccgtatccgacgagctgcagcccacgggcgaggtggtggatgacgccctactcgtcgcgcccgatatcgtcaagggcgaggtgatggaggacgacatcctacccgtcgcaaccgacatcatcaacgacgccgcctcggagtgccccgaggctggcagtgatggcgtcgtgctcaccgacgagctccgcaatcgcatcgtcaagcaggtggagtactatttcagcgatgagaaccttcctacggacgagttcctgctgaattatgtgaagaagaacaataagggctttgttcctattgagatcatcgcatcatttaggagaatgaagaaactcgttcaagacctctcagtaattgaagctgcactcaggacatcatcaaagctggttgtaagttcaaatgggaaacgggtcaggaggttacatccattgccacacaaagaattgaaagattcaaagaaaagcactgttttggtcgaaaatctacctccagatttctcaatggagagtattcaggaaaaattcgcaacagtgggcaaagttgtgaacataacaattaatgatccagaatcagtgaaagaattttcaactgctaagaagcctgacttcaatttaagttttaaggctcatgtacttgttgaatatgaagcagtggaggctgctgagaaggctgttactgccctaagtgatgagagcaactggagaactgggatgaaagtcaggcttctgtctaaacaaagtgtaatgggaccaggaaagtataaaaaaccttctaaagaaaatcaagatgcagtttccaaaatgattgatcagaatcaacattcaaaagaagaccagcttaaaaccttggaaaagatctccggtgctgatgcagtggggattaccaaggacagagataatttgaaacctgtttttatcactgagactgagcaccaagatcagaagccaaatgctagaggacgaaaaggatggtacaaaggtcaaggtcagatgcagcaaaatgcaaacaaacaaggcagttgtggttccgagtcattaaacaagcctatttctggaccgaggatgccagatggaacaaggggcttcacactgggacgtggtagatctcttccactacagaagtctgagaaggctgaagagtagagctaccaaaaaaggcctgttaagaaccttatccaaagaagctggaagaaagggaatcttggaatggctttctctctgcaagaaatggaacacaaaagggaatctgggaatgacttgtacagaaacacaattgtctgggggtagttccgagttcactcgtatggaacacagtagaacctttgcatgtttcctgacttgcattgtgtcatatactcgtatcatgctgcatgcagcattgcagccctgtttgcaatttcagcagccgggggctggggccgtgagcccgtgaccctgcaccatccgggtctaccacgagcccccctgttctgcgaggcgtttggcccctcatccctatggatctgtactctgtaggctctccttata

SEQ ID NO: 36529 - DNA, 1965 bp, Zea Mays
atttcgggactgttcctcattcacgtgtctcctcccctcccctcccctccccttcccccatgacctgtccgtctcaatctccctcttccccgcaccaaatcgaagctacccctgttcctctgcgatttgggctcgtcctgtgtccttcctgttgctcaaaagctcgctcattcgatgtccctgtctgaaaggcgacaaatcccactggaattcggagcacagagctttgaatccaggggccaaaactttttgctcatctcccttgcggaaaagcgcctcctctgcgtctgaaagtcggatcttttttcacagattcgatttgaagttcccgagcagctcgaggaccgcggtgtcggtaagacttgctttgaagatcttgatcaccacaagagatttgctgaatttccggtcactgtactttttccactggacatgtcctttcgcagcatagtccgtgatgttagggaaagctttggtagcttatcaagacggagccttgaggtcaggatttctggtttgcctggtctgtctggtggtcatcatagagggaaatctgttggatctgtgagtgacctgcgcgacagacctgtagtagttgatcaaagcagccgtctgtggaacatggagagagatatgcaaggatatagtgctgagcccggagttctgcgggaagctcacttttccagtatcacttaaacagccgggaccaagaaatggaataatccagtgtttcataaaaagggacaaatcgacatcaacttattatctttacctatgtcttagccctgttgtcctcagcgaggatgggaagtttctgctagcagctaagaggaatcgccgtacaacatatactgagtacatcatttctgtggatcctaaaagtatatcacgatcaagtgatggctgtgttggaaaaatgaggtcaaattttcttggcactaaattcatcgtgcatgacactcgagcaccacacaatgctgggagccttgtctcctgtgagcgcggcagccgcagaatctcctctaggagggtttcccccaaggtacccactgccagctaccccattgcccgggtgaactatgagctaaacctgcttggcacaagggggcccaggcgtatgaattgcacgatgcattccatcccagcctcaacgctggaccctcaaggcatggtgcctgagcctggccaacccaagcagatcttcgtccctggctcgtcgtccttcgaagattcctttcgcagtgcaaacaacaccccttccagctcaaggttctcggtcgcagaccgctccttggattggagctcctctcgattctcagagacgagcggattggctcagcaggacgacgatgacagtgaccaggctaaggagaggcctttggttctctgcaacaaggagccaaggtggcacgagcagctgcagtgttggtgcctcaacttccatggtcgggtgaccgtggcttctgtgaagaacttccagttgatagctgcaccacaactagattctgaaccgtcacagcaagctcagcagcaaacccagccttcgaattcgtcttcagcatcggatcatgacaaagtgatcctgcagtttggtaaggtcgccaatgacatgttcactatggactaccgatacccactctcggcattccaggccttcgccatctgtttgaccagcttcgacagcaagctggcttgtgaataaattgtacataaagaacaggaatacatgtagattgtatctctgcagtaagtatttacagtgtgtgtgctggtgtagtttattgccgcgttgattcagtcctttgttggctttagtctaagctcaaagctaagaatcggcactaattatgacttatgagctgcagttgtgtatcacttttatgtctgtaacttggtaacacgaattatcggcactaattatcacttttcagccttacacctgtgtaaagctatatattattggct

SEQ ID NO: 36530 - DNA, 2260 bp, Zea Mays
cttcgtaggacgtacgccgaggttctcaagtcgactgctctctctgggaaaatggctaaggaaggcgccgagggggatggctggagagtgatggatcgccgtcgtcaacaggtacgaggtcgttcctcgggtgctggcatctggtcgcttcgcggtcgtgcaaactgggaagcccgtggtcgtggtacctggcgtggccgtggcggtcggttcgtcgcgtctggttcgtcgctgggccttgatgccagggtggctgttgagcgcagtagtggtgttcagtccgaggcagctaaaaaaagggtggccgacgttgcatctggggtatcggacatggggaagaaacgccgtgaagagctttgttgcgaaatttgtgaagacaatcatgtgcctgaggagtgtccggtatttaatggtccaaaaccgcaggcagctctctgtggttttgcgggaggtgaatctggtttttttcaaattcctacctggggagcaaagggggtattaccaaggtcggatggtgtcacggccttcataacagtgaaggaagggaatgttactgccgaactcgttaagtctgaactctctagacttattccagtgaagtggaattggtcggtccagaagcatgcagatggttttatagtgacatttccgtgcagagtggagcttcaacgtatgattgctatgaaatatgttcatacgttgggaggagaaggtatcttagtaattcaagaggttaaccaaaaaatagaaccgatatcttatctgcagaaggcctgggtgaatgtgtacggggttccttttgagatccgctcatttcttcctctgtgggcagttggttctattttgggggcaactcagaaagtggacatgcgctacactcggaaaatgggggtggttcgaattttggttgcagtgacggatgtgaatcatatcccggaatccgcagaaatagtggttggtgaaggattatacgagatattcttcaaagttgacaaggtccttaaagatggtagatggattgacaataataatacgggtactcgagacagagatgataaggaacaaggtgaaaatgatgattttactgagaatcatgagaatgatatttttcagccagaggaagcagtagaagacactgtcatggaggataattccttacatagtgaccctatgaaaccacatgatgaatcttcagatatggggataggggttcagcacaggaaaccgttcattaatgactcagtgacattggagtcagaagttttgacttcggttgagccaacagttttgaatttaatgacctctacttgcgctgatcagcatttacagccagctcctgaggaatatggactggattcggtgatttgtattgccgatcatgcttcagatggcctggaattgtcaacaggaagggttggcgttgatggaaatctcagcagcttgattgatttggctccagactgctcggttcttgctagtggatccatcagtgaagaggggctgtctgtgtccaaagtaagtattccatctctggaagcaacagtgccatttgctgggagagagatcaacttggcttttgatgatattaatattccttctgcggctgacagcttgctcatcgaaaaacataagacacgtgagagtaccattcacctgggacatgttaattattttactgatgtaccccgttctgtcctccaggaggcacttaagtctaattctcttactaagagagtaaagactgaaaaacttaatcaagggggtgtcatgttaagtgccaggaggactaacacagatgaagatatattgtccaaagctcagcgtctggcagcaaagcgtaatttagaaatcaatcattgctggagatcctgaaaccgtctccgagacctggatgagcaacgtctacagctacggaatggtgctctgggagatgatcaccggagaggaggcctactccacctactcgccagtgcaagcagctgtcgggatcgctgcctgcgggctgaggccggagatccccagagactgtcctcctttcctgaggtcactaatgaacaggtgctgggacagttcccctttgaagcgccctcagttctctgagatcacatccatcctacagaggcagaatgttagatagttcttttttgcccccctccctctcttccttttccttctatatcatatgctatatatcagtttggcttgggtgtctgcctaatcatgcaggaaactgcatctgagaaagtataatatatatgcg

SEQ ID NO: 36531 - DNA, 1362 bp, Zea Mays
gttctctcgttcctctcctttcctaccgcacccgtctcctggcgcacctcgcccttgccccaccccggatctcagcctccagtcctcgctgctgctgctccagcgccacgaattgctcgcctcgtctccctctcccttcgaccccgcctcgtcgtggtcgtggtgaccaaggaacccaagctcggtggtggcggatcgggggccggcgacggcgacgacccgagggaagaagtctcagtcgccaccccttcctcgcagctcacgccgctgcacctggccgcgagcccgcgacactagcggaggacaagcgcgacatcctacggtaggccatcacaggggcgttgggggacgacggagtggctcgggacttgttcgagcacgcgttgagcaacgcgccggagaagcttccattgcagtcctcgccgtcaaaatccgtccgggtgtccacgacactggtcgaggtcctgcgccgcgcgcagtccacgcagaaaaagcgcacgaacgctgctcgatctgctccaggactcacagatctccgtggagtagctccacatccccactcgctagataagatcttccctcgcttgtttcttccgctgctggtccgctgtttgctcactgttctgatgttttttcaggtccacatgccgaaagcaatggcgacgctgaggagatagctgctcgtgaagcctgcccgagcctcctcgtgccagatctggccaaacttgaatcagttgtttactgatttctcccgagcatatgtgtgctgctggcaacttaccacatgggtgtttcgtatctgcctccaaactacccaacctaatgcagatgataaatatgtagctattgataaatatatggttctcattacttgtattatttgtcaagtgttcctagaaaactctcagagttgaagaggccaaagagttctacccactctttgggctaggtgccaatgtggcactcatcttttctggacacacattgaagtatttctcaaatatgaggaagattaggtcctagagtggatggttggccaaattcgttgaaggacatgacgagcatattggttgtaccgggtcttgtcatcactggtgtctattggggagtgaacagatttgttattgatacctcatcaatgtagcggaaaaagaaggtcaaaccaaagctcatcatgggtgagagcttgaaggttctattgtcatcttggtatgtgagggattttgcaacattggtcgttgattatggaataagcattaaccttatcgaggtggatcctttgattctattgaaaatgcaatgctcaacatttttattgttgttaacttttctaattaaacagaatgcagagtttttaacaac

SEQ ID NO: 36532 - DNA, 1166 bp, Zea Mays
cggcctgcgtgcactgcatccggcgcggcccggtccaccgcggcgggaggagtagagtaggcctctgccgacgagggtgcgctgcttgctgggagcctgggagtgtgcaggagatggccttcgccgtcacgctcacgccgcttcgggcaactgctgtccttgccggatggaggcggcgcccaggggtgactcctccgcggttcgccgtagtcctggcgacgtctaccggagtcggcggcgaacggaccccgccgacgttcaggcgcctaagggaggagctcctccagctccacgccgaagccgacctcacccaatccaaagcaaatagcgagagggtaagacttgtgcggttgactgaggcggctgagaatcttaagaagcgagctgcaaccagtgtccgaatgggcaaagagagcgaggctgtggatttacttgtgcagaagaagaaattgaccaaagccctagagaacattaaagagcgcattgaggtgcttgacatgctttcggcaaagattagtgaggtaatttcgatgaagcaaaacatgttaattgagtatgccttgcgtccagagacatctaatggtgaagactctgatgacaagataagggttttctccagtacagtcaatgttggaaccaatggagctgggagtagcgattcacacccaaaatcagttgaaaaggaatcttttgagttgagaaatgaggcacatgcaattgcaagcatggctgacgacgctgagcaaagtgcacttcagatgtctgatagcttctcatttttgaacaatagtgacccagcaaactacataaagaatcattcagcatacgatgaccttatagagcatattaatttgcagatgaaatcattggaatatgaaattgaacagttcatcaattcccaatcagttgaagaggtgggcagtgagaagcagagaagtgacaagtggcaaaggttatctgacatacagatgcttataaaggaaactagagaaaagattgcgaggattttgggtatgatagtagaagagactgaatctgggacttaagatgatagcaaactacaaaacagtgaattagtgtcatccatccaccatctttttcgtgggtctccaacaagtggctcgttgtccattttcttcttgaggatccattttgtagtccgccgg

SEQ ID NO: 36533 - DNA, 4867 bp, Zea Mays
gaaaaagagagggggaagagttaaagctaagcgaggagaaaggctgcagtaagcagaggaagaggcgtcccaatcccacggtgcctcgacctcgacctcgaccgcctcccgggctcccacgcccacccatccccaccaccggctccttgctgctgcgctccaccctccgccgcggagccctaggcggagctgcggatcccgagatccccggcgtcgccgccccggagctcgccgccggcggcgggcgcggcccccctcatgcctttggcgccccgatcggagccgacgaccggtggccgcctgaggaggcacagcagctcggcgggcgccggccgagaggcggcggcagcgggggcggaggaggagcaggaggagggggagggcgaggaggatggcgctcttccgcaagttcttcctcaagaagaccccggatcggctgctcgagatctccgaccgcgtctacgtgttcgactgctgcttctcgactgattccatgggtgaggatgagtaccgggattacttgagcggcattgttgcgcagttgcaggaattttttccggacgcatcatttatggtatccaatttttggtctggggacaaaagaagccgaatttcagacatattatctgagtatgacatgacagtaatggactacccacaacagtatgaagggtgtccattgcttcagcttgagatgatccaccatttcttgaaatcatgtgaaaattggctatcggtggaaggtcagcataatatgcttttgatgcattgtgagagagggggttggccagttcttgcattcatgttggctggactgcttttgtatcgcaaaacatacactggtgagcagaagacactagaaatggtctataagcaggctcgaagggactttatacaacagttttttcccttgaatcctcagccttcacatttgagatatttgcactatataacaagacaaggaggtggttcagaatggcctcctattagcagacccctcatcttggattcagtagttctccatgttgttccacggtttgacgtagatggtggttgtaggccatatttgcgtgtgcatgggcaagactcaagccccggtaacaagagtgcaaaagtcctttatgagatgccaaaaacaagcaagcatcttccacattatggacaggcagaagtccctataaaactaagtgtgttttgccgtgtttatggagatgtggtccttgaattcatccatattggcgataatatagagcataaggaaacaatgttccgcatcatgttcaacactgcattcgttcaatcaaacatccttgcgctgaatcgtgatgatattgatgttgcttggaatgtgaataatcagttcccaagggacttccgggctgaggtacatttttcggaccctgattcattcaaacctgctgctaccgtcgaggagatagctgatgatggagatgagactgatgttgcttcggtagacacaggagaggagttttatgaagcagaggaggattggcatgatgctagaaaagaccaagaaactcgatcaactgatggtggaatatcattagatgacgttgcagatggtggggtggcaactgaagaaaggagcagcctagaaaagcaccaattcaatgagggtgtgaagattggtgtctcccagaatttaggtagcatgaatgagaaaggggcaagtgcacctaccccaacttttgacaaccaggaaggtttgcagcagcctcgtgaagttcttgcaaatggtaaactaagcagcactaatggccaagagaacagtgatgtgcatgatatacaggtggttgctacatctgttgattcagagggacacaagtttggatctacctgtcaggaggacatgaaaggtgtaattgcacaaactttagtcaccacagttgatccaagttgcagtgatgaaattgaatgccaggctaatgaacaaacaaaaatatcggaataccctgatttggactacactgcttttggttctcctagaagtttgtcacgtacaaatggtgatacccacttgagaactacaaaaaatgaagggttgcagaacggtgatatcaagattatcactgagaacacaataagtatggacaacgatctagtgatctatgaagagaaaactatagttgtcaatggtaacactgtacaggaagtaaagaatattgtcaatgaaaagagcattgcagccaagatagacaaaccaattattgagagtaggaactcactgaacaacaacaatggcaagattcaaatcgctaaaccttctgatacatctaatggcaaattggatgggtgtagattagaatcttgccttgaggaagccctacctacaaagaaaaccactgtccatgacaggattgttgtcttaccagccactgatgtaggaactgagataaaaaccaagcaagaggggcttggtgacaagcaggattttggtatagttcttcctcaaagtcgaacagtagccagggctaggagtccaaggcttgaaagtgatgaccgagggcaaatccctgataaagctgtgtcatcagtattgaagaagatggcagtaggcaatgcaaagatggaagagcaaccaaagcttgccaaaccaaaaacaatacgtagatggatctcaccaaagaaggaatctgatgctacctctgtgcataggccatctcaccctccatctagatacgacagttcaccagctgcactggctattcgatccatgcctacagatgttaagatcagtgcagtaaatgatgcacctttattatcattgaaacaaccatatggctgcaactttacacgagaagtaacatctgcactgtctgcttcatcgcctccacaacaatccttgttaccaggtgcacaaattgcatcaagaaaccagtgtttcagagtttgatatatcagaacttgagagcctttttcctgcagctgttccgaagtccgatgacagctcaaaatctgaacgtagaaaatcacttggatcaaaaccagaaaaagtgcacctaattgagttgaggagggcgaataacacagagatcatgctaacaaaagttaagatgccactctcggatttggtgagtgcagctctggcgcttgatcaatctaccttggatgttgatcaagtggagaatctcataaagttctgtcctacaaaagaagaaatggaacttctcaagaattacaccggagacaaacaaaatcttgggaaatgtgaacagttcttcttagaattgatgaaagtgcctagaatggagtcaaaactgcgagtattctccttcaagatccagtttggttcacaagttgctgatcttagaagaagcttgaatatcatcgactcttcatgtaatgagatccgaacttctctcaagttgaaagaaataatgaagaaaatccttctccttgggaataccctgaaccagggaactgctagaggtgctgcagttggcttccggttggacagtcttctaaaacttacagatacccgggcaacaaataataagatgacactaatgcactacctctgcaaggtacttgctgcaagatctccacagcttttaaacttctatgtggatcttgttagcttagatgctgcatcaaagatacaactaaaaatgttggctgaggaaatgcaagcagttagtaaagggctggaaaaagttcaccttgagtatgatgcttcagaaagggatggtccagtatctgaaatttttcgtgagaaactgaaagagttcaccgacaatgctggagctgatgtgcagtcgttatcttcattgttttctgaagtgggtaaaaaggctgatgcgttgattaagtattttggtgaggatcctgttcgctgcccctttgaacaagtaatctctaccctcttaacatttgtaacaacatttcgaaaagcacatgaggagaacctgaagcaagctgagcttgagaagaaaaaagctgaaaaagaggcagaagcagagaaggccaagaacgcacaattaactggcaaaaatgactctaaaccatcaaatccaagacggcaagctaaacaaaccttagagaggacaaggtctgcaagcagacgaggaagagatgttgggtgataacccgaatggtcagtaattttctgtgcttctgatctgctcgcgaggctaatggacgaccgctgggcaagagaagtttcatggacggacgctggcatccgtcgggtgcagcgcgatcgcatcaaagaaaactctacaggccacccttcaacggtctcactggagaatgccgacgtctgtttttatccatgtcggccatcagggtccagtgctaacttctgactgctgtaaagaattgctaacactgacgctaactccattctttcttttcttttttcatgttacttttccattctttctaacaacggtggccaagtacagccatggcttcgaaaaactaccgcctggtgcttaggtggaaaattgtaaaaaataggcatctgggtgaaaaaaaggtatggagataatctaggtggcaaagagtatcaggagtaaatatgtgatgcaaactcagccagtagtttagctgtaaagttttgtagtgagtgtgtattgccgccactttgtattctatgatcatgaagcagtgaaggcggcgttttctttacgatacgtagtcagatagccttgtcggctacgtgtcgcctgtgtacgtgtgatatatgtgctgtcaattgctgttatgattcaaccttgataaaattaggcatgattcaaatgcatcttttgttagcgtcctaaattgattttagttgaaaataaatagaaatagagtctgtaaaaatgagagtccattgtcacctcaatggctctgtagaaggact

SEQ ID NO: 36534 - DNA, 1968 bp, Zea Mays
cggatggacgggcatcccctcccgacctgggctccagcaactaactagggcagagcgagcacgaggagatccacgtctcctcgggcggcgttctggcttacaccgacgacgatgactgcgagagcaggcgccccttgctgctcaggactcccgcctccgccgagtgctactccgtctccgccgccgtcttcccgtttctctttccagctttgggaggccttctgtatggctatgacattggggcaacatccggtgcaaccatatcgctcaagtcgtcgacattcagtggtactacttggtacaatttgtcatctgtgcaaacgggtcttgtggtcagtggctcactgtatggtgctttgatcggctccgtcttggcatatacaattgcagattttttaggacgacgtaaagagcttatccttgcttctatctcatattttattggagcctttctgacagcagtagcacccaatttcactatcatggtggttggccgctttttatatggcataggaattggattggctatgcatgctgctccaatgtatattgcagagactgcaccgagccagataagaggcatgctcatttctctaaaggagttctttattgttcttgggatgcttcttggttatatagcaggaaatctctatgttgaagtggtttctggttggcgttacatgtatgcctccagtacaccattatgtctcataatgggagttggaatgtgctggttaccctcatcacctaggtggctcctgttatgtgccatacaagggaaggggaatctgccagagacaaaagaaaatgcaacccggtgcttatgtcggttgcggggtcaagcttcacctgatttggtctcagagcagattgacttgattctagaggaactttcatatattgatcaagagaagcaagctagcttcggtgagatctttcaaggaaaatgtcttaaagcaatgataattggatgtggtttggtgttctttcagcaggtcactggtcaacctagcgttctatactatgctgctacaatttttcagagtgctggattctctggggcatctgatgccactcgtgtgtcaattcttcttggcttactgaagctaatcatgaccggagtagcagtccttgtggtcgacagacttggcaggagaccattgcttattggaggtgtcagtggaattactgttgccttatttttgctgtcctcctactacactttactgaaagatgcctcctatgtggctgtaatagcgcttctactatatgttggttgttatcagctctcatttggtcctattggctggcttatgatctcagaggttttcccgctgaggctgcgagggcgtggactgggcgttgctgttcttgtcaattttgcgtccaacgctctggtcacctttgctttctctccactggaggatttgattggaacgggagcgctcttctctggattcggggtgattgcagtggcatctcttgcattcatattctggatcgtccctgagacaaaaggactcaccctggaagagattgaagcgagtttgtagttgactgatccagacgtcacgttcttccgtcctagtttcactgaactgaagggacttctggtatccttctgtagtttgctgccgtagttagccttctataaacgttctacaagctgttgtagcaataatacttctttccttccgggtataaaccgagatggtcggttgctgcaaagtgtgttctttaccgcagttcatccgattagtcacaattaattttcctgatcgccccctgcacttaactaggcaccatgactcaatcagagcgacgttgattattcaactagtactcgatattttcaaaatggttgctaatggaaagaaaagaaagaaaatgatcttctctctagatcatgatcaagaaaagattaccaggagattcttaaacaatacatcaaatgtctttgtattttgt

SEQ ID NO: 36535 - DNA, 5652 bp, Zea Mays
tctcctccgaggaagacacataccacaccaccgatgtccgatgcgacgagggagcacataataaaaaaacaataagacaataaaattaaataaaattataaacagagaaaaggacaacgtgaaataccctaggccgtgatcttggcggctgcggcgcgtcggcgatcggcgggggtcgccccgcggccgacgacgtcatgctggggcggcgcggggagatggggtacgaggaaggggagctcgagctggaggagggcgaggcggcctccggcggcggccgtgagctggttattcccgacgcgctcacctgcatcgatgaaagaatccaaaatgtgttgggtcatttacgcaagaaatttgaaggtgaaataactcatatgaatttgggttcgatgtatggatgccatggttcgttcttgccaacatacccacgttcccctttgggctttcctcaatataggaacactgcagatccaaaaaaccatggcagtgcctcgagatccctgcatgtattaacagagaatgcgcaaaagaaccattttgttaagacggaattagacagcagcaggaaaaatgaatactgtcgaatatccaatgagagtgatggcaatcaacagatgttaaacagagcagtcattgggtctgagcagaaagcacgaaaaatacgtatcaagttgaacagcaataaaagtttgccaagaaatactgctgctatatatagtggcctgggcctagatatttccccttcatcatctgcagaagacaacctagatgagactgctggggctctggtgcctgaagttttgcctgatgaatctccacgtgccatacttgagataatgaccagccattatattcctggaggacacttgctctcacccctcaaggaaaatgttctagaattgaaacaaaagcctaaagtgatggtaaaacaagaagcacctgaatttcaagtcaaagtagaattgcatggagactggggctgtacaacctctgctactctggataacaaagataagtgtaccaaggaaatcaagtctgatgaaaagaaagacaagatccccattttcaggagttcaaaaatcagagttaacaaaccatctgctgtgaataagggaactaagcctttacaggatgttttagatgataccggttcaaacttgttgcctacaattgtaaatacagaacatacagttgaggagccagcgaaatttacaggtgcaatttcagataaaatgaagggatcgaaggatggtgcatcaaaaggacacattagtggcaagaacaaaaacattaaggaggaaccttcgcttgatcatggattttctcgtaaaaacagatgtgattctgatgagtacaatggtaaacctcatgccagttcatgtcagttgcaaaacattcccaacaaaacttcgccactggagagggacaaagggaaagtattgcatatggaagatgaaccatctcagtacaaaagcaaggaaaatggagacctgtttagtgcagattccatggctgtcatggtaggaaatgttgatagaaattctttagggatgatgaaagggaagaagaaagtttcttctttgcaagccaccctgtctgggaagttcaagttcaaggcaaaaaaacaattgaatgacaacattgatagaaaaaaatatggtgaagacgagcattatgctttagaccatagaattggtttggataattcatatcaaatagataagagtgtgaggcttgagaaaaagaccatctcatctggggagattgataacaagtcagatgttggaaatgatggtggtgtcaatatctctgccatgtttgatgagaaatcagatgttttgccattagcatctgcatccctgcctgctccagaacccattttaataaatgaacaatgggtgtgctgcgacaagtgtgagaattggcgccttttaccctatgggatgaatccagatatacttcccaaaaaatggcggtgtagcatgcagagttggctgcctggaatgaatagctgcaaaataactgaagacgagaccacaaaagcccttcgggcactttatatggttcctgcacctgaaaataacattaaggatggtggtcatgataatgctatgtcaggcaaaggtacagctattgctccaacttttcagggaaatacacagtccatcagttcactggggaagctaaaaggttcccttgatggagccaatgtggcaaatactttggagtcagctggtatgtcaaagccctcaaagaatctgcatgctccttcaagtagaaacttctctaaactgaaggaaaaaaggaagctggtggaatcatcagataaaggagaaattgttggaaaagaccaatcacgtcgaatgagaagcagtgtaggggttgatcatgataacctgcgagcatcaaagaaaatgaagaaagaatccaatggccctgtgatgaagcatcaaccctctgagtttgaaataagcaaaagtagtcctgccagtgagactctgaaaaacattcagaagcgcagttgcatttctcctggcatgggaaagtatggtttatcttcatcaggtaaacattctcatggtgaggataaagatttctcagctgtggtcattaaaacatcagatacagagaactctggccctcgagactcatccattaagaagagaaaactgaaacaaaggcagtcaagccagcattttcgggatccacactgtagcaacaatgacacaaatggtattacaaaacaaaatattactgaaattaatgctgtgaagaaaaaatccaggtcagaattgaatttgttaaagacagataggatagctactgattctagaggcacagttggtggagttgatgataggatatctactgataaggagtgtttaagtgagcaacttcaagaaaatacccatttccagcatccgtcactcgtagaaggcaccacaaagagggaaatccgtcatgcacaaacacctatagctgcgacttcgagttcatccaagatgtctaactccaacaagtatatagctcattttcaggaaacgagggcctctcctgtagagtcagtttcttcctcacccttgagatcttctgataagaatcctttgggtcgacatagaagctcttcatggacaattacagaaaatgtgcattctcaagagtcagggaagataaattcttcatgctcgaacagaaactatgatcttgggtctgattgtgataaagctaaggctcgtatttctggttgctttaacggagatgtgagtcatcatgttcagaaggatagggactttctgaaagataaacaagatgtgatgaacgcatgtcttataaacaaaggttctggatttggtgctagaaatttccagctgagtcctgaacataaagtcaatccagatgtcctttcatcacatgacaacgatggtcacaagcaaccaacagttcgtcagaatgggaaaacacagccccatttcggttcaaaccaaggtgaccatgcaaatttgacttatgggcatattaagcctggtaaagggaatataccaaataaggaccagaaaacaaatccatctgcagtcaaagcaagcaagcagcagccatccttaaacaatgcatcaaatggtgatgcctcttacaaggcaaggcaaatagaaaaggctgttattgaaaatttggacacgaggaagcacatcactctcaatggtgatgcttcaaatctaacaagtgcatctgttctactgaaggaagctcgagatttgaagcacttgtctaaacgtcttaaggaaaaaggggatgactttgagagtacaagcatgtgctttgaggcgggtctgaaatttctccatgttgcttctctgtgggagaccccaaacattgatagctccaatcaaggggtttctatacaagctatgaaactgtattccgaaacaggaatcctctttggattctgcgctcacgaatttgagcgactcaagaaaatggcgaatgctgctctggcatataaatgtgtggaagtggcatatatgaaggctgctttctttagaagtcctggtgtaattaaagatagacatgcattgcatgcagcatctttgatggttgctccagctgagtctccatcatcttccgcttcagacatcgataatttaaataaccagagcacagttgctaaggctgtttctgcaagaggtgtatactctcctcagattgctagcaattccatatctcggaacaatcatcatttgatgggattgctttcttatgcagaggacacaaataattcatttgagggaaccagaaaatcacaaacttcattttcagcttatctttctggcattgggaagaatcaggtggatgaagttgctcttgtaaggaaagtacttgatttcagttttcataatgtcaagggattgctgcaactgattcgtcattcgttggagtctatcaaccatgaaagtggtaaatgatctaccaagtataggtatcttggaaaagagattaatgatgggaaggttgctttggcaactgtgctatacattggtacctcctccaatctggatgtagaagtaaacaagtttagagagtaatcagttgtgaatggaaagggttcacattgccttctcttggttgcatggaagtattatatgtgggtgatacaaatttcaccagcggcaaactgctaaaacgggtttctttaccaagtcatattgctacttttgttgcccggaatatttcttgtagatgatgactttgactagtgccgaactggcaaagggggttcttaccaagaattagcctgcaaatgttaattgctaagtccaacattcttggtttcagtgtctagtgaatgatcaaatccaagtcttcgagggcagagtctcagttttctttccagggcgccagtgtaagcttaggtcagcacttttgtcctaaagtctccccaccttctattggccttgcggagaaggttctgacagttttggaggtgcttcaggatttagcagtctaatattttacaaatttgcggaggttcagtgaggattgtctgactccaatgataggtgtgtatataggccaactttttagttaattcctgccctttttctcgatacatgtgtgtatattatacgagaaaaggaagaaaacaattttgtcataattttagctaatggttgtaattattgttcagatgttgcaaaattcattctttggtggcctggaaaaaactagtctagccctaaaacttcatcattgtttaggcaccttataactataaatattcttagcgtttgattcattttttccttttggggctgacctaacaacaaatgttagatgatgacactatctgctgcctatctgagtgttgtttgggttcctgactgagcattaccattgtaacgagaaagcgatgtaaaagcccttgctgctgtgctgacgaaagaggattcctttccaatgttacacgatgagtccggttgatttgtgtaacatgttctcgtctccgtccagactgaaaaggcagtggctcgttgagctgtacggcatgaagccttctttccgattttaatactagttctgggtgtactgctccaaagagtagcatctctttgcagtaaaaatggtttgttctgttcaagtatgtgagagaacaag

SEQ ID NO: 36536 - DNA, 1116 bp, Zea Mays
aaccattttgtatgaccgtataccaccccgcacccacccgaggtgattgggattgtgaagaagagaggagagaaggtgaagtggactgcacagcacacacaactcgtcctcggtcctccgtacccttccgcgctccgccccagcacgaaacgccgaaaccctaccctttggcttctccgtcctcgtcctcgcccccgcccatccgcgcaccagccgaatgtcgtcgggaggcggtggggggcagcagttccgctacacgcagacgccgtccaaggtgctgcacctgcggaaccttccgtgggagtgcgcggaagaggagctcgtcgagctctgcaagcctttcggccgcatcgtcaacaccaagagcggcgtcggcgccaaccacaaccaggcctttgtcgagttcactgacgttaatcaggcaatctcgatggtttcttatttcgcatcatcttcagaaccagcacaaatacgaggcaagactgtttatattcagtattcaaataggcaagaaataattaacaacaagagtcctggagagactgctggaaatgtcttgcttgttaccatagagggtgttcaatctagtgatgtcaccattgatgtgatccatatgcaggcccatgataactggagaaaatatcattatcagcacctgcaattggagagataccatgtttgttttgctgccttctaactagtacattccaagttcttatgaactctcatgtttcatctggaggatgcaactttctaagtatcctccatcaacgcgcttatctccggtgtaggacacctcctgtttatccaagttactgatgaaaggttttctcggcttttgggtatgttcataaaatagccacctttgaaaaggctgcaggttttcaggcattgatccagtacactgatgcggctactgcttcagctgctaaagaatccttagatggaaggagcatcccaagttacttgcttccggagcatgtaacatcctgctgcctgcgaatttctttttctgcacataaggatttgaacatcaagtttcagtcgaaaccgcagcagttttcagatcgtctgatcgatcccactgggcgatcaggtgtcgatcagggcgattag

SEQ ID NO: 36537 - DNA, 1817 bp, Zea Mays
gacggcttcttctgttctcagtttctcactctcgctacccattttttcccaaacgctagtggcggcgggcggcggtcaccggggagtagtcgagtaggccaaccggaggcgcactctggcgtgtgtcgtaccgagggcgccaggagcctaccagtgcaggctacagcagcgcagcgccggagcggccggtcgctggccggctatcgggaccgcggccgcggccgcgtttggcccgtgctgatgcactgagaggagggtggaggccgcagggtggccgtccggcagcgtcgcgctgcacgtcaactgctctgaacctgtgtgacacaggaagccgctcggggctaggtgccaccatctgctctctaccaattggaggggcagccgtaagttcaaattcttctttcattgaggtcatcatggcttgggagctcattgaggtcccgggcaacctgaatatctctctccaagactctacagttgatgtggtggccgccaagattgatcccaagctagctaatactctcattaggcagttaagccaggtgtgtccattggaaaatctgaggcatgtaaagcgtgtacgtcgaggaaaatctgagttatcaataatcctatgtgtttctactgggtctgaaacttgtggcatacagttttctgaagatctaaaaaagatagtggatacttatcagctgagtcctttcactgcaaaagttgccaggtgttgtgctacatcaaaagaggagtgggagaaacagtgcaaactttggccaacatcttaccatcctgcacatgaccttgatattgtacgaggatttcaagaggaggaattaccatcaatatttaattgcatgaagactactattcaattatcaaagacgggcaatgctgcaatcattgttgacccatcaagcatgcaaatagtcgcaaaggccacggaccagacacacaagcatgatacgcctgaagggaacacggtttctgaagcaaatgcagatgttacctgctctttgaatgaatcgatgggtaatggcagcaatttgtcactgccaggatcctttcttcctaaatgcgacagcttgaacatggaaatctcatgtataaatccttggggatggatgaaaaaaaagacttgtgagcggaagccattgccctgtgatggctgttttgcatggcatcctctgagacatgctcccatggttgccattgaaaatgctgctgagagggatagaacgatgttcccttctttggcttcaataaccaagacagattcaaatggcaatctagagaagtattgtgataatgaacaagcaaaaaggctaaagacagatacaaaagataatgagccgtcggcatctgaatcattctgtggtgacttgtctgaaaccagcagaccatatctctgcacaggatttgatatctaccttgtttgggaaccatgcacaatgtgtgcaatggcacttgtacaccatagattcaagcgcgtgttctatgctttccccaatcctgtcaccggagcgctcggtggagtctacatgttgcatggggagagaagtctaaatcatcactacaatgtatttagggtttcagtacctgaggcatactcgaatggtttgaattagttgttcgaaggaatgctgacccaacatcctgttccattttgtttagaaaaaaaggatccatgagctcttgattttcactatgggtgccattttgttgcacaagagcttcagattaggcttaaacttgtccttttgtattattaaaattttacctatgttgtatcactaaaatagtctcttcattctctttaatatagg

SEQ ID NO: 36538 - DNA, 1888 bp, Zea Mays
agcagcccctccaaaaaatctcaaacaactcttcagcacgggaaaacccgtacacaccacagcaccgtcgccaatgtccgccgccgcagccgactggcttccgtcagcgtccgtgacggcatccggccgcccggtgctttccgcgggcgaggtggagcggaatctcctcccgctcgtcgacctcgagcccgaggaaaatccgcgccttgctcccctccgcgcctgcctcctcgcgctgacttcccaccgcctcatcttcctccacgagccctcccgctccgcgcgcggcctgccgctcgccaccgtcgtccatgcgtaccctccccaccgcagatctccatgccacccgtgcgatcagaggtcatcgccatcgtcgtgacctgcaaggctgacgttgatgtgttcttcgggaggctgctcgaggcgatccgtgcaagggcttgggaggtgacccctgcagctgctccgtcgagtggcacgtcggtggcagagggggccgcgcctacggaggacatcgcgatacggatgccggttgttggggtctcggggatactgcggatggagcaggagtcatgggagaacgccgggcagaacttgcaagatgcgttccaggatctcaatgccctcatgagcaaagctaaggaaatgatgcagttagcagaaaaaatgaggctcaagctattaatgaactcatccactgaatcaaattccaatgatgaagagatgggttctaagcaagacatgcaggatttgctgttgagtgttggcattgtgtctcctgtgacgaaagaaactgctggtgcgttgtatcatcagcagttgtcactacagctggcggactttgtaagaataccacttgagaaagcaggtggtatgatggcactagtcgatgtttattgtctcttcaaccgtgctaggggaacagagttgatctcaccagaggaccttttgcaagcttgttccctgtgggagaaagttgatgtcccagtcatgctcaggaaatttgatagtggagtgaaggtgatccagaccaaaacacatagtgatgaagaggtatttgcaagaatctcatcacttgcacagaagccagatgctcttcagaaagggattagcccaagtgatgctgcattcacactgggaattgctccagctttagcaaaggagcatcttctaaatgcagaaaacaaaggcctgttgtgcagagatgttagtccagatggattccgcttttttagcaatttatttaatgacattgatccccaaaatattcactcgcaaaaaccccatgggatgtacaaggcgtggatctccgttgcgatggcgtctcactgaaaaagttcgactgggatatattgagatactggttgatcaagctggacatcgatgcaattatagtgtactctttgaaaacgtccgatcaagccagtcattggtgcgatcacaatgtatcctttgaaaacgttagtctgcatatctcgccattatgtaccataacaccaaaagatgtgatatagcaattagcaagcccatttgttctgttgaatgaagagcgtttgagtacgatgtatgaggattcgggctacattggtaaccgtattagcatgcgaccagattaacttttctgtactgactccatccaaaaataatgcaactctggtatagtcctaagctgtactacctcaattttcatcaaaattataagacgagttatgatactaaaaagtactgctagatatatatatttttgataaatataatttaacaatgggtctctgtcctttggagatgctcacaagaataaggataagatgtgtgtgtgtgtgttcataggtgtaaatgtatggacatgtatgagcatctatgttggagtgtgatttcaaaataaaaa

SEQ ID NO: 36539 - DNA, 2582 bp, Zea Mays
ccgtgctcccccgaatttttttcctctccccttccgagttccgacctcgtcgccccgcggctccagctcttcccgttcattccctcgcgccgaagcaactccggaatccgcctgcgcgccaaaaccctagccccagatcccgcgccgcgccgcgccgcccggtgcccagtcggcggcgcccgcgccggccattgccgctcgccgcattgggggcgcttacggcgtctcctccgctcccgaagcagagatctgggccgaggagacctggttgttcgtgggcggtgcaggggatggggcgcgggcggtgggcctcggggatccgcgcggcggcgctggtcctgctcgcggtcgcggctgccgccggagccgccgcgggggatcctgatcccgacgagctcgagcgcgcgtttccaatagtggagccagaccacgggcacacaaaacttcgtctctcagaacaaggtctagaagcaattcgaaggattgaaactcctattgctgttgttggtgtcattggtccatatcgatctggaaaatcttttctcctcaaccagcttctctccttatcttgtgataaaggttttggagttggtcatatgcgagatactaaaactaaaggtatttggatttggggtactcctgttgagatggatgttgatggttccaaagtttctgtcatttatctagacactgaaggatttgaaagtgttgggaaatcaaatgtgtatgatgataggatatttgctttggcaactgtcctaagttcggtgcttatctacaaccttcctgagacggtacgtgaagctgatatatctaggctttcatttgccattgaaattgctgaagaattctatggaaggtttgttcatgggcaagatgttgcttttgagccagcaaagcttctctggcttatccagagggatttcctccaaggaaaatctgttcaacaaatggtcaatgaagcccttcaacgggtgcctaatgataatggtgacaaatatattgatgaggtcaatcaaatacgagattcgttggcagttatggggaacaacagcactgcttttagcttgcctcagccgcatcttcaaagaacaaaattatgtgatatggaggacaaagaacttgaacccttatatgtaaaacggcgggagcaattaaagcagcttgtttcgtctattgtaaaaccaaaaattgtgcagggcagaactctaaatgggaaggactttgtgtctttcttgcagcagattcttgaggctttgaataaaggcgaaattccatcaacagggtctctagttgaaatttttaacaaagccattcttgatcgctgtctgaaggcgtacagggagaaaatggatggcttaggcttaccagtaccggtagacaaactgcagaaacttcatgagatggcaaatggtgatgctagaattctctttgataagcagcactttggcaaacatcatgctgctcagtcagctctcaagcttgaagatgatattaaaaaggctttactcactgcaaccaaagtttcgtaaaggaatgcgttggacctgcaaaagaaagctatgaacgtagaatgtcaaagatgcttgccaagtctcgtgctcttttcatcaaggagtacaataacaagcttttcaattggttggtgaccttctctttggtcatggtggtcatcgggcgctttgtcatcaagttcttcctacttgaaatcgccgcttgggtgatgttcatcttcctagagacgtacacgagaatgttctggtcagcggaatcgctgtactataatccagcttggcacatcattgtttcttcctgggaaaccatcgtgtacagcccaattcttgatctggacagatgggccgtcccaattgtcataatgctattatttggggttctttactggagatgcttcggtggtagaaggaagcggggaaggggttcgctcctcccattgtacaagaattcttataactcgagtcgtcgctcgagatcagactagttatacacgcaatgttgaagttattttcttttaaagaatggtacaaaatatctgcctgtagaagaggctaaactgccgaatgtggatcatctgcaagtgcttttggatgggcatgttttgaattttgatggtgccctgccaatgtatctccaattctttttggtggatgaagagaggcggtgaagctgctagtatgggggcggggcacctgcacaaagcctctgttgtaattcgtaccggggtactttttgtgtagctaggttatccttacatgtcacggtcccaattgattgattattgtttacgtccactgcaattttttttggcaagaattttgttttttaacgtcatagatagaaggtagctgttagagcgtgtaccgtgtcaatcatatgttaaaagttataatctggtggtggaatttggaaacgttccttgtttatactgttgttatacagtttatatccacatatatgctatacttctggctaggagctgtgttgtgtttatgttttgcattaagccagtggcactcagaactagcgagtggcagagcgtgctcttcgatggaaaccgaacttgc

SEQ ID NO: 36540 - DNA, 1574 bp, Zea Mays
gtcgaaacagaatcctgacttcgagtcttgtcttgtgggctgtgcctgtgacggactgacggcacagaggtaatggaggccgcgcctaccaccatcaccgtccaggtcaagttcgccgggcggacgatccccgtggaggtcccggcagcggcttccggcgcggagctgaagcgcctcctccagccgctgaccaatgtcctcccgcgcggccagaggctcatctgcaaaggcaaagtgctccaggatgccgcaagcctgagctcgatgcaagtagtgggcggatccaaggtgatgctcatcgcgtcgcaggggctccatcagggggatggtcctatcacaaataatagcagtagctcagcaacaactgtgagaaggccttcaaatgttaaggagaatcaaacacaaaagccagaggtagttgtcaccaaaagccgatctgagcgctggaagttaacaggtgttgttgcgctgcaagactgtgacttgaaggtggaggggtgggaagagttcgaccagcggcggaggcagaaacatcagaagcagctcgacttccgtgttggctcatctggtgtgttcgatgaaggcgcggatgatgataataggcgaaggtgactgcctgaaaattgtgagcataatactttgctacgatatttctcccaaagaaccgtagaaatgtacaactgaaaactacttctatggagcccgagatgtacaacctttttcattcagtcacgtagatagacacgtcaggaaaacaacatccttggaaagccatggcagataatgaggtaataataacaacgccgcactcatgcgacgcccccattgaccctgataacctgcccgttcacccagcccgaggcctcgctcgccaggaacgccaccacgggcgctatgtctgtcgtctcggctatacccatggagttctttatcctctctaggaacgcctcatccttcccggcaaggaagagctccgtgcgcacagggcccggcgccaccacgttggccgtgatccccttcgccgccacctccttggccaggaccctcgtcatcgcctccacagcggcgttggacgcagcgtacgccgcgtagcccggcggcagcacggcaaccgtcgtggacgagaacgtcatgatgcgcccaccgctgttgggggggatgcgccgggcggcctcccggcacaccaggaacttgccgcgcgtgttcaccgcgaacgtggcgtcgaagtcctcgacggcagtgtcggccagcgcggggtacttggcgtccatgatgcccgcgcaggcgaccactacgtggggcggggacccgaatgcctcctcggcgcggtcgaagagcgcgcgcacggcggccgggtcggagacgtccgcgcgcacggccacggcgcggaggccgcgcgaggcgagctccgcgacgagctcctcggccttggccgggttggtggcgtagttgaccacgacacgcgcgccgagcgcggcgaggtgggacgacacctcgcggccgatgccccgggagccaccggtgacgagcgcgatgcggccttcgagcgccggcgcggtggacactgctgccat

SEQ ID NO: 36541 - DNA, 3054 bp, Zea Mays
cactctcaaacaaacttccttttattttctgtcaaataaaaacaaagcttatataattcaggcacaccaacccgactccgtttgacgcggctccgatggtcacaaccggcgccctcgtcgccggcgccgcagtcaacacctgagacctcgtcctgcctgcctgggaagggcgtgagcttgccgctgccgcgatccgagtacgagcccccgcggatgcattatcagcatgccggtagccgcagccgcatgccgccgttcgcacgcggcggcggcgcctacagccgcggacagaaacagttctacccgccgccacctcctcccctcccggcggccgcgctgcctctgctgccgcagaacaagcatgaggtgctcatggaagccggccgcctcgctgccgagtacctggtggcgaagggcgtgctccctcctggctccttgcagcagcgcggcagcacagtcgtcgctggtgggtggggccagctaccgcctccacctccaccgccgctttcggtgacacaggaagccccagcataccatatcgccaggaatagccggcggcagatcgatgatgagcgtggtattcgtaacgcccgctcacggcggaaccgtggtggcgactacagtagcagcaacggtagtaactataatggaagggggaaaaggaaatttggggctgacaataagtattcagattggacaaaggatagggggaggaacaggcggtattctgatatccggagttatgatgatgaggatgatgatggggctcctcctgggttcaaaagggagcgccaaagcggtggtgggattgacgaggttggtagtagcatgtcgggggtagcttgggaggggccatcatcgaaggtggaggcgatgggggagtcggagctggaggatactgggtcaaaggctagttctaacagcaatatccagcagaaagctagtgctttgcaagaggtggaggatgaaaatgaggcaaacaaaatgcaggagaacagtgtggtgtctaattcagacgtagctgagcaagcattgaatggtgaggataatagcaacaatgattcttctgctggtgttgaagaggcagggacaaaacatttgccagtatcctcaggtgaaaaggtctcagatgggaggcttgaacatagcggtgttctgaatgacaaggttgaagatgacagtactttgcatgagaagtctgaagatgacacaatgtcggaagaggtctctgttatggagagcaatttgcctaatgacgctagaaatttgctaaactattgtagttttgcaagagttccaacaagaccacgaacagtgcttgcaaacaggaatgttggaccaggtcaaagagaaattactgtgtctgaacagctcaatttggttacttctgaagaaatatccaatatggcaatggatggagaagctaacactaattccataactagcatcgaggaaggcagtaaagttgagctggttggccaagaccaagaacatgctgaacaaagcgctatctgcaatcaagtggcagaatcagtggcattccatgaaaaggaaactcgaggtgaaactgaagaaaaggaagaacagaagaacatccctcaacattatgaagttgaggataataaggagacaaacgaactgtgtcctacatttgcttcttctcagaataaccaaagcgctatctgcaatcaagtggcagaatcagtggcatcccatgaaaaggaaacacaaggtgaaactgaagaaatggaagaacagaagaacatccctcaacattatgaagttgaggataataatgagacaaatgaactgtctcctacatttgcttctcagaataacttcaatttgcaagttgagaaaggaatacaaatctacaatttagatacaccgccacaagatgaattgttgatcgatccacccgataaagggaaaacagttgattcggagttattacctaacatcaaagcagaagatgctgttacagtggaagaggaaaagattggccagtctagctcatttaaaatacgtgatctcaacctggttggtagtccagaggttgttgacatgcgaggtgaccctcgtttaggccaaagctctactgctggatgtccagtagacctacaagataatcaacaagttgagtttgaaacagctcttggtaacaacccgaataatactgacacatgtgccccctttctgttgggaaataagtcagttcaagttattgatatcgaagatgacataccaattgaagccggtgcttgtgacacgtcaaaatcaaaaggtgagatggtatattctagcatggagagcatgatgaacccgcctccggtgaacaccgatgctctacatggtatccaagatgggtatagtcttgcaatttcagattaccttggtgctgatatgtcatgctaccaatcaatacaagcagaacttcaagatgggatggacctaaacggttcagagggcattactgtgatggatgatccaatatacagttctcttagtgacataggttttatggaggtttgggaccagcaacctcaagactatgaaaagttcttctgaggcaccaactcgtgttgctgaaactgttctggagttcgactgataaataccagttatacttgcataggcagaaataaagcagtagatcgtgcctaacaaatagaatcccgtgtactcgtgcgacagcagcacctcatgcacttgtatgttccaggccatacatatgtgttcagacatatgtattcagactccctgccttgcccgacagtggtgtaaaaagtagtcgtatagctgtcatgtaattcaagggaattgacctaagcacgatagagcattcatccgaaacaattcttcatttgtaataaacagctctatattccaaattaaaagtgtttatttaaaaaaaaatgaaaacgcggcacgaccgaggaggtgtgggcgagcagccggctgaggagacgcaggcacgagcgtgacctagaaacgtggccacaaagagaggcgccggaggagaaaatggtaggaagacgcgtacaggaacgaaga

SEQ ID NO: 36542 - DNA, 1134 bp, Zea Mays
ggtcacttatgccgattcagcattattggcctgttcggtatgacaataaatgtgcctccataaaatatgctgttgattggggcaactctcacaagcaattggcacagcgcataggaaagcaagcaagtaatttcattcaagacgagctcagtatggaccatgtttatgactacatgcttcatcttctaactgaatatgccaagctcctaaaattcaaacccactaagccacctgatgctgttgaggtatgttcagagtctttggcctgccaagctgaaggcctcgagaagaagtttcttatggaatccatggtgaagtttccccgtgatgcatgtgatctgcctcctcccttcaaccctcatgagctcaagttgctaaagcagaagaaagaaaattcaataaagcagatccatatgtgggagcaaaaagatttgggggcttaaataacaattttgaccccctgctttttttttcttccaatcgtaggcacacataattggtgtcttataatttggaattggggagtatgatctaactcagtgtcattgaggtgcgaccaaataccaattatttattgactggatcaacttagaagaatctagataaatcgagcagatacccatttcttaggtatttttgtataaagcaaaccatagctacttagctttaaacatttttctgtatttaattttgttttgattggctttactttgtaaagcaactgtaaatgtgacacagaaattatacagaatatataattctgatccgatattcacttcctcattgagattggatatcgtagatatctgtgctgtagctcaaaaagaagtattgcaatgtgagctcctgggtgttattgtaccgtttgaactgtggagagtttgatggagcaggtcaagggtatcctctatgaggttaaatcatggcctccagttaagtaattttacttgaaatgctctctttcactggtcactggcatggtaagcaactctgctgcttccacagcttaacacaaagaacagattcaccagtagttttaccctgcagaaaactcttgaatcgatggtactctgatagaccgatggaaaggaaggtggtgcctggtaaatattgatggtccatttatgattttca

SEQ ID NO: 36543 - DNA, 889 bp, Zea Mays
atggcgtcttatgtgaaatctatagaccctgtgcaccttttagagatgcggcgttgaagggttttatggtccgtcgactccaaaacttctgcatgtgaacccagatggcagatgcttattctggaactattgggatggattttatcatgaaccatagtgcactgggaattgatttagcttctgttcatatttgttctgacagttgataagtccccatattgtcatgagagaagaaggggctgtgatctgtatctatgaccaaaacctcactgggtggccactttttgatcatggagtcttgctgttgaggatccagcatgtggtcgcgctccatctttatgaaagttcgtttgattcggttcaatctctcatcatctccttcgaagcttgctgtactgatagctgttgcaggccacggacgcatcagcattgaagcaagtactgattcctataccagataaaaataagaatggctttgttgtgatagtcgatcacgctggaattctggcctcaaggcaatggttgttggaggatcatctgctcctgcaccaagtgtcaactcaatctcgttctcgggcaaagagggtctatgtggtttaaaaagatggcaaacaaattcttcaaaaacattacatcgttcttatcttcatcggcttgaaatccaaacggcagcattgtggcggccacgaaaaatgcttgaccgatcctgtcaacaaattcatgcattgcatggatcacactcagccctccagcgccatgtccgatcagaatcacctagaacaagaccggagaatgggttagcatacatatggacagcaccaggcactggagtctggaagaacacaagcgattactacagatgagagattcacaatgacttgatgatcag

SEQ ID NO: 36544 - DNA, 3289 bp, Zea Mays
gaacacatcagaccggacacagcgagaagctcgagcatttgtccccgaggagcgagcggacaagagaagaaatcaagaaaacccccctacctcgccccaaaaatgccaaaccacaacaagtcgcttccgtccctccccacgccgccgagggccgccgaccaggagatcacgcgctcatctctcatggagtccgtctagcttccgctcgtctgcgcccactccaagcagccgcagcggaactcaactactgcaggttgagatgaacggtccatcgaatttcatgcctactcctgaacaggatgttctggacgtcaagcccttgaggacattggctccaatgttccctgctcctctgggtgtcaatacatttaaccactcaaccacgccaccattgatatttgtcactccttctggacaatttcaagggggttttggtgattggaataattctgctgccaaatcatttttcgctttcagcagcaaggatgctcgtggaggcaaggctgatacatttagtgatcagaatactggtactggcaaggctgccacttttggtgatcaggatgcttttggcagccagaatgtttttgctagtgatcacagtactggtactggcaaggctgccacttttggtgatcaggatgcttttggcagccagaatgtcgccactggtgtgcaggatgctgcgaaaggccagactgcaacagattggacagatgtgagtgccaatcctaatggcccaattgatgccattgccatttcagcttacaggtcaacacagcctaatgttatatcactggatgatgatgatgacgacgacgatgatgagccttatgctgctaacaagacatcagcatctggacgcaagatcaagaggccatcccacctcagcggatacaatgtgagtgatgctttggtaagtgacagctccaacagcatgaaggttaagcgccccaaatcctctcacgggaaagctgctgctgacaacgagcatgccttgcttccaccttctgaggatcccagggaaattgtggaggcagttctcatgacctttgaggcgttgcggcgtaggcatctccaattggatgaggcacaagagactagcaagcgtgcagatctgaaggctagtgctatcttgatgtccagtaatatcagggctaaccctgggaagaggataggggttgttcctggagttgaaataggggacattttctacttcaggatggagctatgtattattgggctgcatgctcctagcatggccggaattgactatatgactgccaagtttggtgacgaggatgattctgttgcaatatgtattgttgctgcaggtggttatgacaataatgatgatgatacagatgtactggtttacagtggttcaggaggtaatagcaagaacagtgaggagaagcatgaccagaagcttgagaggggcaacctggctcttgagaggagcttgtccagaaaaaatgtaatccgtgtggttcggggctataaggatccaggttgcttgactgggaaggtttatatttatgatggcctctataggattcacgagtcatggaaggagaaaacgaagagtggaatattttgttttaagtacaagctgctgcgagagccaggacaacctgatggggttgcaatctggaagatgtcccagaaatgggtacaaaatccactgactagaggcagtgttttaaatcctgatctatcatctggtgcagaaaatcttccagtgtgtcttgttaatgacattgacagtgatgaagtgccacaccatttcacatataccactcaggtcgaacacttgaaaccactcagttctgtgaagcctttacagggttgcagatgccttagtgtttgtctgcctggtgatgccaactgctgctgtgcacagcgtaatggaggcagcttaccttacagctcatcaggactgcttgtatgccgcaagactatggtttatgaatgtggtgaatcctgtcggtgttctttcaattgtcgtaacagagtgacccagaaaggagttaggatccactttgaggtctttaagacgggaaatcgaggctggggtcttcgttcgtgggacgctatacgggctggttcatttatatgcgagtatgttggtgaggttattgatgatgctaacattaatctgaatgatattgaagatgattatatatttcagatgtcgtgtcctggtgagaggacattaaaatggaattttggacctgaattgataggggagcaaagcacaaatgtttctgctgatacctttgagactctacccattaagataagtgctaaaagaataggaaacatatcacgtttcatgaaccatagttgtgctcctaacgtattttggcagccagttcagtttgaccatgaagatgatcatcgcccacatatcatgttctttgctttgaagcatattcctcccatgacagagttgacttatgactatggtgacgttggagctgatcctagtggtgtacggtctcctagagcaaagaactgcctttgtgaatcctcaaattgtcggggattctttatctgaccgtggaaaatgcatattctatctatcaacattcaaccctaccagctagattctcggctttgtcgacaactcgacatcgaattgtttctgattcaacagctaatgtcgcaagacagcatcaatttcgtcatccaaaattatcactccatatcctttttggtggcacctgaagaaaaagtaggactgttcgaacagcttgcatcactctgtcgttgtggaaccattatattaattaatgtcaatcttttagatgaccattcagcaactaatgcacaaacgtttcttttgtgggggaagaatgttggtcttggaagttcaattttgtgtagtttgtagacttgtagagcatttagtgctgctaaacttgtgcaccttaagtcttttggctgtaaaagagcctcgaggctccagctgaattggttaggcagtctaagtagcatttctttgatcctgaatttgactccacgtgagtcaatttcaagctggagttaaaaaaaacattcttatgttctatactaaagtacagttctaaggctcaaccatgatcatagtcgttctcacatgtgctatattgctgttgtgtatgggtgtggtacgtgaaacttgatatattggtaaagtttttttatactaattaaaaacttgagaaaatacagactacccaagtgtagagctgttggatcctcgcattttatccatatctctctcgtcgcttcattttctacaaca

SEQ ID NO: 36545 - DNA, 278 bp, Zea Mays
gtgctgcaccggcgcgagcgcgggcctgtcaggctccattgcgggcgcttctgccgcgggcgttgcaccaccacgacgacggcggtaacaagttcgtcgcgcatggatcgtaggctatgcataatagcatatcaaaaacagtaaatataccgctcgatcgcgtagagggaaaatcgaagcctgtcgcgtatgacagttcggctaggccggaggacctgccggcttgacggagagttgatgcagatctgatcccgcagcaacatcgaggtagagcgtgc

SEQ ID NO: 36546 - DNA, 1949 bp, Zea Mays
acgacggcacgagcagacggcgagacccgctgggaaggctttcccatcctagttgtcggcgcctcctccacatcgagtgcgctagggttttctctgcccctcgcccgccgccgcagccgccgatggccgagcgctggcgctcgagggcgcggcgggacccagacctggacgaagatgcttccccgccgtcccggcagccgcgccacagcgggggcgacgaggaggacgatgagctggggaacgaggatctcagcctggagatcgtcgcgcgcgcgcagcggaagcggcgcggggaatcagccggcggagtgcccgtgttcgccgaccttctttcggtgtcctccgccgacgaggagggcgccgtggtggagctcgatgaggcggatgagccccggaggaagcagaagaagaagcagcgccggaagcaaaggaagaagcatcggaaggagactacagaggctgcggcgggggccgccgtagaggtggatgagaatgcggtttgtagcaccgaggaggggcccattgggacagcagaatcggtgttaactgaaaatggggctgatgcccctgcatctgataatatggttctgcggaagctccttcgcataccgagatactttgatcctggggaaacactgttggagacttgttttaattgtagcgaggaagggcatgtagctgcaaactgtccattggaaaagcgaaagaagccttgctttgtttgtgggttgtttgggcacaatgcaaagcagtgcacgcagggtcaagactgttttatctgtaaaaaaggaggccatatggcaaaggactgccctgataagcacaggaggaatgatcatcaatccacattatgtttaaaatgtggagaaataggtcatgatatgtttggatgtaccaatgattacccaccagatgatatcgagaagggccatctatgttgttccgacttctctgacgattgtccgaaacaaattagctgttataattgtgcccaatctggtcattctggtctgggatgtgccaaacgcagggaaaccagtgctgtcacaactccaaccttatgcttcaaatgtggcgaggaaggtcactttgcacgtggctgcacaaagaacgctaagtccgatcggtcgaaaggcaagtcatcgtcgcatattcagaggaaggagaaatggaaaaaggcttccagtagtgctagatcagctccttatgacgcccgaaaaacaagcaaaaggaaaagcccccatctcgaggaaagagtgggcacacctcgtcataaacccaaatcgaggggtggctggactggtggagatgatctaccattgaagaagtacaaatccaatgggtggggctctccatctactcccaagaagtcttacgcaaaccaccagttcttgtctggttgcgactacctcactccccagccttcacgaaggcacaactaccatggtaccatgtcttcaccgaatcaccaattcttgtctggctgtgactacttcactcccgagtcttcacgagggcacagccatggtaccatgtcaccgaactggaattattcacccagcgccaggaagcatgggttctcgtcatcaagattcgccgcggctgccgccagcaacacccatgtccggttcgggagaaattagctggatgcacgcgcctgatattgttgttcgttttagccatagatagataccaattatctcctggggatgaactctacctgtcgtcggttcatgccctttcgatagttgtttgttctgagattattatatatgtaatcgtggttcaaactatttattatttttttttactgtcttccatggcatggcgttgatgccttttgcaaaaacggcaactgaaagtctgtaactgtgctttgagcctttccctgatgtttgagtgggcagtgcatcactgatgcggcattacatgcaaatgggtaactcgtc

SEQ ID NO: 36547 - DNA, 1083 bp, Zea Mays
ctactttgaagccctctctcaaaacaaatttatggtggctgctcatcttacaggaatacacagtgccatcaagatgctcaatagcagggtccgtgttatccatcagtatcttgttgccatgcaaaaaggtgacattccaatggacaattcgctgcttaggcaagtctcaagccttgtaagaaggctaccggctacggaatcacagaaattccaagatgactttttaatggaatacaacgacactctcctcatgacttacctggcaatgttcactaactgttcaagcacaatgaatgagttggtcgagaaaatcaacacaagctatgagagaccgactaccaggagaggaggccgaggtgctttcatgtagctcacctgccatgatcctgctgctgctttcatctgtgaggatttttcgggagtagcttatgtccctggtcatttttttgcatgcaatctatcatgcgcaatcggctatacggcagctcttgagtcacttcaaactttctaggcaaaactgatgatttgctggaattgtatcagatcccacctgtgctgaagttgatatgtaaagttcctcacccagttattctatttgactctaaggctagtttggaaacttcaatcctcttcgggattagggtgtattaaaggctagtttgggaatctccttttcttaagagaaattagtttattttctcttgagaaaataagaatcattcggaaaaatgtagttcccaaactagccttaaacgtggaaattagttcatttctctttaaatccccttcaatcctggaatggatttgagtttttaaactggtgtagtttggagactcaaatccccttcgggatcttcgggattgaaggggatttgaagagaaataaactaatttccccctcctctggctagtttagaaactctaatcccctccgggattagaggggattgagggagaaattagtttacttctcttcaaatcgctttcaatcccaaaaggaatttgagttttcaaactagccctaaaagggatattaatgctggtttcgtcacattcacggtcaacaaaacttaaatcatttgt

SEQ ID NO: 36548 - DNA, 2769 bp, Zea Mays
tatatttcggacaagacaacgccgttgacttcttcacaccaatcgtccaaatcacccctggatcgccggtgatggagatcctgagtccgtcgccgccacccagccactgcccactcctacgctgcggcggtcactgggagcagcaccacggcgagacgtgggtccacgtggctgtcgggaggtcgccggagaagacgctttcgctgctacgatgggccctgcgccgcttcggttgcagccggatcgtcctgctccacgtccaccacccgtcgccgctcatcccaaccctcttaggaaagatccccgcggtccaagccacagaggaggtggtgctctcccatcgcaagtccgagaaggaggagatgaacaagatcctcctcacctacctcgccttctgccacagagccaaggtccaggccaggcttcttgtcacggagaacggccaaatccacgacggcatcctcagtctggtcgaccatcacaggatcaccaagctcgtaatgggttctacacccgataattgcttcaagttaaaatatggcaaagaatctttaatggccagcagtgctcctgcgttttgtcaaatctggttcgtgtggagaggaaggcacatctggaccagagaagcgagtgcagccaccgacaatgctaccccagttcagtaccaatatgatgtgatgactacaaaaagaattaggttcagttcatatactgacaacactggagccatacttgatgaaggatatcctgcgcatgaggcattaacaacagttgatctaaatcaaggtgttgtttcagattgtggtcaatctaatgattatgaagcttttggggaacatgaggtcaaccatttacgcggtatgagcatttcagattggcaagatgatacagaaccagaactcaactcaacattttggtctcgttcttcaatacatgctgatacattacagttagatcctaaggaggtattggctaatgtcaaacaactaatgatggaagctgacagatcaaggaaagaagcgttttctgagttgatgaagcgtaaagaaacggagtcaaaagctgcgagtgcttttgccaagacaaaagattctgattctgccaaaaaacatgaaatagaaatgagggaggaacttgaagttgtattggtagacacaagaaagcagcatgaagaccttataaagaataaagagagagcagtatcagtactggactcttctacgaggagatcagctattctagatgcccatgctgaaaaaataaagcttcagatagatgagttctcggcagagcttgaagtgatccaatcttccatagaaactcttcgccagaagaaactaaaaatgcaaaggctagaaagcaaacatattgacctggataaggggtgcacatacagccatgccacactgtcaaattgcgcctcaaatgcttttggagatgatttatacggcttcagagaatttacagtgttggatatgcaatctgctacgtgtaaattctcagagagcttcaggatgtggtcgcaaggtcgtgggtgtgtttacaaaggagaaattatgaacagaactgtgatgatctataagctgcactgccatagcattgagagcgtgaggcagttccagcaagaggtttatatcctcagcaatgtgaggcaccctcatctagtgacactggttggggcgtgcccggaagcgctgtgcctcgtttatgaatacctgccaaacgggagccttcacgaccgcctcttcagcagacgcagcagccgtcacttgccgtggagaattcgtgcacgcatcgtcgccgagatctcagacgcgctgctgttcttgcattcctgtaagcctcagacgatcgtacacggcaacttgaaactcgagaacatccttctagataccgaatgccattgcaagatagccgatttcggtatctctcggctattcacaggcgacgtgaaggattacccgtcggggggttctgagcctccggaagggtcttttccctacgcagatccggagtacatgagaagcaaagtgttgacacccaagtctgacgtatactgcttcggaaccgtgatactccagctactgaccggaagacaggagcctgcacggcggcttgctggtgaagtaaggtgtgccatggcttgtggcaagctatcgtcaattctcgaccctgctgctgggcattggcctatggaggtggccggaaggctagcggaactgggcctgaggtgcagtgaggacagaagccgggatcgcccagacctgactgctgagaccgtacgagagctggaacagctacacttgacgagggaggaggaacaagcaccctcctctttcctgtgcccgattatgcaggtgtgcgctgctgatggggtgacctacgaagggcgggcgatccgtgagcggatggagttggagactgggcaggggacagcgcctctgaacaacctgaaactggagcatctcagtctcacacctaaccacgcccttcggttcgctatccaggattggcttcgtcgctctcgccgatgaaactttttgcctggcgtttcttttgggttttcgacctgtacagatttcacgtgtaaaggggtatagcatatctgcatatgaataatttgaatagctgttctaaggttttgtctgtacttcatgaaatgtatcaggatgcatgtacgcggcaatgcagcttcaggatcgatcgcataaatcttaaaataatactgtctatgccatgtccaaccatctctctaatctcatcttttat

SEQ ID NO: 36549 - DNA, 2006 bp, Zea Mays
agggtttagcaatggatcttgctggacttcatgaaattccgacgaaatgctaggtcctacgggattttggatcaagttgaatcaaaattctatctgttttacctgaaagtcgaattttaggatgtaaagatgggatgtcggggagctttgggttttggtgctaggagtagatcctaccaaagctgtaagcgcatcccaatttgcatgggcaaagatgttcaaggaatcaacagtgtctaagatggttgacgaggtttatgttttcatgttacattactgtgctgtagtcgcacgtagtgatgtactcgagattcatgcttggtgccaaaatttggaaaatccatgcattaatgtcttcggtttgagaaaccgttatgacacttttgtcgtatcttaacgaactgagagaaccaaccgagatcccactgtgccatattcctgaggctgtcatcaagactgcgagtgattggatcagtcaaagatcttatgatgccctgggagactttgttttgtggtgtatagatagcatcatgtctgaattgtcaggcccatcagcaggacctaagggttcaaagaaggttgcccaacagtctccaagggcccaggttgcaatctttgttgttcttgccatgactttaagaagaaagcctgatgtacttgtaaatgttatgccaaagataatgggaaacaataaatatcttggacaggaaaagcttcccatcattgtctggtttattgctcaggcatctcaaggtgacctagtgactggcatgttttgctgggctcattttctatttcccacgttatgtgcgaagccaagtgggaatccccttgcaagagatttggttttgcagttgcttgaaagaattttatctgtcaccaaagctcgttctatcttattgaatggtgctgttagaaagggggaacgcctagttccccctgtttcatttgacttgttcatgagagccacatttccggtttctggtgctcgggtgaaggctacagaaaggtttgaagtagcttatcgaacaatcaaggagttggctcttgccggttctcctggctctaaaactgtgaaacaagcatcacagcaacttttacctttgtgtgcaaaagcaatgcaagaaaacaatgcagagctcaccagggaggctgttgatgtgttcatttggtgcttgacacaaaatgcagagtcctacaagcagtgggaaagaatttatcctgaaaatactgaagccagtgttgctgtcctgagcaaaattgtgattgattggaaggatgtgtctcctaagctcagttctgaagctctcaaggcaacagtgaagaacttgaaggctaagaatgaggcagcgctggagtcagcaacagatgctggaaagcaggcatctatcaagaagcagacaagcactgcaaggtgatccttggaaagctgacgcgcagttccacctgcctgaagagcagccttgtgggcatcgccctcgcagttgcagctagtctcgtgctatcatctcccgacatggaccttccgctcgagtgggagaagatccaggcgatggtctcatcgcacctgtcgttctgaacatacctgtccaggatctccagacgtgggtggatctaagtcatggatggctgactcagcagtgaagagagctcaacgggtggtgagaataaggaggggggggggtggataggtggtagaaccgaaaggttacagttttcatgagtcgccgttttttcccgcgcttcctccagcagcagcggtgcatggtaggagggagatgcagtagtcgactttgcagagagttggtttaatcggtagactggtgggtgcgaagaaggttgagtcaaatggctcgaccagaggattaacaccttttgcttttctctttgtgcatctgagatgatgttggcaaacagttttggttatctagaatcttgaatcgtattccgtgatgtgtgcttgtcggctacatgtatctgttgcgttgatatctgcttaaattgtg

SEQ ID NO: 36550 - DNA, 650 bp, Zea Mays
gttcagccgtatcaggacccaaaacattataaaagaagccctagggcgctagggtttcattttgtagtggcccgtggtgacacccccaccacgatgcacgagcgatggcgcccctccctgccgatgtgcgcatggcggcggttccttgagggaacacgacgacgaccatccaaggtgggagcgacggcgtcgacctcttctagtcgcgagcggcaacgacggatcccatagacgcgcgggacggcggtggctccccgaggccgcactgcaacagcggtcacctgaggcgcgcatgatggcggcacatccaaggcgagttcaaaggtggtggccccccggacgcgcgaacaactacagatctgggaggcgcgcatgcggcggtggattctagaggcgcgtgcggtgtcggctccccgaagactcgtgcgacgacgacgatgacttgctccaactccaattattgtttatgtatggcgctgttggttgggcacatattaggacttttttcatcaattatgatgcgtgggtagatatttatgcaactctctatgagagtttatgcttttgcacgattcctgtcatccattttttgcgtttatacagtgggaacgaaaatgacattcaaaatttgcatgcatgcaatgaaaact

SEQ ID NO: 36551 - DNA, 1043 bp, Zea Mays
tcagttttccctgtctgtcttcacttcatgtatctttgtttagagaccttgccttgttggggcaggggacttgggacgacagagaggggagggcggagttggtgagcgtgctcgggatcagcgggtgacctcagagtcctttcttcctcttggaggaggagggctgcggcctgagcaggagacggagacatgggtagcttcgttaaactggcgaggagggcggtggagacggacgcgccggtcatggtcaagatacaagaactgcttcgaggggccaaggatgtcatgtcgcttgcgcagggagttgtttactggcaacctcctgagtcagcaatggctaaggtcgaaaaaataattagggaaccaacgctcagtaaatatggctctgatgatggtcttcccgagcttcgagaagcactttttgaaaagttacgcagagagaataagcttactaagtcatcagttatggtcactgctggtgcaaatcaagcttttgtgaacttggtcctcactctttgtgatgccggtgattctgttgtcatgtttgcaccatattatttcaatgcctacatgtcattccagatgacaggtgttactgacatattagttggtggttctgatcccaagacacttcatcctgatgttgattggttggagaaggttctgaaagaaaatgaccctatccctaaacttgttaccgttgtgaatccggaggatttcagatctgtgcaaaaacgctggtgcatggcttgtggttgacaatacctatgagtaagtcaatactgtaaagcaataatttttcaaaagcagtaatatagtatttcgtggtacctgttagaaagaactgagaagagccgtgaattacggttgtagtagggacagatcatataagccattagaactctactccctcctcttgaaacagtatcaaaatgaaagccactctggtggcgtacacaggtaggagttctaggatacatcttagctgtttccacaaggacaggaaagccagaagattgtgcccataggaggctcagaaagtt

SEQ ID NO: 36552 - DNA, 2213 bp, Zea Mays
ccacgctgctcactcactgacagcctgccgccggctctggtctgctacggttgatcacagtcgcgagcggcgagagtgacagtgcgaacaggctcgtcagccaacaggaagcaagtgcacactcccaccccactcccgcgcgccgcgcccgcgaccggggcggcggggccggtggtggtggaggcggcggccatggcggagctgcggcactcgatggcggtgcgctcgtccaactcccccgccaagcgcgattccgacacctccgcggcgtcgtcccccttcctcctgtccccctccacccgcggcagccgcggcggcggcggcggggacgacgacggcaaggacgcccaccgctcgtcccctctcctctcgcatcaccaccacaagcgtgtccacctgctgacgtccccgttccgctccctcctcgcactcgaggaccccaggtcctccgccgcctcgacctcctacaggatcctgcttgttctcctcgcgctccttctcgccgctgtgattttctgcgcgcccttgttctggtcccgcctcaacactccgttcttgtgccacaaggaggggatcacgctccactgccctgagacgaaggaacccccatctctatgggaaaatccacgtgctgccacgatgtcctggaagccctgtgcagagcgatgcagcaatgagccctcagatgtcccatcagtgaatgaaacctctgggtatatttttatccatgccgagggaggactaaaccagcaacgcatagctgtatatatgtaatgctgttgcgattgctaaaataatgagagcaacacttattctacctgttctgaagcaggaccaaatttggaaagaccagtcaaaattcgaagacatctttgatgttgatcattttataaattatttgaaggatgatgtacggattgtccgagatatccctgactggttcacagagaaggatgagctgtttactagtataaagcgtactgtgaagaacatcccaaagtatgcttcagcacagttttatattgataatgtacttccaaggatcaaagagaaaaggataatgtctatcaagccatttgtggacagattggggtatgataatgtaccaacagagattaaccggctgagatgcagagttaactatcatgcattaaagttcctacctgatattgaggaaatggctgttaagcttgctgcaagaatgaggaacaaaactggcagcataaatccatacatggctcttcacctgagatttgaaaaagggatggtggggctttctttctgtgattttgccggcacacgggaggagaaggcaatgatggcggcttataggcagaaagaatggccaaggcgcttcaagaatggatcccatctatggccactggcgctgcagaagagaaaagaagggcggtgccctcttgagcccggtgagatcgctgtgatcctgcgggcactggggtacacgagcggcacacagatatacgtcgcgtccgggcaagtgtacggcggcaagaaccggatggctcccctcaggaacatgttccccaacctggtgacgaaggaggagctagcgagcgcggaggagctggcgccgttccggcggcacgtgacgagcctggcggcgctggacttcctggtgtgcctgcggtcggacgcgttcgtgatgacgcacggcggcaacttcgccaaactcatcatcggggcgcgccgctacgcggggcaccgcctcaagtcggtgaagcccgacaagggcctcatgtccaagtccctgggcgaccccgacatgggctgggcctccttcacggaggacgtcgtcgtcacgcaccgcacgaggacgggcctccccgagcccaccttccccggctacgatctctgggagaacccgctgacaccctgcatgtgcagggcatgagacgggccatccctcagatcagagtggccgtctggccgagtcctcgtcttcgctaggctacgactacgagtagtctcgtgctcacttccatcagcgcgcatttcagcgagcatatgcttctactagttaaacacctagatttgtatgtatttggctggcctaatctgtagtttcacatagatcacttcatgctgaaaatgtcttggacaaggcagtgaatgaagataacatcagtaacgacctgcttttccaaagctcctcttggatttaccaagctgagccaagaaatggctaacctgag

SEQ ID NO: 36553 - DNA, 114 bp, Zea Mays
caagtcctttgaccaaaccttgatttccatccccgaatgtgatatctctttgggtatcttcgtttttctcgtaggaggagaacattatcttctcccctgtcatgtggtttgtgc

SEQ ID NO: 36554 - DNA, 2214 bp, Zea Mays
cacaacatgccataggttttctgatgaaatgaacagaatacctggcttttataacatacttgcttattggcaaatccaagtagctcctgaaacatgaaggaccaaacatttgatttaggactggttaatgaaatcaatccggtgattgggattttgccctttttgggttccaaggcaaagctcactgctgaattagagaaggtggatgagaagctcaagttgacagagtctctccttgaaagcaaaaacctagaactgaagaaaacaaatgatgagaaaaaggctgctatggctgctcagtttgcggcggaagcaacactacgaagagtacatggagctcagaaagatgatgatatgccacctattgaagccatccttgcgccgcttgaagcagagttaaagctttgtaggaaggagattgcaaagcttcaagacgacaatagagctttggaccgtttaacaaagcaaaaggaggcagcactgctagaagcggaaaggactgtacaaatcgcaatggctaaagctgctatggttgatgacatgcaaaataagaaccaagagttgatgaagcaaattgaaatttgccaggaggaaaataagatcttggataggctgcaccgccaaaaagttgcggaagtggaaaagctgagtcaaactgtgagagagttggaagaggatgttctgcaaggtggtgcagctgccaatgtcgttagggattaccaacgaaaagttcaagaaatgaatgaagaaaagaaaattcgtgaccgtgaacttgctcgagctaaagttactgcaaatagggttgctgttgtggtcgcaaacgagtggaaagatgctaatgacaaagtaatgcctgttaaacagtggctggaagagcgaaggttcctgcagggtgagatgcagcagcttcgtgacaaacttgctattgcagagagaactgctcgatcggaagctcaattaaaggaaaagtatcagttgcgcttaaaagttttagaagatggcttgaggggcactccaagtggatcttgtcgtccttccatggaaggaaaatgtataagtaatggacctccccgtcgactttcactaggtggtgctgatagtatatccaaaatctctccaaacggtgtgttaatgaggaggtctccatctttcaattcaagatcccccctctctaccagcagttgtttggtcctgaagcatgcaggaagaacttcaaagtcatttgatggtggtaccaggtcattagaccagggaaaagttctggggagtggacctcattcactcaatagatctacggatgcagttagagattgtgagacagctgatagttggaaggctaatgcagaagaaaaaagtaatgaaaccgcaaacaatgattcagctgacatggtctctggtgtactctatgacgtgttgcaaaaggaggtggtttccttgagaaaggcatgccatgagaaagaccaaactctaaaggacaaagaagatgcaatggagatgctagcaaagaaagtagatacattacataaagcaaaggaagtggaggctaaaaagaagaggcaagagatagctgctttggagaaaaaatttgccgcggtgtgccttgaacaagaacggcttggtaatttgagaggacctggaacttctcagactgtttcgggaagaactgcatcacgaggtggattgacgcgcaacctccaatagcatacatctaacttcaggcagagttggagcgtgctactcaagacaagggaacatgcgatgttggaagatataatggactcagtgaagaagtggttacaggagcagcattcggttgaggaaaattgcagtgacattgaagtggtctgaagtggaagaagtcccttatttttgtttggagagatgccctttccagcttgcttggcgctttttagtctgttgctttatgtttcagatgctagttcctggtcatctgtgtgccggcagcatgtgcttctttctatgctgttccaggctgtggatctcgtatgtgcttagctgcaggttgactggtgttgtggttctctgatatgtggttgtaaactggtatccctagtgtgtctgtttgaactctattgttctttggtttcttaaaaggagagtaatttctcgttgaaaaaaaacttggatgattataggtcaaagggatctcttgaggggtcaccacaacatcatcataatgacattcaatttgag

SEQ ID NO: 36555 - DNA, 2265 bp, Zea Mays
ccggtcctcccgtttccccccttccccttccgcttcgccattccttctcggtcagaacgacgcgcatccccgcccgcacgttcccgtgctctcgcttctccggaggcgaccagggttgggacttgggaggctagcgagaaggtgctacccgggccaactcctccgatcgcccgcaggagaaggggatctctccgcctccccgccctcgtcgggcctttcccatcgccacccgcgaggccacgcgctccagctcttgtgaaccggaagggttctggatttctgagccaagcgaccagcacggtggctcggccgggctgacactcccctcccctgtcgcccggtctcttccttcccgagcagaactcccctgcgtcttgccgcttctagcatcggggagaaaaattatagaggaaggatatgcgggatccatttgatgcaccggttgatctcattaacccggaccataatggtgggaacaaactttctaggactggtgcagtgtctgctggggactatggtttacaaaatggacccaaatcctttgccccaaactccgacaccctagtcaggcatcaagtccaggttgcatccttgcacaaagacttagttttggaagatcccaatactcgtatcatggatcctgagaccaaggaactttactttagatcacaatcacaaggggacgagatcttgttgcttcgcaagaaaattgctgaggcatctctcaaggagctgagattactgggtgaaaaacatattctggagaggaggctcacagacttgaggatggctgttgacgagaagcaggaagaagctatatctggtgctttgcaacaattgaaccagaagaaaacccatcttgaggacaatatgagactggcaaatgaactaaaagttgaggaagaagagctatacttttttacttcttcattgcttagcatgctagcagaatacaatattcgcccacctcaaataaatgcttccatcattacaactgttacaaagcgtttgtaccaacagatgcatttgaagctcagatctttaaatgacaatttaggtgatatgactcaacctggaaatatatataatcccaatcttcagcaagtaaccctatcaagaaatgaaccttccccatcttataatttggattcaaataggaacactcttcaacagtatgctcaaggtccaagtgaccgacatatggatcaaatggatactggcggtactactccctctaattattttgagggagacagaagagtagatggtgactcacagttataccaacctgatggtgacgctttacctggtattgaggggtttcaaattgctggtgaacctagaccaggatttcaattaacagcatgcggttttcctactaatggtactaccctttgcaatttccagtgggttcgccatcttgaaaatggtaccagacagtctatcgaaggtgccacgatgtatgactatgtggtcactgcagatgatgttggtacttttcttgctgtagactgtacacctatggatgataatggccgccagggtgatttggtgacagaatttgctaacaatgggaataagataacctgtgatccagagatgcagagtcatattgatgcatatatttctaatgggagagctgaatttgaagtttttgtcctgcaggcttattctcctgaggagtgggaattggctacattggtgctaacacgacctaactatcagattaagttcaaaaagaccggtgaagctataattgatgagaagtactcacaaagtctacagatgaaaattccaaatgggcgcacaactcaatttgttttagtaactgcgggtgcaactctcccatttaacacacagggaatatcagagccaaacaatgaggattacgatgttaggttacgcgatctaatcgtattagtcatgagaactttccagaaaaaggctttagatgccaaaaggaaagtcaacacttagaatccatgttgatctgttacaaaagattctatgtaaaaccgtagaaaattttcctatttttgattgttttgtgcagtattcgatgatttttgttcttgagatggaatgagctctcgatcaaagttttgctaggtgctagacggaatctaggcgatgacccttagcctagggactagtccaagcctaggcgatgctagacgttttgccaacttatataatatatacatttatagataaaaaagagggaaggaccagtagacataccttttgtccttgcagatctgctaa

SEQ ID NO: 36556 - DNA, 4579 bp, Zea Mays
tcccggctttgaagatagtgagtaccctaaccatgtgtataaactctcactacaacacatatagccttctatgacgaataccttgtgacaatagatcaaaatgtcataagcctctcctacttatgacgtttcgtaggggatgattgactttagtgatgaaaagtaaaaatttgtcattaagaccaatgcaaaatcgtcataaatatgaaaggtgtcacatttgtgacgaacactctttcaatcttatgacaattaggtagtgtcactatttcatgacaatgttggtcgtcataattctcatgtgaatttcctaaaaaagcaaaaatatagacgccactacaaataatgaaataaatcaaaatgattatgaaataagtttgaatatgaaatcatgtttaaataaaaattgattaagcttgaatttcccacatgtattgttctataaatatattactacagacttagatctaatatattcatgagtaatttgttatataaaaatagctaaaatgataatcaaactataaaataggaacaatttaaaattaaaaatttggagaaaacaccaagcaaacaatgcaaaaatgacaaaaacaattttgaaaataaattttttgcagaaaacatgaacccacatagaaaatagaaacaactttaaaataaaaaatttagagaaaacaccaacccacataaactaaaaacataaacattttttagaataaaacctttggagaaaaccctggacgtagactaaaaaatagagagttaaaactaaaaaagtaactattaaaaagaaatgaagaattgaacctaggacctgctacttattaaatcacatggctaccagtgcgccacaaacaagagtgtgattaatactttgatacagtacatattattacgtattattgacttttgtgtggtctcagctccacgtatccatccagcgccctgtacctcaacaacaaattctttcacgccgccgcaattgaatcaagaggcagcagcctccctctctcgtgacatcgccggtggtaccaatttgggcgccattgagggtgactacgccacctcgcctgtgccctcgcactcgcaggtaattgcggtggtgccaatttgggcggcagtgcagctggtgacgcctccctcgtagctccacccacaggttactgtcttgctcagatctgccctcattatagaagcaacatcgacttgcgtgcccacgacacaagctcgtgtcagtgctactgccaccatccctccacagcacagccacgctgcctgcctcatgtgtcactactgcgtcctatcctgccacaccggatagaacttctacaagatggatagatcttggatcaaagacagactatttagcgatgcacatttggatggggtcaaagagttcatgaatttggtttcacaaagatttgataagaatgaggagatgaatatattggtatcaatgaggatgacggtatgaacgagaatgaagaagatgagcctgataatagaattcctgatatgattcgggagttgtacccaactaatgaccaaggtagagggaaatctatgtttgcagctttattagaagaaatgaagcatgaactttaccctggagcaccttacacacgtttttcttttttggtgaagttacttcatatcaagtcattttatcgaatcagcaacgttgcattcactgcaatactaaaactattatcatcagcattcccagattgctctcttcctgcatcttaccatgaagcaaagaatgttattaatgcgttaggacttggatatgactcaatccatgtctgcccaaacaattgtgttctatttcgaaaggaatatgcaaaacatgatgaatgtctggtttgtggtgcatcaagatggaaagatagtacagatggaaaaaaacatattcctgagaaagtactacgacattttccaattattccaaggttgaaaaggttctttgcttccaaaaaaatatcagaggagacacaatggcatttattgaagaggaaggcattggagaatgaactaagccatccagctgatggtgagacatggaaagattttgatagaaaatatgagtggtttgcaaaagatggaaggaacattagacttggtcttgctactgatggtttcaatccatttggcaaaatgaactcttcatacagcatgtggcctatatttattattccttacaactttcctccatgggagtgtgtggagcaatccaacttcatgatgggactactcattcctggtccatcatgtccaggaaaggatttagatgtttttttggagccactcattgaagagttgcaagagctttggaaaggtgtctctacttttgatgcgttgacaggaaaagattttgatctacatgctgttgttatatggtgcattcatgattacccagctttgagtacattgtcaggtcgagtcactaaaggttattatgcttgtgtgcattgtgacaaaaatccatgctctagaagaataaaaaataagatatgctatattggccatcgacgtttccttccatgggaccatatatggaggacaaagaaatggtttgatggtaaggaggaccatcttgaaaaaccagaggaatttagtacagacgagttgatgcagcagttggagagggtcaaggatgttaggccgggacaacatcctcaaagtaaaaagagaaagcgagaagtagatggtcaatgttggaaacgaagatcatcattgtgggatttgccttattggtcaaatttgaagctacgccataaccttgatgtgatgcacattgaaaagaatatatgtgagtccattattggtacatttcttggcattattgggaagacaaaggacactattaatgctaggcttgacttggaagaaatgagcataaggaaacatttgcatttgaagcgtgatggaaattcctacactgttcctcatgccccctatgtaatgaataggagccaaaagttagttttttgtgacttcttgagaagagtaaaatttcctgatgggtatgcttctaacttagcaaaatctattactagtgatggatgtaaccttcaaggattgaaaactcatgactgtcatatcctactccaaagaattttacctgttgctatccgaggaattatgcatagggatatatacgaagcaattgccgaattaggatatacaaggaagagttagcggatcaaggaactccttatgttcaaaaaacccatgataagcaattttctttctggtttaagaagcatattgcaaaactacgttacgtggatggagaagacattagtgatgacctatttgcattgtcatgtgaaccggaccttcgggttcgaatattttcagcatgtcttgtcgatggggttcgatatcacactattgaccgtgaaagaaatagaagaacacaaaatagtggagtcatgtgtgagggttgccatggtgacgaaaatatcgaattttatggtcaattgaaagaaataattgagttgcgttataactcagatatgtccaaatgtcgcacagtggttctatttcgttgtgactggtttgacacttatagcaagaaggttagaatgaaagatgatggatattttagaagcatcaaccatggtagttgttggtacaaggatgatccttttattctatcaacacaagcaacaaaagtattttacttggatgacactaaacactgtgaaagctggagaattgttcaaaagtttacacataggcacttatggaatgtcactgaaaatgaaaatgaggaaacacccatgggcttgggactatcataccaagatgaaatatgtgcaggttttcatgtacaagtgaatgaaggaaatttgaatgatgaagtaccggatagtgaagattgtcaccacgtcaatacaagtttagttgatgagtttcgtaaaccaaggcaagacaatgtgcaaggagacgggacaagcgatgatgaagatgaaactatatggcaatatgttagtgatgatgaaagtccaacaattcttgtcgaggatgatgatgatgatagcgatgccgagtaaagactagaaagttgatggtggaagcgttgctgacctatatggatcttggtcatgaaaatggtgacccacatggatattgggtcactatgataggatggtggcaattagtgtgtgctaggatattaaattttattctagattttgggatgtcctaggtcttttagctcggacaaagtctatgcttgtgtcaaatatttttatctttctctatatgtctacagacgaagaaattataatatgtcagaactataatatgaatgagcaccaattcattgattttattcagaaatcatagtatccctttttcctgggcatatgtttcacttaatattgttttagtgtaggctgagtgaggaattgaggatgcatgcagtatgaatatgtgtaggcaatctgaaattctgaatatgtgcacgcaatctaaaattctgaatatgtggagataatctaaatatgtgtaggcaatctgaattgattttagtcttctggtgatattcacttgtgccattgaatat

SEQ ID NO: 36557 - DNA, 761 bp, Zea Mays
tggtggttgaccacccctccggacgatcgagtgaatatctccctccccatgcatccccaacaagtacggctctgagccccggaagaggagacgcatcatcatcctcatggctgcaaggggtttccagctgaggctttcgcgctggtttcagcgatcccatgcaagtgtttcccagtcccaggacgaagacgaccgcggcggcgagaggaacggcttgctgaggagccacttggaccagatcgtgccagtcacggatttcgccggcacgtccaactccaaggcgttagctgttcgtgtggaaccaaagaccgtggcgctgaaggtgtccatgcactgctatggctgcgcaaggaaggtcgagaagcaagtgaagaagctgcaaggagtggtgtccatcagagtggagctggagagcaagaggctgaccgtcgtcggagacgttagccccacggacgtcctggagtgcgtgtgtaaggtgacgaagcatgcggagatcttgcaggctccctagccatgcatcggctttccagtccagtccagttatgatgatgatgcagctgtggtggatgtgcagtacatattgatgtggaggttaatttggtagcacaaaaaatatttatagtacgtgattctccttgcaagatcaggaataaatcctagatctcagtatatagtaaggccttgttcggttacaagagaataaattccaccatggatttaatccgagtctgaattgggtgaatccatatgtcacacctaat

SEQ ID NO: 36558 - DNA, 1878 bp, Zea Mays
gtcgttactagcttcacctcatcagtctaccagtgtgtcaacgagtttgcatactggatttctgcgttctcgaagtacctcaggattgcctaggcaaccttcatatactactggatttgggactgctttaaatatagagacacttgttgctgtcgcggaacaaagagatacaccaattgagacacctccacctgaagttcaggacaagattctttttatgatcaacaatatatccatctcaaatatggaagctaaggcaaaggaatttaacgaggtcatacaggaacagtattatccttggtttgcacaatacatggtcatgaaaagggcaagcattgaatcaaatttccatgatctgtatctgaagttctttgataaagtaaactcaaaatccttgaacaaggaaatactgaaagccacatatgagaactgcaaggtcttgttaagatcagaccttatcaaatctagtcccgaggagcgctccttgctaaaaaacctaggcagttggttgggaaagttcaccattggtaggaatcaggcactaagggctataaggagattgatccaaaatctcttatcgtggagggttaatgttactaaattctttcaaatgcctaaaaatttgttgccagcccatgtatgccactggtgtggtacctggaaaggtgataaaatatgtagtagctgtaagaaagcaagatactgttctgagaaacatcaggcactgcattggggtactggtcataaaaatgattgcctccagataataagttcttccgctgcttcaaattcagttttgccaactgttggaaaagttcctgctaacacttcttggccagaatttgagataaaaatagactatgaaggtatatttgattccgatagtggtgatgagaataactcgaagttgttggtgatgcaaagacatgggaaacctgatgctatgatgcagtcatggatggatcaatttgaggttttgggtccattttctttcagaataacctctgttggacttctgcttatgcatcaatcattatatttatttaatgctgtctgggtaggccgattctgacaacaaatgctggacatcttttcaagagcgggtctcaagagcaccaaatcaagtgttgaggtattgtcgagaaccaaatgctaaacctctctgggcgttatcttctgggtgtccatcaaatgctgatatcccatcatgtagctactgtaaagatccattatgctatgaatttcaggttggccaaagttcatagaaaagagtattaagtattagtggcattgaggagatcaactataaaaatatatttcataaatgtatgagttgaaaatgatgttcatctattattgtaaatattattattctctataaatttgccaaatttaggatagtttgacgtagagcaactcaaaaacattatatttcaggatgggtctatttattattaacatcttatgtctgatcaccattggaagtagatctggcttggggtatagtagattgaatatagaggtacatggggtgtacaatatataggcaaggatcaagtttgacgtcggcaacgtggtcacggtgactggcgggaggaacaccgggcgtgtaggagtcatcaagaacagggagaagcacaagggcagctttgagaccatccacgtgctgcttggagatttttgctatgtctagttttctcctatttgttgtacaggaaaacatggaatagaattcaaatttggtggtcgcaaaagtgtggagactttaattcatacaaagttaggcttaacattagtgcaaacagttgtattttagtttagatttagagtacacttatgtatgcgttgtttgacaatgcttatgatatattgaatgat

SEQ ID NO: 36559 - DNA, 2272 bp, Zea Mays
ctgccaaagcgtagttctgcgacatctaaaggagtgtggaaggcggctgccttgtccgcccggcctcttccgtctcggagcgagaaatcagcggcatcgccgcgcgcatccgaagcgcacacgacaatgcagggcggatccagcggcatcgtctatggtggcctcaagtaccaggcacggtgtatcgccgacgtgcgcgcggacgccagctcgaccaccttcctcgccgggaccctcagcctcaaggaggagaacgagtaggtgcacctgatccggctttcgccggcggagagtgagctggtgtgcgatggagtcttctaccaccccaacgagatctgggatctcaaatcatgtcccttcgatcacagggtcttctccacagtctacacatctggtgagggctttggtgcgtcagtttggaagatcccagagcttaatgggcaatcaaactcaccgcagcttgagcagctctttgagcttagtgggcatacgggcaagattagacggtggactcctgtttctgttggtttttggctgctctagagatatttgatctacttactgtactaaattctcatatgttttgaatttgagactttgtgtccaacatttgttggatgaaatgcaactctgtggttaatgttccttcctgacccacatggtgtttatttgtagttacttgatgattgtggccgcacttgtgtgactgcattacttgttcttgcatcacttgttcactagtcactacacatgaacattgagataagagtatagttactaagaaagatgcaataaatgttctgtcctgtcttccatgctgcacctgtttcacattacaccagcacgttttaaacaatatacaaggattatgtcccacagtgctcatgaaggacataatggatgagaatattttatttcaacttctgctgttatgtctttctataatcttttaaactagtctcacttgctctatattcttaaaagctgctagcgatgtgtatcatctttattggttcttgacacctctaagctgctcattttgtagtgtgatctggtggccacttggaaagcatgataaactaattagcattgatgaccgaaatatttttctttggaacgtagacatgtcaaataaatcagctaaggtgatctcacagggatcagctgacatgcttccaaatttgagtggtggggcttgggatccacacaatcataattcaattgcttcaatatctgattcatcacttcatttgtgggatctacgttctatggaaaaatcatctgcaattgaacatgcacatatacgggatgtggattataaccccaagaagcaacacattattgcaacaacagaagatgactttggaatttgcttgtgggatctcagaatgcttaagcttcctctgaaagacctccctgggcactcacattgcccttctggttcacccaatagacaagaagaaccattacttaactcatatactgactatgaagacagcatctatggtattgcatggagctcccatgatccatcattattcgcttctttgtcctatgatggaagggttgtcttggaatcagtcaagccctacttgcagagaaaatgaatcttgctggtctaacttttggattgtaaggtgtaggatatgattcctcatttcctttatcttgtccttattgccaaagttatctcatgtcctaataaactgttctctgtccctgcagcctacaggcttgcttgttgtttatatttgatgcgttatagttttgccttatattctgtaccctcttgacaaccatttatgtgatgatgtgttttactgttgtagcaatggcagaaaaaacataataaggatgttgcagaaatcatcctgcttgacatcaggtcttcaaccctcttgattgaagccagcaatggctccaaaacactcagatctagcttcagttgagatattacagcacagttgagattgtcagcagtttcctttcctgtatcttcaaattttgtccactaggatttcatgttcagttgctagaaatttggctgtgaagatctgatctgtatgttaataactgttgcccatctgtctgaaatagttttctatacttgattcttaggatgttgtatatttgaaaagtgttcacaaaaagatattgcggtatatgatgaggtggagttggactgaatttgtaaaaccattcagaatttcaaattcccaggattagcttgttttatgaaatattctgttgcgcattgaaaattcggttcttt

SEQ ID NO: 36560 - DNA, 4343 bp, Zea Mays
ggtctcgctcgatttcgggggcgcggatcagacggcggggagcgaatccggggcccagttcccgcacctgcctccctcaccctccactccaccctcctccactccatccacctctccctcccctgcgccgctgttgatctcggagcaacaaaaaaaaaagaacaaggggaagaaatctcctcccccgtgctgttgccgtctgtttggcctcgaccgcggaccgcccgctaccatccaaaaggcggcggcaggctgctctgcccactcggtgccgttgtcgtcgccccagccagcgggatcttgctgctccaccgccgcctgccgctgttttcctccattcagctcgcgcctgctccagatatctgacccgggaggcggcggcggcaggcaggcagggagccaacccgggagaagaaggccagggaagatctccgaccctttctttcttgggtccatccgggggggccgcggggcaatcaccattgtttcctgctgtcgccttttgatctggcgtggacacccttgcccggcaatgagtgttcatcacttgagctcatatcatcgtcagaggcaggcagcagtaagcagattccgctgttgctgagcattgtcgtcgtgggcgtggcaggccagttcgcgtggagacggggagggaacatctggtgtgcgtttgctaaccggggggcggccggcgggtggaggcgaccaggcgaggactgctctgcggcggcaaagggtttcaaaatgctggcgtgcatcgcctgctcggccaaggacggcggggatcaggacggctcccgcgccgccacgccccacggaagggacgccggcaagtccctcacctcccagctcaaggacatggtgctcaagttctccggctccggcaggcagtacaaggccgcggcggcgagcccgtcgttccggggcaaccgcttccaccgcaacagccgcctggccgcgtacacgggcgtcattgacgactcgggcttcacgtcggacggggccaccgagggctacggctacatgaggacgacgacgcacgcgaccggcgccaccgcgggaaccaaggtcggccgtggcttcccgcagcacgtcaggagcccgagcgcgagctggataccgagcatcggggaggaggacgatgaggaggatgaagaggttgtcgtcgttgaagaggaccgcgtgccgcgggagtggacggcccaggtggagcccggcgtccagatcaccttcgtctccaccgccggcggcgctggcaacgacataaagcgaatccgcttcagccgcgacatgttcaacaagtgggaggcgcagcggtggtggggagagaactacgaccgcgtggtggagctctacaacgtgcagacgttcagccggcagcagggcgtctcgacgccgacgtcctccatcgacgatgccacgcagagagactcgtcgttctactcccgcgccggctcgacgagggacagcccggtgatcctgccgccgacagccgtgggcagggagcagccgatcgcccgcgccacctcgtgcagggccacggccgcggcggcttccacggcccgagccgcgtgcaacccatcgtccagtgcggtgccggacccgtcggaccacgtgtgggcgcaccacttcaacctgctcaactccgcgccggcgccggcaccggccgctccgcacctcgacccgtcgcgcgctaccacgtcgtccctggacgaggcgtccgtgtccgtgagcaacgcgagcgacctggaggccacggagtgggtggagcaggacgagcccggcgtgtccatcaccatccgcgagttcggcgatggcacccgcgagctccgccgcgtccgcttcagccgggagaggttcggcgaggagagggccaaggtgtggtgggaccagaacaggaaccgaatacacgcgcagtacctgtgacgtcggactcggagctagctgttgggtgtgcagtacacgcgttggatggaagccaagccaccaatccatggacaatagtagcgtagggctgagtcagtgatactattgcgactactgtctactagtgctagtttttacagggtgaacagaggtgaaagaggtccacggaatggagcctgtgtaaaacatgtttgctactactactgatctgggtttgtgtgttgatgaccaatgtattttttttcttgatgaactaatactgttttgtgttgatcgcctcagatgaacagtgctcacattttctaatcgcgggcacaaacaaatcacccacaagacaccaagcaagctaactttgaccatattggataacattcactttccaattacaaaagaaagcaagacaaaattcttcagtgttgcgttttttactagtgatgaggaaacgtttgccatcgttacaagacgtgcgccaaattggcacctcactgcgttaaatgtgcattcaaaccaaatgtgaaatgtccatcccttgttgggctcaaggatttacaagctgttaaatgtgcatacagtttgtgacagcgatattggtgcaagataacattgcaaggcaaaccaaaccaaattaatagcacaatcatgtttattaaaacatgggggcaagcttttcgcaggaaaaaagcagatcaaccgcccggaagtggggaaggcttgatgcaggctctagcacttcacaaaggaatttgcaaacccattctaatatgtctcgacgcagcgaaactgtggtgatggcaaatccgcacaaccatcgatgggcaaacgctcaggctgactatcctcttcgggcacactggtttctgcacactatacacaacacccctcctgcagctgatcgaattttcactccacataccctcatttagctgaccaattttcttgtcagcctctttgctggagggatatcgtcagacttcccaagaaagtccgacttgccatgtccggccttcatcatgggggcagcaggcttcacagcgctccgtgttctagaggtcacagacatttgggatagtttctctgtaattgatgagaccttctgtattgctcctcggccagtttcaggcaagctccgtgaatgcctaagtacaggattccctacaattccaaaggaaaaaaagttctaaaaaatcaaaacccatttcgtgcaaggagttgggcaatgcaaccctatataggaaacttgcctgggctattccgagctggtacccgattcgtagttagtttattgctagtctcggttggcttcatacccttttgggatggctgacgatccaaattaagttttctttgtacacctgtaatgttggtagcaaaatagacaatcaaactaaaccctataaatcttgcttgctccagcccaattaaaacagataagacacgcaccagtcttagataaaccatttaattttgcggatgcattgctatgagatttcattgtagatagagttccagttgagaatcttctagccacactgttctctgaatttccttttgatccaactaaaacaaatgaaccaagcacatgtaaaacaacaatatcctaaatgaattaggtacaaagcagaatactagtctgttaactaaccacatggaggtgttctaggaagtgatgaagcttttggacggacagggagtggaacacatgtacaaccctaaaagttggcaaccagaaaactgattatagttccaaggagacaataactgaaccttgccaataaaaatagagtagaaagaatatactattacctgaaaaaaggtatgctggaggacttctgcggcctttggtctcttgctaggatcccatgagcataaacttactgagatgaggtcaattgcatcgctactggctgttgtcatcacctcggccagttgactgcctttgatctgcatggatagaagaacacaccctcaacattagatcaaatattaaccagtcattcaacatgtatccacattcacaatgaggtggcaaaaggtacaacaattcatccttttcaggggagtacaactattggtaatcaagaaagagaatgacataaacagcataacactgatggggggtttggcaacaagtataagggtaataggatttgaatgcgctgtagcaaaatggataaggactagagaaaaacttagtactccctccatagaaataaggactagcaaaaatggataaggactagcaaaatggataaggagtatgaaataacagattctaacaatttaggatgatgtgtgtagtgtactgtttcatttgttgcagcaaacaagttcctaaaagaaagtatcaagaaaatcatgacaatactccctccatcgaagaaaactgagtgtcttaaacataatcttaatcacttaat

SEQ ID NO: 36561 - DNA, 1678 bp, Zea Mays
gatctagccgctcgacgctagagacgacgacagccgcaatcaacgtacagaccgtgttctgcgtgacgcatcccggcgccgacgccgaggacccgcaaccgacccggcagctgagggagagcttcatctccagcgagagtcgcaaaccctccatgagttccccattccccaaccttctgattttgacgccgggtcgtgggcaaatcaggtagagcggctgcggattttggcgcccggcctcgggagtttgggagcttagcgactccacagtggaagactggtggacggcctttgcccgcgctgcgtcttcccctgcttcgcgatgggaggctcccctgtatgggacgggactctgtctccggacagcttcaacacctccgcggcggcgcttgttaagaggtggaaggagatcgaggtcgacgattcccttcctgaatggacgtggaagccgtgcagcaaatttgggggtgccgtcggaggtagaagggtatctagccctggaaagagtgtaccgcagctgtggaacaagccaggagcagatcgaagagatgaagttcgatggtgcaggggatgtagcttgggtaaatgtttctgtgaactgcttattgataaactagccaagtctgatcttcatctcacccctgcacaacaattagagttcatataaaggcagcagctctaaattgggtgatgattttgggacatacagtcttgtactgaattttggggacaagacttggctcgtatcgatctagtatctgcacacctcacacaactcgagctctgaagtcatgtccatggttcattccctgcaggtcgagagctccagcgacaatgttcatgtttatgatttccatgctgtctacagcttctcctacaaagtcccagtgctatactttcgcggttatcacactagtatgtgggcagctactaactctagatgaggtaaaagagggtcttccttcccactcacagaaagtattaagtgaatcaaagtggacgtttattactcaagaggtatgcctgcttcatgcatgatccttgatttctattgaaacagaaattggctcttgagtcttggcagtgacacgtagaacgaactctggcctgtcgtttgctaactgtgcaaggattgtgttctacctggacttggaatcctgcaggagcacccccatttaagcaagccatggctggccctgcacccctgtgcaaccagtggttggatgaagctacttctcgaagaaactgaagcgactgataaggagcactcggtgcaatatttaccggcatggttatccgtggttggccaggcagtagggctgaaaatccctcttgaacttcattccaactcttagtttttttttcactttttgtatgtctttcagtatgtagcagggattgaaagagagtcctcagcttgtgtttggtgataatagtcaccaatatttgtgacactggtggctagaccttgccatcgtgtcattgttgtggtgactgtatactttcattcaatctgctagcgtttctgttagacaccctcgggggtatgaaacgctagcgttttaggaaattcatctactcttggtttgtgttttggagtaatctcctggttgaaccaaggaagcaagaatttctctgtttttatttgagagatgctaggataagctttctatcccac

SEQ ID NO: 36562 - DNA, 2194 bp, Zea Mays
cggcccgcgagaggggatggcgtccacggctcgcccgctccgctcttataacagccgcttcctacgtctctcgcgcatcccttccgagcggaagcggcagcccgtcaggttatagctcactcttgatcgcttcctggtttgctaagcgatttgcctctcgtggttcggtgacggatcggaggcgctgcgaattcgaagctggtttctctgggctaagtcgattcggacttacttgttcagtaggtgtagtgtaggcgtgtagctcgatagacgagaagaatatttggcgtcgaagtttcagctaagcaacgagatcaggaagtttcagcaaagctcctggattaaatatttggcatcatagaggattcaaatctgccggaaacctgtatcttcatccagtatcaaggggaagttctgttgttgtgtgttcggtgatggatacatccaaaagcaagcaaggaccagaacatctccttgttcttgtccatggtatcatggctagccccaaagactggacatatggggaagcagtgctgaagaggcggttgggtgatgattttttcatatatgctagttcaacgaacagctacaccaaaacctttgatgggattgatgttgctggaagaaggttagcaaatgaagtcttggaagtggttaacaagatgcccagcttgagaaagatttccttcctagcgcattctctgggtggtttgtttgctagatatgttattgcaatactccactcagtctcagtggaaacaaagaatgcaggacagagtagtgcacttattgttcctacaacaagagggccagcaaaatcgagatgtgcttcaggattaggttctattgctggattgcggccaattaattttattaccttagcaaccccacaccttggggttagagggagaaatcaggtgcatcaccaaaatgtttcggattacgtttacaaaatatactgcacattatccagcaaaggctcgattcctgggaaaacgaactctctatttgttattttgttcattcatgtagattttgaagttgcatggtatgatttttacaagcttggattatatcattgctgaagtggtcaataccaactagcatctataacttttgaggaaaaaacgacgaacttattgggacctgttcctgttagtgctgatcaatttctttgacacatgcttatatgtttttcccccgaattaccagcttccgtttcttcaaggcctatcaatcctagaaaagcttgctgcgcctttggctcctttaattgttgggcgcaccggtgctcaactcttcctcactgatggtgatcctagcaaggcacctctcctgttacagatggcatccgactgtgatgacaaaaactacatatcagccttggcagcttttaagaaccgtgtcctgtatgccaacgtctcgtacgaccacatggtcggctggcgaacgtcttcactaaggagagagaagaatcttataaagccctcacatcgttcactggatggctataagcacattgtgaatgtggaatactgttcgcccgtgtcatcggagggcccacatttcccttccaaggctgccagagctaaagaagctgcacagcgatcgccaaaccgagaaaataccgaggagtaccaccaaatgatggaggaggagatgctccatggcttgcagaaggttggctggaagaaggtggacgtcaacttccattcgtcattctggccttactctgctcacaacaacatacacgtcaagaacgagtggcttcacaatgctggcgctggtgttatcgcgcacgttgcggacagcatcaagcagcaggagtcacggccatgtcttcctgccaatctatagcagtagcattcagcaatccatttgttcaaattatctgtcgctagcaaataaacccatgaccaaactctgttcgtcagcatccactgagcggcgaaatatttgggactgggacacacaataagctgtgtatcattatcggccgcctaggttttacattgtttgatgtcaattgtcaaatggcatgtgtttcctcatggaacagacgaagcattcgaagttgatataaagacaacctaaattgtcatatatgctaccgatggttcgtacccaatccagcgacgacgtcgatgagatttgggttagattgtttgggagccacaagccccttgcaaatcgc

SEQ ID NO: 36563 - DNA, 1948 bp, Zea Mays
tctcaaacggtgttacctattgtagggaatgtcatgcctaggtatcaagtgggctcgacaaagggtgattcaagtagtagacgacactctgaggagtggcggcaacctagcacagatgatgtgcgcatgagcaagccggggtcgagatatttcacggcgtttggggtggatctgtcccctgataatatggcagttgccattgtatattttgtgcaaggggttttaggtcttgcacggcttgctgtgagcttttacttgaaagatgatcttcatctagatccagctgagactgcagtggtatctggtttctcgtccttgccgtggctgatcaagcccctctatggctttatcaggtcatatctttttctgtcagggttacttggagcactttcatggagcttaatggccacagtagtgagcagtaaatacagcgcagcattctctattcttcttggctcactttctgttgccttctcagatgttgtagtggattctatggttgttgagagagcccgtggagaatctcaaagtacatctggatcactccagtcactctgttggggatcttctgcctttggaggaattgtgagtgcttatttcagtggttcacttgtggatacttatggagtaagatttgtctttggtgttacagcgtttttacccctgatgacatctgctgttgcagttcttgtaaatgaacatggcattccttctggagaacacaatacctttctctctggttccggatttgttgagagctctaagcagcatgtcaggcagctttgggcttcagtaaagcaacctaacattttgttgccgaccttgtttatatttctttggcaagcaacaccgcagtcagattctgctatgtttttcttcatcacaaataagcttggattcactccggagtttctagggcgcgtgaagcttgtaacctcttttgcatccctgcttggtgttgggctctacaactattttctgaaggaagttgctctgaggaagatttttcttgtgacaaccattataggttcagctcttgggatgacacaggtgcttcttgtaactgggctaaatcggcagcttgggatcagcgatgagtggttttctattggtgattcattaatcatcacagtccttggtcaggcatcgtttatgccagtcttggtgttagctgcaaagttgtgccctccaggaatggaagccactttatttgcaactttgatgtccatttctaatgctggaagtgttactggtggtctggttggtgctggtctaactcggatatttggggtcactagggatacctttgggaacctacctctgttgattgtcgtctgcaatcttagttcattgctgcccttacctcttttaggtctccttccagagggatcaggtgacaccgataacggagaaacaaaaaataactgatttactgagggttttatctccattgttctggtactcaagtatagcataccacagtgcccagcttcaactcagatatggcccatcgagttgaaattcaaaaggccagtagagaaatacggaaatcacactggatttaagttcagtcggtcaccgccatcatcaggcagtatctcctgtgactattaacctgtgtgatggaagtgattcattgatgatctgcaaatgatctatggcgcacaggtactcacctctttttagtttctaagctaccttgtacacgaagacaaggtaggttttatctttctctagagtctttgagtttttgttgttaatgcgaccccatgaaaattagactagtggtcaaaggctattaattggggattaccttgcgaagtcaaatgtattgtgccaaaaaaaggagggagtatgtatacattattggaaacctagagtacggaaatgtaaagaaaaatacttgcacacagtttgacttgtcgtacagtgtcaggttctgcttaca

SEQ ID NO: 36564 - DNA, 1104 bp, Zea Mays
tgtacagtgttctccatatgaacaagggtctcataaaggtttacactagcatcaagataagagtcttttttcgtcaaggtcactgagtggccatctggggttctcacttcatatataccttagtatatagataatgtcgtaacgcatgagcacttagctattattaataatttgtgagccgttgcaacgcacgggtacctatctattatgatggcgaggacaactccattgccgctaagagtcaaatcaaggtagagaacttgggaaatcaattggttcaacaaaaaggaaagcccaagatagaagtgtatgaaaaggacaggaagaagggtgctggggctttaacaactcatgctagggttcagtaatgttcttccaatactactagcatatgttcaaagtcaccaagctcctgacaagccagttctgtggattacccataatgcaaaaagttttgatgtccctttccttaaccaagagtttgacagaagttcagcccaggttcctgaagatcatttggctatttgtcgatagtctttgttcagtgaaaaagtcgaagaaaacaaaaggaggatgttgttgatgagatgacttcatttatggctgcatgcttggtgtcaattaaaaagaccaaggacctgccccctgatcaacttcaaaaagcgcttaggaagacgttttcagctgaaaagaagaaaagtaaaatccggaaggcattggatggaactaaagtcatttataatgttgcttcatggggcgccactgctgttggggtctacaataatcgagcattacatacggtcgcaactacaacgttttagacttcctgccgtgtgatatccaagttcctttgaatattgtgtcaacaactaaggcatgttagaattgcttgcgtgtgtgctttttcattgttcagcagcataaagcttgagaccatttgtttagtctatgcagatgagttcgactgctaattagcagcgcctcccagtcaaaagcagcatgtgtattgtataactgtaaatattgccttgatttgaacaaacttgttttttgtgctagaactttatttcacgaacttcatatgatagaccctactgtagagta

SEQ ID NO: 36565 - DNA, 3442 bp, Zea Mays
aacgataacaggccatccacctcatcttccatatcacatgggacgtctccacgaagaaggcttgcttctgatggcataagtggtgtaaccaaaggcatggactttggtgattacgctaacaggccatcaacctcttcagcggtctcacgagggatttcaccaagacttcaattagcctctgatggtgttggcactgtatcaaaaggctcagatcttgctgatggactagacaggccatcaacctcatatgcaacaccgcgaggtatgtcaccacgctgcagggttgcatctgatgccatcaatgtcacttcagaaaggatcaagttcactgaaaaggattccagaactgtgtcctcctcagttgcacctagaggggtctcaacattaagacaacttgcctctgatggtgttaaaaccatatcaaaaagtatggatcttgttgagaaagacactagacctactacctcatcagctgcatcacgagggctttcaccaagaaggcgactttcgtcagatggtgtcaatgtgattataaagagcatggatcttgttgaaaacaataacaaacttgtcaccatgtcagctgcagcacgaggggtttcaccaagaagacgactcgcctcagacgttagcaatgtgatatcaatgagcattgatctcattgaaaacagtaacaaacccttagccatgtcagctgtagcacgaggggtttcaccaagaagacagctcacttctgatggtatagaatgtatatcaaagagcacagacattactgaaaaatgtatcagaccttcaacaccgtcaacttcatcacgagggttttcgccaagaagacggctggcctctgatggtatcaatgctgcattgaacaaagaatttgctgacaaaaactgtagaccatcttcctcatcagctgctttacgaggggtttctcccagaagcagggttgcctctaatgccatatcaacaggcatgacttttgctgaaaaagacagcagactgtccacagcatcaagtgcgtcgtgtcagactctgcagagcagtaggcttgaatctgatggtgttaataccctatcaaaaggtgtggagagcccgtcaactgcatctggttgcatttcagacagtaaacttgatgacactggtgctctagtaaaaaacatatatgttactgagaaacttattgtgtcaacggaatacggtggtgatggttacgatccaggaagaacagattctagtgacatagctactagtgcagtctcatcatcccttgcatctcaagagccatcactgagacctgttactgatgatgataagaatgcatcagagaatgttgttgtaaaccaaaaaggtaacagaacattgacggtgaaggttccatctcgaggagcttctccaacaaggcgacttgcatccgatggcactgatactatatctaaaagcatggattttgctgaggaagataagaaacccatgacagttccatcacgtggaatgtcaccaagaagaacggcgagatctgaaagtgctaatataatgtcaaaaattatggattttgctgatgaatgtaatggaccagtatcttcaatggttccttcacgagtgttttctacaagaagagtactaggaccagatggtgttaatgccatgtcaagaagcatggatctaactgataagaccagacagcaaatatctttaactgtgcaaccatccagagtttcaccaaggaaaacgcctcttgcttataacagaagaaaaggccctgaaattttatcaggtgatgttgagagccctggttctgctgatggaaatgaaggtcaagaggagaatgccagttcaagtccagatggaccttcaaataattcagaaaaatctacacctccaaagcagttagctaggggatcatcatcaccatcacgtgttttaatacgcccttcatcaccatccaatgcttcgtcgtcaccatcatttgcctctaggagattaccaagcccatcaaggactagaccctcaacacctgtctcaccatgtagttctgccagatctgattcaggctcttcaattcttagctacattgttgatgctacaagagggaagaagagcccagctcacatggaatatgtccatcagttgcgcctcctgcataataggaacttacaatggcgttttaccaattcttatgttgatgaaatgctgtcaattcagaaattaagcgccgagactatgttgtacagtgtatgggatgctaactcaaggatgtgcgacaatatggttatgaagaggagctatgtacaaagactaaggcaagaggtcaaattgggaatagtgttgaaggagcaaatggattaccttgatcactgggcagcgctgcaaacagagcattcttcttctttatccagcgcaaccgaagctattaaagcaagcacattgcgtcttccagtttctggaggggctaaggctgatgtacttactgttaagaatgctgtcagttcagcagttgacattatgcaagcgatggggtcatccatttgccatttgctatcaaagttacaggcttcacactctctggttacggaactttcagctgttgctgctaaggaaagtatcttactcaatgagtacagagaactcttggcaacagcagcagcactacaggtccaggagtccagcctaaggacacagctcatacaacagacagagtgagcaggttaaggtcctgtatgtatttctgactaggaagattagaggtagcccatatttctttgcatttctactcccccatgttcttttgtgttcgaacaacttacatggaagagaagggaagcaacacgaaatcatggatttccatgacaaaggtgccagtgtggtcttttattgcatcctagaccaatgcaatgcgcccaaaaactgaaagctttgttgtaagctgtaaaccttagcagttatgtgtccttaagtgtaatgcctttagatgtatctttcttagatccgccatctccttagaactagaggctccagttaacaggttactcactatcattgctggtttcaaatctaagcaaagggggcgaccagaatcttctaaccgacacttcagagtagacaacagtcatccaatactgacctattcaaatttgttaccgccggtactcagagagtgaaccattaccatttatgttatattttatgcggtagaatgagactggctggtttaggcctcaggacaccattgtgaactgtttaggctgatgggaagctcctattaattctcggtcatcttttagcttcggctatgtattttactgtattgatcgtaccctttggtgcagtcaccattctgtcaggagctctactttgagggatctcatctgtcctttttccctctacctggctcaatcacacaatgaaatggtcaaatggaaatgcacgtacaagtttttttttt

SEQ ID NO: 36566 - DNA, 1476 bp, Zea Mays
atggcaaagttagtgggaacagctaatgtgttgtgtgaatcacttaatacctttgttagtaacactctttttctccttttctttgtttttcttgatcttttacctttttttggagcacagagtgcaattctggctctggatgatactgttctggatgctgaccaggtggagaaccttattaagttcactccaactaaagatgaaattgaacttctaaagggttacaaaggagacaagcaagttcttggagaatgtgagcagttctttatggagcttatgaaattaccacgtgtagaatctaagctgagagttttctcatttaagattcaattccgttcccaggtttctgaccttaagcggaacctgaacattgttaattcttcagcagaagagatacgaggttcagtcaagttgaaaaggattatgcagacaattctttctctcggaaatgcattgaaccaaggcactgctagaggttctgctgttggtttcaggttggatagcttgcttaaacttagtgacacccgtgctcgtaacaataagatgactttaatgcactatttatctaaggtgctttctgagaaacttccagaacttctagatttcccgaaagacttgtctagcttagagctggcagcaaagatacaattgaagtctttagcagaggaaatgcaggctgtcaacaaaggactcgagaaagttgagcaagagcttactacatctgaaaatgatggtcctgtgtcagagatcttccgcaagacactgaaggatttcctcattggtgcagaagctgaagttaggtctttgacttcactttattctaatgtgggccgaaatgcagatgcgttagcgctttattttggagaagatccagcacgatgtccatttgagcaagtagttacaacactccaaaattttgtgagattgttcacgcgttcccatgaagagaactgtaagcaactggatcttgaaaagaagaaagctctgaaggaagcagaagacaatagtaaacaactggaccttgaaaagaagaaaacccagaaggaagcagaaacagagaaaataaagaagaaatctgacagtgagaaagcttgtaagaaagaactggaaaatgataaatcttctaagaaggattcagcaaatgagaaaggcaagcttaacaatcccatcaaagagctagatatatcacttcaatcacctgcacaaactgccagtgccaaatgacgaccgtaccagatgaactaacagtagcttttccgaaagaggaaaactagttttggctgctcccaacagtgcttccttttgacgaatcatgcaggataaggaagccgaaaactgcacttttaatacgttctcaggggattgtcgaagaaattaacctggcgacaagctgtacagatctgacataataatagccttttcttttggggttgacccctgcttggatggtttattcgtgtaaaactccaattgtgc

SEQ ID NO: 36567 - DNA, 1730 bp, Zea Mays
ctccctatcctgaaacgccaatccgataaaaagcgcgcaccggcgtggcgcgcttcgcccccaggagccccgatcatctcccgctcccttccttcctcctcctcctcctcatggctctgtcgtccgccggctcgttcgtggcctgcagcctccggccaagcggagctagcatccatgccccgaggtcgccgccgcacctgaagccgggtgctgcggcggcgtcgttcacgaggacgccgcagcgccgggcgaacgcgaccaagggcggcgtgtccaccgtgtgcgagccgctgggccccgacaggccgatctggttccccggcagctcccctccgccgtggctcgacggaagccttccaggagactttggatttgaccctctcggactaggttcggagccggagctgctgcggtggttcgcgcaggcggagctgatgcacgggcggtgggcgatgctggcggcggcgggcatcctggtcccggacctgctggcgcggtggggcttcatcgacgcggggttctcgtggttcgacgccgggtcccgcgagtacttcgcggacccctggacgctgttcgtgtcgcagatggcgctgatggggtgggcggaggggcggcggtgggcggactacctgaggcccgggtgcgtggacatcgagccgcgcttcccgaaccgcaagaacccggtgcccgacgtggggtaccccggggggctgtggttcgactgggccaactggggccgcgggtccccggagcccgtgatggtgctgcgcaccaaggagatcaagaacgggcggctcgccatgctcgccttcgtcggcttctggttccaggccgtgtacacgggccagggccccatcgacaacctgctcgcgcacctcgccgaccccggccactgcaacatcttctcggcgttcacgtcccactgatccgatcttgcttcggagctggcggagagactgcgaaggattaaaaaaaagggcatcctgttgagggagaaagaacttcgcttggtcggtatcattttggccttgctggacatgtcaacattttgtttgtagtacctgcgtagaaatgtcaaaccacctgtacaaacgtacaaataccaccccagggatcgcgatgatgctagccagcagtccagcacacactagcttgtcctgaagatccatgcaacaccgtatacagaggaaatttatggacacggcaatgtaaacatcccccatatcctcgtcgtagcataacggtgtcatctacaatacaaatcctttatttattttacacgatatactgcggacaacattagcggtgttaaggtgattgggttgctaaaattagagggtgttgcttgaggattaaagctagtttgggagtcaaaaaaaccgaagcagatatgagggactagaatctacacattcaattttgtacatgcagccagtaaacaggagtattgacgacagtggacttgttccgttgttcgtaaaaaagaaattatcatccagagaatacgtgggaaataagcaggaatacataaccaagatatttgccaggccatcatgcaaatccttggagttggcggccacaaagataggagtttgttgtaatcttttcctattatttagaataagttagttttatatccagttagagacgggatatataagcactattgtaagctgcaaagacgagagatcaacagttatcattttctttaatctactacatattccttt

SEQ ID NO: 36568 - DNA, 2589 bp, Zea Mays
cgatttcttccattaagcggcctgcttcgagttcgagcgtagcttgcgtagggaacccccggttgcttgctcgtcagtcgtcactgtactagagtccagaaaccgctggaactttacgtagtaaaacaaaacataacaacacaggtaaggtgagcacagctaggagtttcgtactagatcgatcggtagatatggcgagcatcggcgtacgggattgccgagccgtgcttcggccgaattggtggatctggtgccctgaagtttcggtacgatggagttcaccggcaccaagaaggacgtcgagatggccgggcagctgaacaccgagctgtcgtcgagagaacacgcgctcccggcgctcctgatcaaggttccgtcgcaggccatcgccggcttcgactgcgtgcccgccgccgccgacgccgccgtcgtctccctgaacgagccgggtgacagggcggaggacgtcgccatcagcatcctccccgcgccggcgagagcctacggcggcgacgcgcacggcgtcccgtactccgtctcgctcagcatgccggcgtcgccgtcggggttccacctgtcgtcgcacttcatgtgcgcgggcgacgcgcccgtggcgacggccgacgtccgcccggtgctgctggaggatcagcggcaggcggcggcggcggcgcactcgccgcggctgatcaagcagacgcggttccactcgcagcccatcctcaacctgcacccgccgtccaagaacgtcgtcgacgaggctgcggcacggcggtgggacagcgcgcgcgacacgcggttcgacccgttcaagaccttctcgggccgcctcgagcgccagctgtccaacctgcgcggccgcccgcaggagcccgtcgacggcatatccccggactccaagatctccgaggaggagaccgaccaggtccccgccgccgaccgctacttcgatgccttggaaggccccgagctcgacacgctcagagccacggaggtgccggtgctgccgaaagacgagaagtggccattccttctgcggttcccgatcagcgcgttcggtatgtgcctgggcgtgagcagccaggccatcctgtggaagaccctggcgtcggcggcgccgacggcgttcctgcacgtgagccccgcggtgagccacgcgctgtggtacgcggcgctggcgctgacggtgctggtgtccggcatctacctgctgaaggtggtgttctacttcgaggcggtgcggcgcgagttctaccacccgatccgcgccaacttcttcttcgcgccgtggatcgcgtgcctgttcctggcgctgggcgcgccgcggctggtggcggagatgcaccacggcgtgtggtacgcgctgatggcgcccatcttctgcctggagctcaagatctacgggcagtggatgtccggcgggcagcggcggctgtccaaggtggccaacccgtccaaccacctgtccatcgtcggcaacttcgtgggcgcgctgctgggcgccaagatgggcctccgcgagggccccgtcttcttcttcgccgtcgggctggcgcactacatggtgctgttcgtgacgctataccagcggctgcccaccaacatgacgctccccaaggagctccaccccgtgttcttcctcttcgtcgccgcccccagcgtagcgtccatggcctgggccaagatcaacggccagttcgacgccggcgcccggatcgcctacttcatcgcgctcttcctctacatgtcactggcggtgcgcatcaacttcttccgtggtttccgcttctcgctggcgtggtgggcgtacacgttcccgatgaccggcgcgtccgtggcggcgatcacgtacgcgacggaggtggacaacgtgctgacccgggcgctctgcatcgggctgtcgggcatctccaccgtcaccgtcgccgggctcctggtgaccacggtgttccacgccttcgtcctcagggatctcttccccaacgacgtgtccatcgccatcacgaggaagaagcccaagttcagcaagatcctggcgcacttccgctcgtccagctccgacatgaaggagctcgtgctgtccctccccaggacggcgcagtctgactccggcgaaaccgagaccgagccgtccgtgaccgccaaatcccgagccgagccgtgagtgactagctcccggtcgcggtctcgttctctcatgtatagctgctacatcccttagctagctgcacacagagcgaggctactgtatagctactacgacgaagaagtcgccgataagcaagtgtgcagtgcaggcacgcgtccatcgatcggcctaaagcggctgcagcagtcggtcggtcggtcggtcggcgtggattaaatgatcggacatatacgaagggtgcacacggccggtatccttggagcattcctagtgatgatggggatatgatgacgtgaggaaaaaatatatactactcctaccactagtagattgattaattagtttgtataaatctacgtaccgacatattataagtagcttgtgtggactatttaagtaaaagaataaaaaccatgaacatgctctatggccttcaaaga

SEQ ID NO: 36569 - DNA, 3594 bp, Zea Mays
cccacccaaccgtaccctcccgcccctctcctcctcctgcaccttcgccggagcaccaccccctcgccgtcttgcgcccccgcctccctcgcacatctcactccttaccgtaccctccgcctacctctgctccccttatccatcctcgagctcacctgccgcgtggatcgcctcggcacattttgcttcttattatttttttttacctccccgcctgagcgttagctggttggcggatgtacgtgtcctgaccggagatgaagattcctctgtcttgaggggttgatctcggggagccgcctttagtggccggccgtccttggccccgccgcgtcggccatggacatggagaggggggcgggaagcgagcaggggtcgcccgatagcgaaatgggcgaaggcgacaacgatagcgtcggctacggcgcggagatggaggtggacgccgggagcggctcggctccggcgagctcggcgtccgcatcggcctcggtctccgcgtcggcgtacgcggcgcgcgccggcgccttcgacggggtcgaccctttcgagggcatggagttcgacgacgaggaggacgcctggacgttctataacgtctacgcccaccgcgtgggcttcagcacccggatcagcgtcatgcaccggtcgcgccgggacggctccgtcatgtcgcgccagttcgtctgcgccaaggagggcttccgcacttaccgcgggaagaatgaggtttcccgtgctgatgccgcagacgctggcgacgacgatagtgggaggggtcggaggacacgcgctgtcacccgggttggctgcaaggccatgatccgggtgaagaagcaggacaatggccgctggagtgtgactaagctggagactgcacataaccatcccctggtccccacgaaccaggcacactgcctgcgtccgcacaagccactgtcggagtgtggaaagcaccgtccttttgggggccatcgaaatggcggctcgcttctggcaattgagccaccgccaccacctcttacgccgcctgtgcctcacacaagcgtagctcaagtggttcctcagtatttttcggatggtatcgggaatgccactagagtaattttggattatgtcaaacgcatgcaagctgaagatccagcgttcttttatgccatgcaatttgttgaggggcgtccagtgggtaatgtgttttgggctgatgcgagggctaggacgacatacaaagactttggagatgccgttgtcttggatgactactgcaaaaggagcaagcatgaactgccacttgtcgcttttactggagttaatcaccattgccagccaatcctatttggctgtgccatcatggcacataacaatgaagtatcctttgtttggttgtttgagacatttctcttagcaatgtctggatgccaccctacatctcttattatggagcatgataatgttttaaaaccagctgctttgaaagtatttcctctaactaggctccagttttgtaagtggcacatcatgaacgaagcacatgataagctgtcatatctcctagatgcatttccatcattccatgacgactttattaattgcatcaatatgtctgagacaataaatgagtttgaagaaaattggaaggcattaatttctaaggccagctctcaaaaaagtgaatggcttgacttggtgtacaattgccgtcatcattgggtcccggtatatctgagagatacattctttggggatgtgtcgttaaagctgcagtgttctagcaggagttcgttgtttgaaggttatattagtgccaaaactgattcacagtcattcattcagcaatatgaaaaagctttagactgttgttatgagaaggaggtgaaggaagaatttgaaacaaaatattcacttccggatattaagacatcatctcctatagaaaagcaaggagcagagttatatacgaggtcaatgtttttgaaattccaacaggaattgatatgtgccactgcttacactgctgaaatggtgaaagaggagggcaatgcttcaatttatacagtggccatatctgaaggaagtgagaagtctgtaacagttcagttctgttcttctggaagttctgcgacatgtagctgtcggatgtttgaatattttggtattgtctgcaggcacatacttactgtgtttggtgtaagaggtgtctctgcacttccttctcattattttgtaaaaagatggacaaagaatgcattggatagaagcttaggcaagaatgttgatgaagttagcagagaggagctcaaggaggagccaagaagtagcgctgaagatggtgagcaatccctgacatggcgttacaacagtttgtgtcatgaagcactaaggtatgctgaagagggagcatcatcattagaggtttatattgtggcgatgcaagctcttcaagaggctgctaacagggttaatatggccaagagaggtattggacaggtagcaccattagcggtaatgccaattgcagcacaaccaccagaaagttttgcaagaaatcaggagattacttccaataagcaaaagaagagaaaaaagaattcaagtagctcaagggagaacgccacatcaaatcaacttatgtatgtgcgacaacctgttaattttctttttgttgctcctggttcatcaagtgctttacaagggcctagtcaactagttgctgctcctcctgtttctttgagtagcaaatatggacaaacatctggtgcaaataattcagtagatgacaatatacctcctgcttctgtagttgataagttttctgggttacctgaccaaaatgcaccagcaacttcaactggaaatctgcaaggtggagtaacaaaatccataggggctgattcacgaataaaagagagtcatgaattatcccaagctaatggtaacaggggatgcagtgtaaatacattaaactctagtgctgcgcgacagctcgtgactgtccctattggattgtgccttccacccactgatggctccgagatatctgcggcttgtttgaactctgtagactctggagatatcagtagcaatggcaagttatcacttggtcttcatcaatctcagtcatctgcacaacagccagctacaccgtcacagacaaaaacacttgacagtattgattgtcgtgcaaatcctgagggttcatctataagggctgcagccattgcagccggtgcacgcattggatcaccatctgatgcagctacaatcataaaagcggctcagtcaaaaggcgccatctacattaggcctggggaaataatcccgaattacctgaaaccactagcaccaaaaccactttcctcgctaccaccgatgaacccagggcagctcagacgatttggtgattctgctgccgcgaaggatgcaatcttcggttcttcggatggcacggacgatgacgacgaggaagacactgatgacgaggaggacgacgagctgactgacaacgatgcagaacatgaataatcttctccccctgcactaacctctcctaatggcacgagtgcaggacgagttttggaagctggagaagcaaag

SEQ ID NO: 36570 - DNA, 483 bp, Zea Mays
acccaacttattctgctttaacaagaccgctctgcgagctgtcatcactagttcccccacaggtccttgcactgcataagaaactgagggtttactgcatggtggcacaccccttgcagccgcatcttgttgctactggaactaatattggtatcatattaagcgagtttgacccaagagcacttccagctattgctcctttaccaacaccaacaggcaacaaggaacattctgctgtttacatagttgaaagagaacttaagttactgaatttccaattgtcaaacacagcgaatccatcccttgggaatgctggtgttgcatctgatgcaggaaggtcaatgaacaattcaatagaacagttgatagtaaagcagaccaagaagcatatcagcactcctgctccccacgattcctattcggtcctttcagttagcagttctggaaagagaatacctttctagggctcatcacaaggttctt

SEQ ID NO: 36571 - DNA, 1812 bp, Zea Mays
actcccgtcagccactcctctaccggtgacgcacgcacccaatctctgatctgatctctccccctggatctcgacctccgcctggctgctccgctctgcgtcgctcgccatggcgtcctcgacggggagcttggagcacggcgggttcacgttcacgccgccgcccttcatcacctccttcacggagctgctctctggggcagcagcggacatggtaggagccgcgggcgccgatcatcaggagcggtcgccgagggggctgttccaccgcggcgccaccaggggcggcggcgtaggcgtgcccaagttcaagtcggcgcagccgcccagcctgcccatctcgccgccgccgatgtcgccctcctcctacttctccatcccgcccgggctcagccccgccgagctgctggactcgcccgtcctgctccactcttcctcgaacttcttcgcgtcgcccaccaccggcgccatcccggcgcagaggttcgactggaagcatgccgccgacctgatcgcgtctcagtctcagcaagacgacagccgggctgcggtcggcagcgccttcaacgacttctccttccacgcgcccaccatgcccgcgcagaccacgtccttcccttccttcaaggagcagcagcaacagcaagtcgaagcggcgaccaagagcgccgtcccgtcgagcaacaaggccagcggcggcggcggcggcaccaagcttgaggacgggtacaactggcgcaagtacgggcagaagcaggttaaggggagcgagaacccgcgcagctactacaagtgcacgtaccacagctgctccatgaagaagaaggtggagcggtccctggccgacgggcgcgtcacgcagatcgtgtacaagggcgcgcacaaccaccccaagccgctgtccacgcgccgcaactcctccggcggcgtggcggcggcggaggagcaggccgccaacaacagcagcctctctggctgcggcggcccggagcactccggcggcgccaccgccgagaactcgtccgtcacgttcggcgacgacgaggcggagaacgggtcgcagcggagcggcggtgacgagcccgacgccaagcgctggaaggcggaggacggtgagaacgaaggcagctcaggcgccggcggcggcaagccggtgcgcgagccgcggctggtggtacagacgctgagcgacatcgacatcctggacgacgggttccggtggcgcaagtacgggcagaaggtggtgaaggggaacccgaacccgcggagctactacaagtgcaccacggcggggtgccccgtgcggaagcacgtggagcgcgcgtgccacgacgcgcgcgccgtgatcaccacgtacgagggcaagcacaaccacgacgtgcccgtgggccgcggcgccgccagccgcgcggcggccgccgcgccactgctgggctccggcggcggccagatggatcatcgtcatcagcagccctacaccctggagatgctgagcggcggaggaggagggtacggcggcggctacgcggccaaggacgagccgcgggacgacctgttcgtcgactcgctcctctgctagagggagaggctagagctggcgagggggatgcggagccggtccaccaatctcggtgcggcggcggtgtctgtagcctgctgtacgtgtacggcgggggtatacgtagcgtgcacgctcgccttcgcattcagaattcagatacgtgcagtatacacacacgcacgcacacacaacacgctgtgtgcaccggatctaggttagctaggaatgggaatttgttgattcaaaaagaa

SEQ ID NO: 36572 - DNA, 3800 bp, Zea Mays
acgcgcacacagcacggcactacggcagaaggaaaaaaagaggcaggcggacgacacagagagaggctcggaacaaggaaagagtcgccggcggcggagaccccaaccgaaggcccccggtcgcttcgccgggcaaggcgtgtccgtgcccctcggacaccgggtaaagctcactcctttctgctgtagttttgccagcttaatttggttttgacacagtgattttgtcgtcgaggctggtttcggtgaatttggttgacgggttctcggtgctgccgtcgcatggatgcgttcggctccgcggcccggaggcttttgctggtgccgtgggagatcttggtcggggtttggagctttcctggttttggctgtggttcctgtttagcgtcgcctaacgcaaggattggtttctgtcgtttggtagatatataaatattcggttaagaggatttggtttgagctcgtctgctatacgagctggaactggaattaggaggtgacacgcctttcctggttatagcttcgatgctaagataagctcgagtgcttgaggcccagcggctgcgatccatggattagaggcgacggtagaacagcaacaactctgagctagctgacccaatctcagcatcatcttgtttgatcatgacgttcttgctttgtttgctttggattttatcaaaagtagaaaactgttgcctttttatgtgttgttggaaagaccatttggctacacgaacggaacggaaagaggtttggtggaagtgtggaacagttgccgagcagtaattgctgagctggttcgtgactccgtgtcggtgagtgcccatggttcatgcttatagcaccggatcacacttctcctgtgctgcccgctgtcatctttactgcacacaagagtgtctgtggatggttccatggtatatgcacatgaaacggggtgattcataaattgctgaagtttttttagttttccatactgtatgaatggtagtgataataataaaactatctccgactacaaggaggtgtacggagtaaaaaacagtgaacgctaagctttgggaatggagttgacagtttctgctgaataacagaaaaaaaattactcgccttttcctgaatccatggaacttcttgatactaatggtcatgggaaaacaagagcacagaatgctgaaaatatggcaccagtttctgttaagagtccagatacatcactggaaatcaaagagaagtcgccccacaatttgacagagcaccaggaagaactggggccccctgtaggccatgacgggagtttgtcaccgaaaattctctcccacatacaaccaactcaggcatcggatgattcgtcaaaagatgagggagaccatgctgctgtaacaaataaggatggagttgaaaccatatccgaaaatggttttactggttcgaatattaggccaacagttgaaaagaaatctgaagaagacaatgtgtatagtcatgagaccgttgctgccacccccaaaaagaaagtagaaccagtaaagggatctgaaggctcatacacaggacttgttgacactagtgcaccattcgagtctgttaaagaggctgtcaccaagtttggaggaattgttgattggaaagcctacagggctcagtcattagagagacgcagggttgtgcaccttgaacttgaaaaggttcagcaggagattccacaattcaaagaagactgggaaaccgctgaggtggctaagtcagacgtcattgaggagctagagagaactaatagacttgtcgacgagctgaagcataagctggagagggcacagcttgaagtggaccaagcaaagcaagattctgagcttgccctgcttagggcacaagagatggagcaggggattgatgatgacgctagtgtaatagcccaaacacagttggcagttgccaaagaaagacatgaaaaggctgttgaggagctcaaattgctgaaagaggagctaagatcaacacatgaacaatatgctgtattagccactgaaagggatgcagccattaaacgggccgaggaagttgtttgtgctgccaaggatactgagaagcaagtagaggagctcactttagaacttattgcatccaaagagtctctcgagttagcccatgcttcacaccatgaagctgaagagcacagacttggggcagctatggccaaagagcaggatttcctggcttgggagaaagagctagaagaggcacaagcagagctaaaccagctcaacgaacaaattgcatccaaaaggaatgtggagtccaaagctcatgaaaacgagtgcaaactacttggcctgaaaagtgagctagctgcctatgtggaaaacaaattgaatgaagaggctggaatggttcaggagcaaggttccgacgaagcaaaagaaattagtaggtcaatcaagcaggctctagcttcaaagaggaaggagcttgctgaatttaaagggaaattagaaaacgcaagaattgaagccaatttagtaagagttgttgtagaatcactcagctcagagcttgatagggagaaagcttcacttgctacattgcagcagactgagggtatggcatgcatcacagttgcttctctagaagctgagctcgacaggacagagcaagagatagaattggtacataagaaagaagcagaaactcgggaaatgatggcggagcttccaaggatgttgcagcaagcagcccaggaggcagacgatgccaagatggcagctcatttggcacaagaagaactgagaaaggccaaggaagaagctgagcgaactaaggcttctgcgacaactgcagataccaggttgcgtgcagttctgaaagaaatagaggcgtctaaagcatccaaggggctagccatagcggcagttcaagcgatgcaagagagcaatgacgcaggaagcgctggtgcttctcctcgaggagtaacgcttcctataagcgagtaccatgctcttagcaagagggttcacgaagccgaggaacttgcgagcgagagggtggcagccgcgtttgcacaaatagagttggcaaaagagtccgaatcaaggaacctagagaggctgcaagaagcatccaaggagatggatgaaaagaagagtgatctccaaatcgcgctggagagggctgagagtgcaaacgaggggaagctcggtgctgagcaggagctgagaagatggagagctgaacatgtgcagcgccggaaagcccacgaggctacacaacatccagtcagtcctgtgagaactccaccgaggatgcttgtcgagcagaagggctcttaccgggaagaaaatgaacttcccacagatccgaagttgcacaagtcaaatggtagtatggatcagtttgtttccagcgagaaatcgcggaaaaagaagtcgttcttcccccagatgtccacacttttgtctagaaaggcacagacacaaacataagactataagagtgattgttctgaagaaaagagttcgttcatgtatctttgtaaaatgtaaatggtgtaaattttaatttttgcccatgctcttgtaaattgtctatttgtctcatacttgaagaagactgagtgtatgtctttgtatgatgttcttggagaggatgctgttacccagatctttctttgctttacaccctcgttctgcccttcttacatcgaaaaggaatttgtttgtccatttatcaagttgggatcatccttcgtcgtgttagatctggcttctggtagcacattagcggaagggagccaagattcc

SEQ ID NO: 36573 - DNA, 2807 bp, Zea Mays
ccccactccaccttttccttccccgccggccgccgcgcagcgcgagcggagtcgccctctccagtagagtaggagtgacgtctctacctatccacctcagccccctcttttcattccccacccgcgccgcgcgagcggagtttcgcagcacgctgcggctcgcttcgccagaattcctggcgagggtacagaattccgcatcgaaacggaagggttccgctcaccgagaaaattggcctcaatcgcgcgtccgtcctcagcgtcgtgcgttcggatgccaaggagggaacaacaactggggtttcagcaaaggattggacaaacacaatattggcacttgtgtctcctaattccaaaccggaggacttcaaccgcccaggtcatatttttcctcttaaatacagagaaggtggtgtgttaaaaagggctggacatactgaagcatcggtggaccttgctatgttagctgggttacctccttttgcagttctttgtgaaattgttgatgatgatgatggctccatggctttgttaccaaaactgcaacaatttgcaaagagggagaacctgaagataatatcaattgcagacctgataagggtgatgttggggatggacaagagatcttagtacgagtgcattcggagtgcctaactggggacatatttggatcagcgagatgcgattatgggaattaacttgctctggcaatgaccatgattgagaaaactggccggggtgtagtagtctatcttcgtggccatgagggtaggggtattgggctgggtcacaagcttcaagcatacaacttacaagatgatgggcgcgatactgtcgaggcaaacttggagctagggctgcctgctgactcgcgggagtacggtataggtgcacagatattacgccatcttggtgccaggaccatgcggctgatgactaacaaccctgccaagtacactggactcaagggctatggtttaagtgtccttggtagagtgccattgctaacaccgataaccaccgagaataggcgctatatggaaacaaagcgattgaagatggggcatgtttatggaagccgctccagtaatcatgcaaacggcagtggcttggctggtgctggcgagagagaggagcaggatcagaatgacagtgctggcgtgcaagagcgaactccagaagcttgagtgcctaactctgcgttccttagagctgctccaatgggagtcttaaaaagagatgcatcttaaaatatagggctccatggcaaaaaaatcactccaacggggacctcattttacaaaaactcaggaaacaaatttgggctccggtctcattggtcccaaatgtaggacttgaaactatcggccctattctcgttcccacgcccccacgaccttcggtcttttcctgttgcattcgttctcaagccgtctctcccacaaaccaaaccctctgcctgtcgagaagcattggcgagatggatggacggccaccgccttttcctcgttcacggccaacaggttggcctcgttgaacttccatggagatggcactagatgtgatagggagatcatcagctgtgtcttctccgccagatttgcgcaggcctcctgtggccgtggctgcagagcgaaggcctgcaagtatgtctgcaacttcccaacagacacaaggacaagcgtcttggcatcgaatcgctgcagaccatgccgatcggagtttatcagtggcaccgatgatgtatcaagatccattgtcaatgattgatgactatagaacctgaagatgtatttgcctgccaagaaaatatggagagcgaaaatgaggtcatggagtcaccaccattgaatgattcaaattcacagtcaaaaccaaagggtcgatccaagaattttaatgaagctgaagacattttgttgatgtcagcttatcttaacatacgtaaagatgcaattactggaagggatcaataagaaggcaacttttgggaaagagttgagaagtactttaacgttaacaggacatttgagtcagatcgtaactggtcatcgttgaagcatcggtggggtataattcacaaataagttagtagtttccaaggtttccatgacagtatcgaaaggaaaaatgaaagtgggaagacaagtgatgataagctggctgaagcaaatgtaatgttccatcaatttaaaaataaggccttttctttgttccatgcgtggaacattctcagacatgagccaaagtgggctgaagataaaacatctaatgaagggaatgcaaatggggacagtcatcccaatgctcaaagacctgcaggaaggaaagctgaaaaggaaaagatgaaagcaaaaaggcgcaacagtgatgaagagtctgatcctttcattgaagaggtaaaaaaatttgagagaatcgagagagaaaactgagagcgaacgaaaggagcgtgatgaaagatactttgagctgcataagaaaaaagtagacttggagcaagaccagcatgacaagttgataatggcacttgagtcttgacacgagcacaatggatgaccaaggaaaacagtattttcagttgatgaaagaagatattttagctcgacgctttgggagtaggcagccatagttatttagtttttaatactttagacttttttccattcaaaacagattatcttgatgttcatgtaatgtaagaacatattttcattcaaagcagattatcttgatgtttgcaacaatctgtgttgacattgttttctggttactgtaaaagttgagttgaaattttgcttctgaaa

SEQ ID NO: 36574 - DNA, 1669 bp, Zea Mays
caaaacgccacgcagctgcagctctggctgagttcacacttcacgggaagaaagacgtagaatattggatgggttcagattaaaaaggcagttaagctcgatggatgcgtgtgatgattatataaaggacattataaatcaacgggagcaaaggaaaggaaagggagaaaatttcatatagcaattgtttcgcgtataggagggagaacaaaggtcgcgtctcgaaagttcttgccttgttgggaagggatggcgtcggaggtggaggacgacgcggcggtgccgggcgcgccgctggtcgccaatggtgcagccgacgtccgccggaggagggatcaggctaaggcgattttgtccaagcaggccgtcaagatcgccaccaaggccgagcagcacgagcgcttcatctttaaggaccacaggatgtgccatatgtgtactgcctgttctatgtcatattcgttccgctccgctggatttactaccgctacaagaaatggcattactatctcctggacttctgctactatgccaacacctttctccttgtaatgattctcttctatccgaaagatgaaaaacttttcatggtttgcttctcgtttgcagagggtccacttgcttgggcattaattgtgtggcgttgcagcttagtttttggttcatttgacaaacttgttagtgtcctgatacatctcttacctgggattgttctattcactatccggtggtgggatccacaaacatttgctgccatgcacccggaaggaagagatgccagagtcacatggccatatgtggaggacaaatcatatatgtggacatggcttttttttgttccactagctgcttacaccctgtggcaacttatgtatttcctcatagttaatgtcctgcgccggcagaggttgttaagggatcctgaagtcatgacatcctacagagagctctcaaagaaagcacagaaagcaaacaacatctggtggaggctgagcggactgctgggtgaccggaaccggcaggtcatgtacatactgctccaggcgctgttcacagtggcaacaatggccctgacggtccctatattcctgtcctaccggatgcacgtggtgttcctgatactcaaggtgtgcgcctcgacatggaacggtggcagcttcatcttggaggtgatgcctcgacaagtagaacggaagcagcagaagaaactgggcatgaagcccatcgaacaggggagctggacacaaggggcgccggctgatggtacgtacattgggtaaccaccaccaagcacacatctgaggagaaaatccaggagtgaggaaatcgaagctggatgtaacaatagattttactgtttgcaaatgcaacctttgttttttttttctgggtgttcttcgtgttggaggtttttttagctctgccctagttgtgagttgtgacatctttagttttaggctgaagtctgaacgatatggggtgagagatcatgcgtgcccatggttgtcttgggattggacatgcataagttgagatgttctccttttctgtaggagttttcttttcgatgtgaccgttgtgaattgcgtgaagcttttttttcattgttcgtttaattttttttagagagaggccccggggcctattcaagcccgcgacattatattaa

SEQ ID NO: 36575 - DNA, 326 bp, Zea Mays
cgtgttccgagctctggacggtgtgtgcaatgggatcaagatttctgctagttcgagcataacgtccctacatccagccattggcggcgtgcgctacgacaccattgatcatcaaagctcgtagtaggggttacaagcaggcaagagagagagaggagagactcccaagtattttattcatggtagaggtggttacaacgtggagtcctagctaagtctcggcttggtgtcggggctccagcctccgggtcctccgatcctcctgttcgtcggacatctgggcatcgtctcgttaggatctatccttgaggtcgagagcactccgg

SEQ ID NO: 36576 - DNA, 3233 bp, Zea Mays
tcgggtttcagcagcgggaaaaccaaaaacgaaacctatctcaccgcagagtctcctcaccgcagtaccagactccggccgaaccgcacctctgcccccttcctcccggaggctcagggcctgtggcgcacgtctatggagcggatccacgtagcggtgcgctcgcggccgctctccccggaggactcgcggagcagcccgtggaagatctcgggcaacgcaatcgctcactccgcgcagtcctcctcccgcttcgagttcgacaggatattcggcgaggagtgccgcactgccgaggtctaccaggcccgcatcaagcacatcgtcgataacgtggtccgagggttcaatgtgggaagaccttcacaatgagaggatcggctaatgaacctggaataataccgcttgcagttcatgacttattccagcgtattcaagagcatatggacagagagtttcttgtgcggatgtcctacatggaaatttacaatgaagatattaatgaccttcttgtgcctgaacatcgaaaattgcagattcatgagagtattgagaaagggatctttgttgctggtttaagggaagaaattgttacatgcgcggaacaggtcatggatttcatgtcttttggagaatcccaccggcatatcggagagacaaacatgaatctttatagcagtcgttctcacactatatttcgcatggtaatcgagagtagagaaaaaggcgatgacaatgaagttgaagatttttgtgatgctgtacgagtatctgttttgaaccttgttgacttagctggctcagaacgcgctgcaaagactggtgcagagggtgtgagacttaaggagggttctcatattaacaaaagtctcatgactcttggtacggtcataaagaaacttagtgaaggcattgagagtcaagggggacatgtgccataccgtgatagtaaactgacaaggatactgcagcctgctctgggtggaaattctaacacagctatcatctgcaatataacacttgcacagatccacactgatgagacaaaaagcagtttgcaatttgcgagtagagcattacgtgtaacaaactgtgcatgcgttaatgagattttgacagatgctgcattattaaaacgccaaaggaaagaaatagaagagcttcgagcaaaacttagaaaatctgaaagtgatcattgggaggaagaaattctgaatctgcgaaacacactactgcagagtgaattggaaaaggaaagaatctctttagagctggaggaggaaaagaaagctaaagagcagcgtgacagatgcttgattgaacaggcaaagaaaattgaaaatcttagttcactggttttaaattcagacagagatgacaggagtactgcttttagtaagaacaaaagaagggtaacatggtgtcctggaccaaatgcaaagcaatttgatattgaggatttaagacctgtccaggaaggctctacaagcagcacagttagaaatgaacgggatatgggaatgccaccactttttgaagagttaatgcaagaaagtaatgatgagccttgtgctaacgtttactcatctggacctggtaatgtgtccaaagacagtgaagacgtccctcttcctgactcgcatgctttgctgcatgttaccaacagaagaaagccaaaggcaatgaagaaatcagatcaagagcaattcagggggagagctggtgaactattaataccccaggacccctgtgatgggaatgatgctctacgccacaaaaacactgtgccttgtgtagttagtagcttatcttctcgagaatctgaagccattcttgtcatcaaacaacttcaagatcagatcaagctgctggaggcagagaagagttctgttcaaactaatttggatgctgttcttgtgctggcaactcaacagaaggtttcatttaatgaggagtatgaagagcttcagcagatcactctagctgcagaagaacaagcaaaggttgctaatgagaacctgtccacactatctgctactgtaaaatccaaacaggaactagcatatgaattcctcggtaatttattgatggagactcaaggaataaatgtggagatggatcagtggagaaactcggttgacagtgctctttcttttattgatgaactctttcagaatctctgcatcatggcacaaggcattcgtgaagtaaatcactctgctcatgaagatagtgcacggtcctgttctgtgatcagggactatgaaaaactatcaacctgtttgatggacaaagtttacaaacttgaattggagaagaaactattggaggaacagtcccaagaccaacaaaatgagatttataagctgaaggccaatctggaaagctgtgagaaggccatagatgactgtactcttcaacatgaattggagaaggatgccattcttttagagctcctaaacctccagaaggaagtatctatcttgtcatcatcttctttgatgaaagaaaaggaatctatccgaaaggaacttgatagaactaaatcaaagttaagagagacggaggacaaacttaagaattccattcaggagaaaacaaaacttcagagtgagaaagcagaggcccacaaagaaattaagaaattgcaaagccagagaactttgcttgaacgtgatttacggaaacgtgattcagctactgttgacaaaaggcatgaactgaattccatgccacaggaaagttctggtgcttttggtcacatgcaggagaactaccaaaatcttgagatgcatgcttttgatatggatgctgaaatttattctttacaagaagctcttgtcacttcaattgatgaaaaggatgaagcgttgtctaaagtagggcttataacatctgaactagaagatcttgcgaataaactgaacttagcagaatcagaaaggaactcctttagcaacgagatcacactcttgactgaaaagttaattgcatctgaatcttcccttaaaagtttggagacttctctcaattctgtatcaagggaaaaggaagatttgggaatgcaacttactgatgcccttttggacatggaatctgaaagatcaatttggacagcaaaggagaaagaatatgtagaagctaatcatagattgaacatctgccttgatgagaaccacaaactttcagaagatttgatgaagtgtataaatggattgcctaccttctcttaa

SEQ ID NO: 36577 - DNA, 509 bp, Zea Mays
gtggagaggtgggaacatgacatgactactggcccctggcaacgggggaaacagaagcgacaaggagtgggcggaacatgatgacgccacaagcagctccttgccgccacctcctacttcgacatgctcaacggcgcctctcgcaaccgcgcgtactgcctcgccatcggtgccacggtcacggaccccacatcccatgtcctcgacatcggaactgggacatggttactgtccatgatggttgcacgagctttgatagctgttggaggtgaaggaaacacacacaatctgtccatgatggctccgtgatcgtcgagcgacccaacagtgagcgtcatgccccctcgtctgaacgcaggaaggccgacggcgccaaacgagggctgacccccttcttcgcatttctggttgatgtcaggccacagttcctagaggtccgcgccgccgtagctaaataacttagacaccccatgttatcagcacaacagttggtacaacaacaaacaaag

SEQ ID NO: 36578 - DNA, 1489 bp, Zea Mays
attaaaggccgtctcccaaccagacaaagctagtactagcagtagcactgcgccgcagcaatggtggtttccctcgccgaataaatctcaccggtcgcgcttcttggcgtgttcctccgctcgcctgggcttcgatctccagccctcgcgtgagcgcgggtgcggccgcggcgccgtggtcatggcgacggaggagtgggagctgcgggaggaggacgcctacgcctacgagttcgagttcgacctcgagaaccccttcaccagccccgccgacgagccgatcgccagtctcctcgacgccgagggccaccacgcgccctctatctccgccgcggcctcggccacccgccgcgccgccgccgccttcatctccaagatgcagcgcgtcgcaacattctccaccgccgacattcagagggacgaagacttcatgttcgacgcggtgaccatccgtcgcatggagcgggtggtgcttggcgcgcttgagtggcgcgcgcgctccgtcacgccgctcgccttcctcggcttcttcctctccgcatgctatccgccgccgcagcaccccccacaggtagccgctgtcaaggcgcgcgccgtcgacctccttctccacgctcagcctgaggtgaagatggcggagttctcaccctccgtggtggcggcggcagcgctgctggccgccgccggagaggtcgccgccgcgaacctccacgcgttccaagccagcttggccgcctgtccctttgagaagctgcgggagtgcggtgaggtgctggcagcggcgggcggcgtcgggcgggggcgagccgctccgagcgcggacacgcctgtgacggtgctcggtcaccagcgcagcgccagctccgcctcggagaccgactggattaacggcggcgacgcgaagaaacgctgcatgggcccaccatcgcaatgggggtaggcggcaggccgcaggccgagtcaagcgggtattgtcgcagctggatcgaagagtcggagattttactgcagccctgctcctttttttccaaattgtttttaccctttttcttttcccaattctttccttctactttaatgctctcgaggtaaagtgacgaggagtggtggtggtggctgtcatttactagtattcctttttcctagcatgtctttattttagcctagttatggtaatttttgcggcggtgctttggaaggtgaggacggtggatgaacatactgggatggaagagggggatgatgtgaaatggtaaaaaaaataaaaccaaaaggctggcatgttgctttgtcacctctgccgatctggtttctcttgcgtctgctttcgatgatgatttctcattatgcggtcgaatttctggcatgatatttctgttttgccattttcttgccgtgtttctatttcatagcccactgtagtaaaagttttaaccgttctaaaaacaattctttcaaaaccacaacgactgtagctggacctaaaaaa

SEQ ID NO: 36579 - DNA, 2687 bp, Zea Mays
acccaaacccccaacctattcgagcgacgaaactggaaaaaagcacgcgacgacgcgacggtgaaggggaagtgtgaagggaagcagaagcgagacaaatccccacccggctccaaaccctagccacctcccccgtcccccccttttcgtcccccagatctcgctggcgtctgctccgcctcgcttcgatgtgaccccaccctagggtttgagacggtgttgcggtgtgtgcgtgtgtcgcggcgattcgcgacgcgagtaggattcgaggtgtcggcggcggtgcgagcgcaaatgaaggacccggcgcaccgcacgaaggtggtgctccggcggctgccgccggcgatcgcgcagcaggccgtcgtggaccaggtcgatgcgcgcttcgctgggcggtacgactgggcctgcttccgtcccggcaatgccagccaaaagaatcataggtattctcgactttacctaaatttcaagcacccagaggatgttgttgagtttgctgaggtcttcaatggacacatatttgtgaatgaaaagggtgctcaatttaaagctttcgtggaatatgcaccatcacaacaggttcccaagtcaaatgtcaagaaggatggccgtgaagggactgttacgaaagatcctgagtacttggagtttcttgagtttatttcaaagcctactgagcatctacctagtgctgaaattcagcttgaaaggaaagaagccgaaagggcagctgctggaaaggaggcacctgttgtgacacctcttatgatgtatgtccgccagcaaagggcagctaagagtatggctcagagacctggaagtaggcttagcagaaaagttgcaggtgttgtaactagcagttccagtcctaaaaggtcttttgagaagcgcagatcctccacgtatgttgtacgagacagtattaaggagaaaccgacctatatcatggtgccaaagagagaggagcatacacaaagggaaaaaattgtttctggaaattcaggtgatgccacaagtgggggggcatctggatctggtcagtcttctgacaaaattgtcattttgaaaggaagaggaagggttgattcgaacacacctgatggagcagctcaacagtcatcaacccctgtgaagaatataccaccatcgagttctagactagacaagcgatctgaagctaatggaagaattattaaaactgttctttcaaacaaggaagttcgcagttcaaatccatctcaacatgagcaggaaggtcaaatgtttaatactgagaaggataagcgtccaccacgggctctcaaccctcggactattgtgaaagatcaggtagttgaaaatgctgagagaagccattttgatgagaagaataattatctccacagctctgctccaattggtgagaaggttgaaaggcatgccagaaacagagatagacctgatcgcagtgtatgggcacctcgccgctatgacaaatctccgcctgggggtgtttcacatgccttgtcgtcagatttttctcaaatgcagtcacattctggagataatgtctcacaactaacagatggtcatggagacagaaagacagacacaaggggtcatggaggtagccgtggtgttcctgttgaaaatggacataggcatgccaaccgtcgtggtaccccatgtgatccaaaggaaaccaaaatatctgctagcgtgcctgatggaaagaattcaaagaggggctctgctagctatggtgctcatgagagacaagtatgggttcagaagtcaagttcaggctcgtgagtttgtccattgatgatactcccataaaaaacaggtattgaagtcgtggagaagtcttggattctgcagcgcattcttctttgttagctgttgatcctgtgaagtatggtaacgaaatgtccaatggtcaaatgctaccatgaagtgcaatctcagatctgtcagtcgaagtctcagctgaaaagagggctcggctgatttgattcacagaaatagtgaagtaacataacccggcatgtaggtagctctccgacaactttgggcaagatttgatttatgcccaatgttgatctttctggagcattggatggagattaggttggcatcactacctcattacctcgtgatagtggtcacatatttccaagacccctggaggttacacgcaccctcggcaattcgtcagagatggatgtaaatatctctagagaaagaagaggtctggttccgattgctgtttacaggttagaggtgcaacgtatttacaaagagagataagagttatcacttatcagattacctggtttgttaaataaaggtgaatttagctactagattatgagaccccgtgttttgacttctgcaatcgtggttcacgacagcagaaaggttacctaggagtgtaaaagtgacatctcattttgatgctatggttctgactcaatgggatgtgactttgtgatgtggttttgtcgcctggtgtgtgttttgctgccatgttcctccaaatgacccgggtgttctgtcgtgttagggatgatatgcttggtgtacagcatcaaaggtgcttaatgttttaaatcttaaaagtgatgttgcctggctttaatggttgatgatgtccgttctcctgtgcatttcgtcatgaaggttaaaaatatagatttgcc

SEQ ID NO: 36580 - DNA, 2623 bp, Zea Mays
ccgttcctcctcgcccaccaccaccgcacgccggacaaaaccgctctcctcgccacattcgcagcccccctcgctcgcgcacacgccacaccacaccaccagtacactgctctacgccacagtacagcagcatccagcgggcggctggctgcctaatctttccagctctttcgtcccctcgccacgccgcccaccgctgccgcatcatccgcccgttgcccgccgtcgtcgcctggcccgcggattccgcccccattcgccgtcgcagcgcgccgagccccgtcccagatcgccgcggcgcttcctgccgccgtcggcgcggcgcagggttgaaatctatttgaccactcagttataaccatttctggtctgaagatgcttcgtcaatgacatctggaaactgtaatagtatgcgctgatcttctatgcttcaccacctgactatcaatgggctctttcctgtggaaacagcccagctacctcttcattttgataattctccaccttgttgctcatgaggcaagaacgctgagttcagatggtgaagcacttcttgccttcaagaaggcagttacaaattcagatggagtctttctaaattggcgtgagcaagatgcagacccctgcaattggaagggtgttagatgtgatagtcatagcaagagagtgattgatctgattcttgcataccacagattagttgggcccataccacccgaaattggaaagttaaatcagttgcaaaccttgtcactgcaggggaacagtttgtatggttcactccctcctgaactggggaattgtaccaagctgcaacaattgtatctacaaggaaactatttaagtggatacatcccttcagaatttggcgatctggtggaactcgaggcattggacttgtccagtaatacattgagtggatctgttccacattctcttgataagttgtccaaacttacattattcaatgtttccatgaacttcctgacaggagccataccatcttctggttcacttgtcaatttcaatgagacatcctttgttggcaaccttggtttatgtgggaagcagataaacttggtgtgcaaagatgcacttcaatcatcatcaaatggtctgcagtcaccttcaccagatgacatgattaataaaaggaatgggaagaattcgaccagacttgttataagtgcagtggcaacagtgggagctctcctattggtggctttaatgtgtttctggggttgctttctttacaaaaattttggaaaaaaagatatgcgtggtttcagagtggagctctgtggaggctcttctgtcgtgatgttccatggggacctcccttactcctcaaaagacatcctcaagaagctagagactatagatgaagaaaatatcattggagcaggaggcttcggaactgtttataaacttgcaatggatgatggcaatgtctttgctttgaaaaggatagtgaaaacaaatgaagggctagatcggttctttgatagagaacttgagatattgggaagtgttaaacatcgctatttggtcaatctccgtggttattgcaactccccttcatcaaaacttttgatatatgattatcttcaaggtggaagcctggatgaagtgcttcatggtttctgaatattgtgggcacacaagagtatgggacgctaggtcacactaagcaattgattctgatatagagcaatgatctaaaggtcgaaaagatttttggagcacaacaattccatgttctcttttgagaaaaatctgaacagttggattgggatgcacgtattaacattatacttggagctgcaaaagtttcgaggcccgtgtatcagactttggacttgcaaagcttttagaggatgaagaatcacatattactacaatagttgcaggaacatttggctaccttgcaccagagtatatgcaatttggcagagccaccgagaagactgatgtctacagttttggggttttggtactcgaaatactcagtggaaagcggcctactgatgcatccttcattgagaagggactaaacattgttggatggttaaattttcttgctagtgagaaccgggagagggaaattgtcgacctgaactgtgaaggagtgcagactgagaccttagatgccctgctctctcttgccaagcaatgtgttagctcctcgccagaggagaggccgacaatgcacagggtggtacatatgctggagtcggatgtaattacaccgtgccctagcgacttctatgattcagagtagtctcctggacaagccacgctgctgctagtttcccgtgggggcgcattcctttattctttgcgtatattgtgtaaatgcattgccgcggtgtttggtctccaatcggctggctcaacgggtgacttttttttgcgtctgtatacctatgtatgtatctgtcatggtacaagttggctatatgctgatttaataataagagagaacttactagtagactattgtatgtttaactatagtctttagatactcgtagatgttgtgggatctacaaaagaaatggggaaataatgaatatcgcttggaacaaacaagaatagataaaactcttttggcttggaggat

SEQ ID NO: 36581 - DNA, 2247 bp, Zea Mays
gccgaaaccaaggcggtaggaggaggacgaaggccgctgcggaccttcgtctcaccctcgctgcaccttccttccccccctaccggcccaccccacgccgcgattaattaagcgcgcaccggacctgagtacctgacctcacgcatccatcgaccaaaacggcagctccttttctcccgcggcgttgccgtcgcactcgcacgcacgcactcaccgccggcctgagcctaatcctaatcctaatcctaatccacataccgggacaatccagacgaacgagcgaaccaacgcacggacggccaccagccgctgcgtgcgttcgctttcccccgaaacgtgacccgagccgagctgcagagagagaaaggagaagccgccatgaagcagcagcagctgcagctgcctcctagtcgtcaacgttaaatccctgctcgccaagccactactacgactacgagcaccagccccagtttttctcctctcgcccccgtaatagctgagagcctatcagaagaggaaattgcggggttgaaggaaatgttccagaccatggacactgacaacagtggcgcaattacctacgatgaactaaaagaaggattgagaaaatatggttccacactgaaggacactgagattcgtgatcttatggatgcagctgatatcgacaacaatggaacaattgactacattgaattcatcgctgcaactttgcatctcaataagctggagcgcgaagaacatctcgtggcggccttttcatatttcgacaaagatggtagtggctatatcacagtggatgaactacagcaagcttgcaaagagcataacatgccggatgcttttcttgatgatgtcatcaacgaagctgatcaggataacgatggccgcattgactatggagagtttgttgccatgatgaccaagggcaatatgggagtcggtcgacggacaatgagaaacagcttgaatatcagcatgagggacgcacctggtgcattctgaaacttaacacgatgtacagcttgtggcctagtcacttcggccctgtttgtttcggcttctggcagcttctggccaccaaaagctgctgcggactgccaaacgctcagcttttcagccagcttctataaaattcgttgcggcaaaaaccatccaaaatcaacataaacacataatcggttgagtcgttgtaatagtaggaatccgtcactttctagatcctgagccctataaacaactttatcttcctccacacgtaatcgtaatgatactcagattcttcccacagccagattttcagaaaagctggtcagaaaaaagccgaaacaaacagggccaactgtcttgtcttgctgccctaccaaaccttctgcaaaattttttttcaagatgtttgtcaggtgtatgtgtggatgtgttttttctgattcaactcttgtgattgattccatgaaatgcataacaagatgtccatgccatgcgtgaaagtgaagccgattgtaaatgacggcgctgcccctgcttgactctcagaaacacaaacacccatgttctgaactagctcgccatgtatgcctccagtctcccttgattcatggcatccattcttcatgatgtggatcaagatactctattatgctctcctcaaggcctcaaccaatgccaacaaaaagaactacgcacgaatccatggtcaccactcaccagtaatccctgcaagagcaggaaccaccactgtagtggtggaatcgcacagcatctcgaatcgcgaactcccgaccagtcaccgtgaagatcagcttgatcacagtgtggattcttcatgatgtggatcggcatccagagggcaagctcatgagcccaaacgctgcagctagcttctagctgtggtgaataactgttgatgaagtcatgtatgggagagttgcaccgaaagggaaatttgaggttctctggtggacgtcgcacttgccgccgtattacagctgcatagccaactgtgagattcttgattcaaagtgtgtgcagggggaaaggcgctctaagaagaggaaagaagcgaggtggcgagttctacacagactaatatgtcatagtgggaatctgtttcttacatatatataaacaatgcatatcttgatttttttcaaataattatagtgcttaataatgctacacatgtagaatgaagcgaaattgtagactcgatatttcttatccaacacattttttagataatgggac

SEQ ID NO: 36582 - DNA, 2869 bp, Zea Mays
cagctcccaggcaagaatcgtagggtcatccatgtaggcgacatttgtgattgtattttttctcatcaaaacagcctaagatatgaaagaacaatgtatgcaattgtgatggtatctggtaagacatggcagaagggcgatcaaacaaaataagtgccataaaaaacagctgttgttaagaattcagatcccaacgctatgaatataccaacactcgcttctccatcttgtgaatgtggcatcagggaagaaggcgtcatcagaagtatgatccaggccagcctcctttccccaccttggcatgctgtgccttacctccataatcttaccagctattacacagtgacagtatcagcctcatcttatagtttcctgcctcgctgatcacaaaatctaatgcctataacaagggaaaaaaaggaattctaagcttagctgtcacttaattagtaaatagcgagtctctgtttgagagatacaggcaatgtagtactacaaactacaaacgctggacgataacaataataaatgatgtgaagacgcgcgcggatgcaccaagcatttcaccaaacaagcgccgcggatgctacagaatcgcgacgcgcgcgcacatagaagacctcctcgtcgtaggagaagtgcttgagctgcagcgcgcggtacccgccgtcgttgaaggcccaggtgcagcacacattgaggtccgcgcgggcggcgtccactagagcagcggtgaacgcggcgcgcgtggcggcgtccgccgcgaaatgagtcgtgcacgaagaagggccgccccgacgctcacaggtgcgggccccggcgctccaccgccgcccactcgccctcgtcggcacccagcagcatggcggaggggatgcagcaggaggccgcgaggaggacgcggcggaggagagacacccgcggcgtcgctcggcctcggagcggcggccgcggtggcgccgccaagcgaggacacgtcgggctgttccactcccacgccgattggtgggtccggtcaggcgggtcaacgcccgccccggcggcgggcatctggaggcttgctcttgtttggaggctgacacgtgggggccacaacacagcggcagaaataatcccgaccggaccaagcgcccaacaactgccgccccaagccaagggaagggaaaaggctatcgttctcgtcagtcgtcacgagagccgcgacggcgcgcatggcggcgacggcagcggcgctccggtgctgcttccccggatcctccggtgtcggtagtggcttcgtcaagcccaactcctccaggcgaggctggtgcgcagcggccgtggcggcgccgtcgcgggaggcggaaccggtttcgtcgctggggcaccgcacccgcgtcgacttccccatccttcaccaggaatttgatgatgccaaattagtttacttcgacaatggtgcaacatcgcagaaaccatgtagtgtgatgaaaacattagatgagtactaccgatcgtacaattcgaatgttcatcgtggtatccatgcactcaggctactcatgcatatgaggatgcaagaagaaaagttgcaaattttgtcaacgcagctgatagcagagagattgttttcactcgtaatgctactgaagctattaatctggtagcctattcatggggactatctaacttgaaagaaggagatgaaattgttcttacagttgcagagcatcatagtgctattgttccatggcaatttgtttcccagaagactggtgccaccttaaaatatgttggattgactaaagaaaatgtcccagacattgagcagttaaaagggtttctgtcgaacaagacaaagatagttgttgttcatcatgtctcaaatgttctaggttccatgcttcctatcgaggagattgtaacatggtcaaacagagttggagctaaagtccttgtagatgcttgccaaagtgttccccatatgccagttgatgttcagaaacttggcgcggactttcttgtcgcatcctctcataaggcgtcggatttttgcatggtaaatttgagattttgtcgtctatggagcctttcttaggtggtggtgaaatgattgcggatgtattcgaagacaaatccacatatgctgagcctccctctagatttgaggctggaactcctgcaattggagaagctataggactgggagcagccatcgactatttatcatgcattggcatggagcagatccacgaatatgagaaagagctggggacatacctctacgaaagccttctctctgttccaaatgtccagatatatggcccggcgccttcccagactgtccaccgtgctccgttgtgctccttcaatatcgagaacgtccatcctacagatatcgcagagattcttgatctgcagcatagcgtagcgattcggtcggggcatcactgcgcgcagatcttgcataggacccttggcatcaacgcaagtgctcgtgcgagtcttcacttctacaacacaaaagacgaggtggataccttcgtcgacgcgcttaaagccaccgttgatttcctcacggatcgatactagtgcggttcagttcagttcccttttttttttgccagtttcatcgctctctcgtttgaactgttgtatgcacacacaaaaaagtatgcatatatatttggtataaagaaaacatacaaagtgtacggcttggcaaagtgagctcccttatttggagttttggactgtactcccttatttggcggttgttgttgaattaaacgtagttcaggatgcagagagtacaaacgactcgaccatggtcactgttatgcagtaaaacattgttatacgagaagatgagccggcagttaactctggg

SEQ ID NO: 36583 - DNA, 3157 bp, Zea Mays
ccaaccaaactgacctacccggaaaacgagccccccgactcccgcctgccgccgccgctctgccagccaaacccaaactaaaaccctcgccgacggcgcgcctgttgttaaaccctagaaaaaccagcggcgacaggagtggccgcaaccccgccgccggagggggctccacgaccagatagaagagggagagaggatggggatcttcgagccgttccgtgcgatcggctacatcacggcgagcggcgtgcccttctccgtgcagcgcctcagcaccgagaccttcgtcaccgtcagcgtcggcaaggctttccaagtctataactgtgctaagctgaatttggttcttgctggaccccaattgcccaagaagatccgtgctattgcatcctacaaggattatacatttgctgcttatggaagtgatattgcagttttcaaaaggactgaccagaggagcagaaccaaacactgaaccagttggaagcatatcattgggagacaagttcaccccaacatgtatcatgcatcctgatacttatctgaataagttgctgtcggatgttctgatgggtcagttcatgttcataatgtaagatatgatgaagaattgatgtctttcaaccaccagattcgtggtgctgtgactgcactgtcatttcgaacagatgggcaaccccttctggcttctggaggttcttcaggcgttatcagcatatggaatcttgagaagagacggctgcattctgtgattagggaggcccatgatggttcaatagtttcacttcacttttttgcgaatgaacctattctgatgagttcagctgctgacaattcagtcaaaatgtggatatttgatagtaatgatggaggtgctcgtctgttacgatttcgaagtggtcacagtgcaccacctaggtgcataagattctatggcaatggaaaatgcatattatctgctggccaagatcgtgcatttcgccttttctcagttatccaggatcaacaaagtagagagctttctcagaggcatgttgcaaaaagagcaaaaaagctaagagtaaaggaggaagagatcaagctaaaaccagttgttacatttgactgtgctgagatacgtgcacgtgactggtgtaatgttgtcacatgccacatggatactccacaggcatatgtatggcgtcttcagaactttgttattggtgaacatgttttgacaccatcatcaagcactgtgacaccaattaaggcttgtgtgataagtgcatgtggtaattttactatcttgggcactgaaggtggttggattgaaaaatttaaccttcaatcagggtttagtcgtggtagttacattgacacctcgttggcaatgcaatgtgcacatgatggtgaagttgttggattagcttgcgatgccagaaatggctttttgattagtgctggataccaaggtgatattaaggcatgggattttaaaacttgcaagctgaaatctagattggatgttggtaaatctgttactaaaatcgcatttcaccggccaaatggtcttcttgctacggtagcaggtgatatggtactcatattgtttgatacggtgtccatgaaaatggttcgtagatttgaaggacatacagaccgtatcactgatttgtgcttcagtgaggatggaaaatggctcatctcgtctagcatggatgggactcttaggatttgggacatcagtttagcaaggcagatagatgcaatgcatgttgatgtatctataacatctatctctatgtctcctaatatggatgtgttggcaaccactcatgttgatcaaaatggtgtctacctctgggttaatcaatctttattctcggtctcaacaaatactgaaaattatgccagtggtaaacatgtacggaatgtgtgtttgccagctgtttcatcaacagagagatctgaggaagaacaagttcagaatttaggagagtcatataagtccagtattaaaccttttgtcataacggatcatcaaataccgaatctagttaccctctccttacttccaaagagtcaatggcaaagtttgactaatcttgacattataaaggttcgcaataaaccaattgagccacctaagaaacctgagaaggcaccattcttcttgccttcagttccatccctttctggggagatattgtttgagcctcctgccagctcaaaagatacagacatcagtaccacgaagaatacaaatcataagatgtctgaactctcctctcatttcagtcagcagttgcaattttgtggtgaaacaaagaactattcggcttttactgactacctaaaaggcctgtcaccgtcgtctttagatatggaactgcgaatgctacaaatattagatgatgaagagtctgaagatctggagcaaagacctgagcttcagtccatttcttcgctgttggattatttcattcatgaactttccttcaggaataactttgagtttgtccaggctgttctgaaattgtttttgaagatacatggtgaaacaatacgacggcactcaatgcttcagagtaaggtgaagaagcttcttgaggtccagagcttagtttggcagaagattgataagatctttcagggtgcacgatgcatggttacattcctcagtaactcacaattttagtagcaggccggagttccacataccagggcatacatggtgcctaatgcctgcacgagtgtggccattggattgagcaagtggatatagttgattttttttggagacggcattaaaatggatctggttctcaaacatggcatgactaggcattggagcattgttgagcagcagccatggctatattactctaggcttacaattttgctgtagctgttagtctgttacacagcaaggagtccacttggtaaacatttgtagctaccaaaacagccccatctcatggtgtaacaattttgtagttttacatttgtgtcatctttttgtaacaaactgatgtatcaaacaccgtattgcaagaaatactaaggcttgccattgctatttgaacaaaaaaccatatctgtatattcaacaagcttagcttctgtgttggtcttatattgtggaggataccaggtgaaaatatccaaatgtacctaa

SEQ ID NO: 36584 - DNA, 1281 bp, Zea Mays
ttcggtgtcattacgtagctaacacaactcgaatcaattaaaatagaaattaacgtaaatgatggcacattcgattaatagcggacttaaaaacacgttgcacaatatgattagctggagtcttgccatatgtagggctacatggagagcaaccacagagaatctgaggtccattgtgaggggtggcttctacttttcaggctttgacgcatgcagccaggagaccgtgaaggcatgcaccataccataatggggcccacgacaatttcctagccataatataatcacatacatgggtgtgcatgtgaggtggggtccacccatagtttctcctatctaaacgacacggatagttttttctccaacgcagatggtgggcaagcggccggacacagaggccgggcggctcgcttgctgggggtggagctgggcttgccacacagactgctgcatgcgctggagaggggctcgaccatcgcggcgcgtttgcaggggtggagctaggcgtcgggcgccaccatggctgtgtaggcgagcagctgatcgtacgcacgggatgggtgcaagagcttcgtacctggatgacagctgtaatcacgtcctctctctttccgacgaacacggtgatacgaacggaagctggaacatggtgtttgcatggaaagactatggcagctaccggacgggaggggcctcggttcctatttgtagcccagagacggtgggctagcgtccggctgctgtgctatggaggccgatggtgaatgcacggatcgacaggactcctcgtggccgcactcttcggcgccggtgagagcaggaccacaggttcgtcttccacctcgggtgttgagcgacgttgctgccggtcgcatcctcggcgccgccagtggaggacggggcggccaacgagaacggtttggaaggagaggtgcctgcgatttggttttatagcccccagcgaagcctggcatcgggttgtttgttggcgtgcacaacggcaacagactccgcgtttctcgcccaggtagatgcgatgtggtttggggatgaagatgacagggtgtattgatcgataagaggggtccgcatgccatagacacagcgtaaaagagagaaaagaaaaaaaagttgggctagaaagcatatgggctgtacgtgtcgaggcttcaccttttctaattatttttttattatttctctattttccgttttcttctcttttctgttttagttttcaaatttcataattcatttttttgattcagttttgaatacaag

SEQ ID NO: 36585 - DNA, 942 bp, Zea Mays
tcccccatgcgcgaaacaatcctccgcctccgtcgcctattcgcctctcccactctctgcccccgcctcccctccttctctccctcccccgcatgcctcaactgctcctctccggcgtcgtagccgtccctctcgctcccgtgacatccagatctgacttgggggcgcagctcagagtgccaatgcgccgcaacctccgttgcgcccgcacgtgccctagccagtcgccatggagctcatccccatcaagcccgaggtaggatctctcgtcgagattggataggagctccgaacgcgagccatagacggggagttgatgccaccgggcaatggatggtcgcatcctcaggacctccgcgtgcaacagcagcggctatcatttttctcatcgcctacttcaatagcctacagcattagcagtaccgtgctttttacttcacaagaaaaggttggccgaggtccctgctctagcgcaaggatttctactgcaacgattgcaacacacacaggaacttttttgaaaccttcaagcttcaacgcttgaccctttgcattggtggcatagtgaatattgaactactggagagaatacaaaaacaatttacggatgataggtactacatatggcagatgaggcaactggccatggcatatatgttgcttcgacctgtgcagtttatggatgaagacgaagctgacctgcagatgtaaactttgttttctatggaccaggtcttgtatatccaaattgaacggattgttctaataaatatatcacaaaaagataaagtataatatttgttcttgtgcgttgttgcaatgaattttagtgagaatagagacaagtggtgttgtgtaatggcacttgtaaagagagacagtacacctagggttggtccattgatgatgaacctctgtgcaaactttgtcaaggactttgca

SEQ ID NO: 36586 - DNA, 815 bp, Zea Mays
caagcagacccgtctccccccaactcccgagttcatcgttgattcttgtaatcgccaggatctgagatcctcgctatcgcttgctgagcgtcctagctccagggtataaataccatcgtgtctcgccacctctccatcgggtcttagccatggacgacggagctgaggccctaagtactgagaacgaaatagaggaggagcagtggctgccgccgttgttgaatcatgttttcttcttcgctccggcctcggcgtagggtcgttggggccgtcagggctcgtggatcccgtatcatcctctggggagcacgaggatcatcggtgggttccgaatttgtcgccgggcttcgtcaaacgccgcggatccgccgagccgcgtgggtgggggcctctgcgtcaccgtactagttacaggaagcttcagctttgggatgaagaacttctcttatgacggaatgaagggagataaagagtgggcgacgaagctaaaagccaaggaccttcgacttaacatattgacgaagctcaagcatgaagatgactgaaaggggctgaagaccttatagtcctcaataattcatgttaggattataggcagttaccaatgacataaatgtaattttatccgggctacgtctcgtgcctataaatagatgaacagtaacaccgtactgttcacgctggattgtaatcgctctcgcgtcattcttgccctctcaccttttggcaagctgaaggtaccatagtaatatgagtattgttaatgcttattcatgtttgatgaagataataataaatgaatcattgatataaaa

SEQ ID NO: 36587 - DNA, 800 bp, Zea Mays
tctacaagtttgggcagactggttcctgttttctgatgcatttcttaatgggctgagggctacttttcttagatcaggcaactctggtgttgttccgtttcactcgttatgcggtgatgcacccgaaattgaaaagaaaggtagctctgaggatggaaatgatggatttaagcttaatgaagacggtgccttggctactggaaaggcagcagcgacaaaggagctattagggctcccactagctgaacttgaacgccgctgtagacataatggcctctctctgtgtggtggtaaagaaatgatggtcgccaggctgcttaacttggaagaggctgagaaggaacgaatatacgagaaagatgttgacatgaaatatgtgcagggtgaacagcatgtggttggaagagaggacagtggtgtgaatgctcatagtacttcaaggtttggtgaaggttctaatggtgatgaattagatgtctctcggaacagtacgagagctggtaaaggacgttctggtggatctgcttctgccgaacttgaatcatttccaagcaagaagccgaaatacgatcctgttttgccagcttctaaatggagtcgagaggatgacatcagtgacgatgaagataggaaaggtggccgaggcttgggattaagctattcatccggaagcgatattgctgatggtctcggaaaggtcgatacaacagaagctagtactgaccacacaagtcgtcatcatgatacgattgttgatgaagagcacagcggctctggctccatgcacacgggcattgtag

SEQ ID NO: 36588 - DNA, 2424 bp, Zea Mays
attgtgtaatcctacactagcagtctagcgctaccaattggcacctcctgctgccgcgccaccatgctctatgctcacctccaccttcgccgcccctgctccccgttcgcctactgcccctacagcaagctatccgtttccatcccaaccctcaaccctctgccacgcgggccgctttctcgccgcgcctgcgcctgcgcccaccggtacctacgacacgtcgcgtcaccggcggatgaggaagaggctgggtacggggagggcagcgtggagggtgatgatctgggacccgcgtcagcggcggcagtggcagcgaccatccgccgggcctccagcgcgtcgcccgtgcggttcaggtgtacgtgagacctgctggcagttatattatggatcagctggaactgcgccgagttgctttatatcctggaattaataatctttctgaaaaagatacccctgtcctagtttgtaatttttctatatcttctggactacgagcagcagaagcttttctagtaaaacaacagatggaagtcataagagaatttggggctatagttcttccaatggtgaaacacccctttgttgttgggttccttgtcgtagagcttccagaattacatggtggacgtgctatgaactcttatactgctgatactgagttaccacctaacacatttatggataaatcatctgatgtaactccacatactgcgtgggatattcaaacttatggtgatcaggcaaagggttattctcagcttgttaatgaatggaagaatagtgcccttatgatttctcgaactctggcaatggcttatgttatggatcagaaagcatatctgcttcaacaaacttcctggcaaaataatgttagaatgagtggcttagtggaacagatttggggccccctctctagcattcgtgctcttgcaaagatgttatcctttcacacaaagagaaatcccctatgatattattgaagatatgctcacccaaggtgatcacatgaaagatgctctgcaacaaattcaagatgctgtatatctgactaaggcaaacatagttagaagcaatgaggagactttaaagacaattcagagatcaccacatccttcaagaactttatcagattataaatcagtacctgggaatgattcacagaagttggatccagttttagccctgagttctgatgggtatgacatggtgatgcctatgccacctctatggctggcacctcttcaacaccaatatgatagaccatgtgatctctgtgatgtgctgaaggatttagttgcaggagcattaccacttgcttataagcagcagcgcacattagatttaacagaaatttcacatccacttcatgttgctgttgaggaatctgctttaagaaaagccttgagtaatctgattgagggagcgctcctacgtacacagcatggtggagtagttcaaatatgtgcagtcgaagcacctgcaggaggcgctctcgtggtcatcgatgatgatgggcctgatatgcaatacatgactcagatgcgctccctggccccatttggatcagaccttgcagatggtatgctcgaagataacatgacgtggaacttcatcgcgggattaacggtcgcacgtgagctacttgaggaatatggatgcgtcctgcgtgtgatatcacctcgaaggactgatgcggttataggcaccggagggagtcgtgttgagatatggttgccatcttttcagacacaagcagccaagactagtcaagaagtgtagtttacatctgaggaagcgaggcatgcttcgttttcccgtacgttttgaaatctgtagatattggcttaccggaatgttactgtaccagtaacatctcatatgttgaatttgcaaaattacaggacgtgcgcaaatgattgtgatggtgatgttgcattgctgatgctccttttgctacttcatttctacttccattgtctcattgctgatgctccttttacaatataaatggtcgaatatgtgtgtgtgttttcttcatcctgcattcctgctgatccaaaccaactgacacctcaccattgcaaacccaccatcagaagctatcaacaaacaaaaacgccatcatctgaccattagcagccaaatccccattcagcaaaaccatgtcttggtcgtttcttggcgtcagacgctttgttcccttgtcagctgcgttcaccgtccgacgtggacgctctgctcggtgggtgatccaggagagaagggcacgaacacgtgaccgccaaacataggccgcatcagcgcgtcatcgaccttgcgccagtagtagtgcaccgtgtgagtcggcttgctgaggaggctggacggcctcacaatatgtgccatggttcgagcctgcatgcttgtcaggaaaggtgagag

SEQ ID NO: 36589 - DNA, 3681 bp, Zea Mays
aagaaagaaaaaaaactgacacataagaaaagagcagcgagcaagctgaaggtgaaagccacagcagctcgtccccttccccccacttcttcctcagataaggagaggccccaggccagagaaaaaagcatcgaatttccccccgttaattggcctgagccctcagccgtctaccagcagcagctagaggcagacaagctaggttttactgcttcattgagcacaaagatccgctgacctcttgctcttgatgattggatcagtggtttcaggcttcggggggttcgatcagatgttgtatgaataatagcaggattgcttgagagactatagtttgggtactgtttgcttctgtatttactgatatgccaccaagagtacaaccagccaacatgtatattccttggtgttcaagctggattgtctttgttgacgtcagagctgactatgatttttggcatagcactcggattcaacctcctgtttgaatatgatgatctcatcacagggatatgctttgcaacagtggtacctaatctgctaccatatgctatatcccacctgggaaagaagatggaagggacaataaatgcctgcatagcaggatttgcacttcttagttatgtgcttggcttattggttagccagccacaaattcctctcacgatgaatgtaatattccccaagatcagtggtgagagtgcttactctctgatggcgcttcttggtgcaaacataatggcacacaacttctacattcattcatcagttgtccagggtcagaaaaagtcatctgcagttggtcttggagccttatttcacgaccaccttttttcaatattgttcatttttactggaatctttatggtgaactatgttctaatgaactctgcagcagcggaatctactaatactcttctcattaccttccaagatgttgtagagctaatgaatcagatatttgtaaaccctctggcaccaactatatttttagtggttcttctcttctccagccacatcatctcgctgacatctgctatcggtagccaagtgatttcacaccatttattcggtataaaccttcctctttctggacatcgtctcctactgaaggtttttgccatagttcctactctgtactgggcgaaagttgcaggagctgaagggatataccaattattaattatatgccagattattcaagccatgcttcttccatcttcagtcgtcccactttttcgtgttgcttcatcaagatcaataatgggagcccatagagtgtctttgcatctggagatactggtttttcttgcatttctccttatgctattttcaaatatcatatttgtggcagaaatgctatttggcgacagtgggtggatgaacaatctgaaaggatatactggaagccctgtggtgctcccatataccgttttagttttagttgcacttatatctgtggctttttcactgtacctggctgttacaccattgagatctggaagtcatgaagctgaatcccatgaatggtctgtgcattctcagagagaactcttgaatacttctcaagaaagggaagatgttaaggtggacaatgttacatatgaggaagatcaaagatcagatgttgtcccttctcccagggatgtgcctgacagccatccggaactggccttggactatattgatacttctgacactgctgtagaatctgatcacgactctcaacaatctactgcttatgcatccactgctcctgaaacctgctcctccccgtcgtttactcgcgaggagtcaaaatcagttgttgcagtcaactggccggagcctttggagaaggttcctacttctactgtgatggaggaaagcacagtagaaaatgtggtctctaggatcacgactgaaagagatgttttagtagaaacagatgttgtctcgggcaaggataaggaagatatccgtactttggagtctgagaagtcaattgttgatagcaccccatatgtgtctgatgacggtccgccatcccttactttcagcaggggaaagggctcagatgcaggaaatggcagtggtagtctctcaaggttatctggtttgggccgtgcagcaaggagacagctagctgctactcttgatgagttctgggggcatctgtttgattaccatggtaagctcactcaagaagctagcaccaaaaagtttggtatcttgcttgggatagaccttagaacacctagcacatctgtaagaacggataaacaagctgctgaaatacttaagagcccactggtgagagactcaatgcggggggcagcttttttgtcaagctcagtggacatgatgtcccctaagaatgaaacgtcgaatttggaacttgcatatgggcttcagaggggacctggcatgggattgtcaagctggtctcagggtatgcagctaccaaatacacagctgcagagctcaagcaatagcctacttgagcagagtgcaagattaaactcaaattttagttcatcttattcagacaacaatcagttctaccaacctgcaacaattcatggataccagctcacatcttacctgaaacagatgaatgccagcccaagcctttactctagcatgccgctggacccacaacggcttccaaaatcatctgtgtctgctgtgccaaactatgctgattccatgatgcatgctcgtaatcataacctgcttgcttcactgggtggtactactacacagcttcctgcaacatcccgcgtaggctcaatgatgcctgaaagatcgtattatgatccttccagcgttgatgggaatgaaaacgctggttcacctgcttactcaaaaaagtaccacagctcacctgatatgtctggaataatcgctgcaagtagagctgcactcttgaatgaagcaaagttgggtgctgccattggaccacagtcatacctcagcaggctggcggcagaaagatctcaatatgcaagctcaacagccaggcccgcggctccattagcatttgacgagctttcacctcctaagctccagagtgatatcttctcggcgcagtcaagcatgagaccaagtgctagatccctttgggctaagcaaccatttgagcaattgttcggcatgtcaagtgcagagctcagtaaaggtgacttcaatcttccaggcagatcaggtggcgtggccaaggatgatttctcttataaggaatctgagacgaagcttcttcagtccctcaggctctgcatcatgaagctccttaagctagagggatcagggtggctgttcaagcaaaatggtggttgtgatgaagatctaatcgaccgagtcgctgcagccgagaagctattgatgcaagggactgccgagaatcaactgctgcttcatggtggtgatctccagcaacattcttccgaccaggccggcatccagtacatgcgcacgcttcccaactgcggggaggactgtgtttggcgcgcgtcactcgtcgttagtttcggtgtctggtgtgtccgccgagtgctggacatgtctctggtggaaagcaggccagaactttggggcaagtatacctatgtccttaaccgtcttcaggggtggacaatcatctgaaatggcattacaatatagaaaacaaaaggactggcccaggattttcccgtatttatg

SEQ ID NO: 36590 - DNA, 899 bp, Zea Mays
attttgcacccccacccctctaaatttttgagccgccactctcttcctccttctccctcgcgcaggtctgctccagccgactccctgtcttcttcccgacagcggccagcagggagctcggccagcagccatggcgtcctcccctacttccccatggaagtcggctccatctccatgctccctccctagccgagcacctccagcagctatggttgagcttcttttcccccctgatgttcctttgcgcgcacgagctccctgggccgacctcgacgagctccatgtccatgggcgacgcagcagctccatttcctccatggccatggcgcccccctgctcttccctgccagcggccaggaaacgcccaggaccagcaccctactctgcccagcgcccccttctgcacggcgttcggcagcagggagttttttttcttccctgcgcgtaggagctcattgggagcacgccgacgcccctgctcgccccctccatccttttcccttagtgcggcagcgaggagcccctgctcggtcaggtgccatggcgtccaacttttctgcgcagcagtgccggttcaaaaaaaatagcagcctcggatcccctccgcaccgcgtgcttcgctcgatctgcgcagtcccgacccacgccgtcacgttggtgtttgagacagccccgtgccgcgtcgtcgatctacgcagcgcttgcgagccatcggaaaaaatctttgctagatgttgtcgcagcatctcgcgtgatgcatgattcggtgaagcacctaaaccatggacgcatgcgcgactcgaatccatgatgccaggttgatggatttataatttactattgatgtgattcggttgatggcatgcatatagatatggtgtatattggtgttgaatatg

SEQ ID NO: 36591 - DNA, 487 bp, Zea Mays
atactttttggtccatttggaagacaaacaccccggtccagtcctcccccgatgctgagggatacccgtggaagccctcatggccacctgaggccgggcaaccttccccagtttggaagggacacaagcggatccgagcaaccacgccctccgccgccactatcgtccacaccgctgccatccgctctgctgccgctccatcgtcgtccttccccgacgcagtcgcgagcgggacgtgaggcgacagtgccctccaccaccgccaccgtctcggatttgtcgccctccgccgccatctctgccctcggttcactgtcctccaccgtcgtcttccgcgacacgatgtacaatacaatgttgtctccaagacacagtacatggtcttctccaagatccagtacaaggtcgtctcctccaagatccaaaccccaacgctagtgagaggaagttgctggtttcagtttggggcacagtttttggaccagtt

SEQ ID NO: 36592 - DNA, 2143 bp, Zea Mays
gccttctaggcttccactctcaccgcagtcgccggtgtcgcctccgcctggatcgtccgccactgccagctgccattccgcctcggatctgagtcgccttgctgcctctgcgcccggacacagccgcgcattccccaccggctcgccgagcaggggccctgctcccacgctgctcactctccccaatttcccacgcacgcctagcgaggtcgggggttgaggtctggcggagatgggcggcgtgccctggaaccgggtggaacttacgctgctcgtactctacgcgctgggcttctacctcgtcgtgatctggaggtcgcttcgcctctcgcacgaatattccgggaggctctacggactacgcgtgggatcacttgcgggtcatctgaatgacctgtcggatgcgcaatggagaaacttccgcgggaacttgccaattctgactgttgtaatgggagcatttctgattctggtcaatacgttgagatattgctatggcctgaaaggtcgaggtactgctttgttgtggctcatactgtctttgagctatttatgctatcttcacggtgcttgtgttgtttttgttcttttaattgcactgattaattactcaatagtgaagctatttgctcattataagtattgcacaagtctcatttggagcttcaacttatctgttcttattcttaaccgagtttatgaaggatattcattctcattgttcggtcaaaatatggcttttctagacaactatcggggtacattcaggtggcacatatgcttcaattttgttgtattacggatgattagctttggatgtgattactgctggacaattcattcttctcattttgacttcaagaaacatatgcaaagatgtcaggtttgttattctggaaagacatgctactttgctttgcaggaaagagggctcagtcttgacagatatacatttcttatgtatttatgctacttgacatatgctccagtgtatattgctggacctattgttggatacaatgcatttgctgctcagcgatcttgcagttagaggtaccccagaaaaattattcatttgcacaaatatcttggtatggtctaaggtggattttgagtttccttcttatggaaggcatgacacactttttccactacaatgcctttgtagtaagccggctatggcagcagttatccccttttgaggttttcatcatcagttatggggtgttaaactttatgtggttgaaattctttcttatttggcgctacttccggttttggtcactggttggaggagtcgagactcctgaaaacatgccaaggtgtataaataattgccatgatctggagagtttctggaaaagctggcatgcttcttttaataaatggttggttaggtacttatacattcctcttggtggttctcaaagaaaactactgagtatctgggtgatattcacgtttgtagcagtgtggcatgatctagaatggaaacttatctcatgggcatggttgacttgcttatttttcattccagagatattggttaaatctctgtccagcaaatttcaggcaactagttcccttgggatgcttgttcaccgtgaatttaaagcaattgctggtgcagtgacaatcagctgtcttatggtggcaaatcttgttggttacgtcgtggggccatccgggattaaagttctgatatcaagaatggctgggaaggatgccctgccttcccttgccttcatatttactacgttctacgtgggcgttaagcttatgttccatatacgggatgctagcaagaaccaaggttgagggagctttaagatgatgtctccagttttgactcgcaagcaagcagatggcttcgccgtggctgaagatgatagcttcgtcttttttgtttgcatattttgtttttgttttctaaacagtgtcgagagaacatcagcgctataagcgttgacatgtgattttgcttttagaatatataaaggtaaaggctgactcattagcgtggtgaatgttgaagttgcacactgctatacgtccggttgtaaccatgatcgacgtgattcatctggctcaaatgcatatgcgaatttaatgtgttgctaaaccaactttgaaccttggtttc

SEQ ID NO: 36593 - DNA, 3495 bp, Zea Mays
ctgcattgcaggtcgccgacgccgcagctgttgatctataatccgccacctcaaacaacagaaaaagcaaaaattccccctctcgtggttagcaaccgccgcgctggaatctgtcgcgcactttccccgctttcctccgccctgctctcacgtgttcatcgttggttctcactccccttctcgcccccttcaacactccgcgcttctgcgcgtcattgccagcggaggcgcgtcgctatcgcctgggaacaataagagtttgcgcgtctcgcgactgatcggtggcgactgccactcggcggcgacttggactcgacttccgggcaacagggcgaggagtcggccggccagtccactgggttcaaatcggcctcggcaccgcggcgcccccccgcgagttcttgctggattcgctcggagcacggcgcgggcttgtcggcacggcgccatgcagcagcagcagcaaggttgataatgtggatgcactgaattgctactatgctcgtggagacaaaaatccaacatttcagaggcggatatattggatgcttgatccggcttatgaacacattgtccttgtccactatagggatgttctagagggcagcatttcagtatctgcacgaaatgattcttcaacattgaatcagaatggcagtgctagcagagctgaagtacatagttcacctggttggacaagcgagttaattgcacattgtactaattcgtgcagtccgggatctgctgaagaagtcagttcccaaattagtgcaagtgaatctgatttgattcaacataaggcagccttgcggaagcttaaaatgcagctgagtctggaagacaaagaagattgtgatgttaatgccgaggatgttccagcagataatgagcctattattttacctgtgattcagaatgaggagccaggcacttctagaaatcatgatgatatctttgatgtgctggactttagtgaagatcatatcaacggaactggaacccatccatgtcacagtgctattgacgtgctaaaaaattcagacacatggttagaggatgatcaacttgaggcaattctgcatccagcgtgtatgacattgactgaaaatcaatggttcaggatacatgaggtttctccagaatcagcgttttcttatgaaagtacaaaggttatcattgtaggagacttcctttgcaatccccctcacagttcatggcaagtgctgtttggtgatgttaaggtatgtgtggaaattatccagcaaggtgtcatccgttgccatactccatgccttgatgctggaaaagtgagaatgtgcttgcttgatgggaatgggaagtcctgcagtgaagcacgagaatttgaattccttgaaaagcctaccaaatgcatgattgatggaaacacgaacccctgcaatgaagcacaagatgtcaaactgcatcagatacctaccaaaagtagtgaggagctgtcactgttactacattatgtgcatacactttttgatggtcatgctagtgggctattttcaaattttagcttgccactccaaaatcttggctgtggaatccaaagcaatcaaatggatgttatgaagaaggcgtataagcagctggaccctgagaatgtggtaagtagtgtcatggaagtattgcttaatgacaagtttaagcaatggttgtcatccaaatgtgaacagaatattgatggagaccatttgcttcctaagcaataccgcaatattatacatacggttgcagccttgggatatgatttggctttgaagccactgcttagttcaggagtgcctataaactaccgtgatgcaaatggatggactgctctacattgggctgcaaggtttggcagagaagatatggtggtggctcttcttactgctggtgctgcagctggtgcactttcacatccgacatcagaggatcctgctgccaaaacacctgcttcaatagctttagcatatggtttcaagggcctatccgcgttcctttcagaagcacaattaacaactcatcttgattctatcgagtcaaaagaaaatggaaaacttgattctagggaagaggggatatgtcgtgctgtggacagaatatcagacaaaagcagccacgtgcatggtggaactgatgatcagcttgcgcttaaggattccctgggagctgtccggaatgcagttcaggctgcagggcgcatacaagctgcattccgaattttttcctttaagaagaagaaagagatggctcttgggaacagaaatagctgctgcttgtccattagtgaggcaggagcagtttcacatgatatgctggagaaagctgtattatctatccagaagaacttcaggtgctggaaaaaacgtaaagaattcctgaagatgcgaaataatgttgtcaggatacaggcccgggtgcgagctcatcaagaaagaaacaagtacaaggaattgatttcaagtgtcggaatccttgagaaggtgatgatacggtggtaccataaaggtgttggtctgcgtggattcaattctggggcaatgacaatcgatgaagaggtggacgaagacgttgccaaggtcttccggaagctcagagtggaaacagccatcgatgaagctgtttcaagggtatcatgtatcattggtagccctaaagcaatgcatcagtaccgaaggatgctcaataggtaccaacaaacaaaggatgatcaggagaagtaatgcttgtgttaaaccaacagtgatggagcaaacagcaaagcacaagccacccactatttatttatctcccttactgaagcacaagccttggtgactgaatggacagtggatcccgagtaaaactgaaaatttcttgggtgaactagaaccagctccaattcatgctggacgctgtttgagtgtacacagcaacgtcatgtgcaatagctgacttctggctgaaagttggtaaaggcgatgacttagtggtatatgcagaagcttccaaaagcctgatgagcaaggtagatgaggtctgagaaacactgcattcgatatatatatgccttatgtactaccttcatgcagtaggtttgtagtaaatttgtgcgtaactcttcttctgcgtattccagaaaaaaagtttgtagtaaatttgtactatatggtagtaaataggggtcaactattgtaatttgtagcacaatgaatcttgtaagaaatctcagtttagaaatactccatcttttacacatgggatgatgacgaccgatgatcaattttgccagttaatacgttcgccgcagtcctctattggcagtgacattccaacagttgaacgccagctgtttcatgcctttggcatcagctttcaaatggagcagcgatcaaagaaagcctcgtagcattaaacttctctctcggtagtctcgtgatcagaattcagatggctcaagcaactgccaacagaataaacaatcaggcagggtgcgagccactg

SEQ ID NO: 36594 - DNA, 1109 bp, Zea Mays
cgagtcctctccctcctcctacgagtattctagcgcgagtaaatcgctgcgtgccttggcaatcaagggagcaacacaccatttgaacagctctgcacctttcaatacgccactacctgcactgcagcctgcatcaaccgagcatcatggcctcctccgtctccggcaactacccgcgtttcaaggtcatactcggatcgtcgtcgccggcacgccgcgagatcttggccgacatgggatacgagttcaccgtcatgtcagagcgccgacatagacgagagggcgatccggagggaggaaccagagcagctggtcaaggccttggctgaagccaaggctgaggccatcaagcagaagcttcagggcgactctgctccggtcacagacggagaccaacctgcccgtctgctgatcacctcagaccaggttatggtgagcaaaggggtgatacgggagaggccacggagtgcagaagaagccagggaattcatcaatgggtactcgggcgatcgagcgttcgcagttaacttcgttcttgtcaccgacctgagcaccgggactacaagaggaggatgggacgtacctgagatcaggtttcagcacataccggacgagttcatcgaccaagtggttaatcagggcgacatgacctgcgtggccggcgggcttaagctgacacatccgtcagtacagccattcgtcaaagaactggtgggcacggtggatagcgtccgaggtcttccgagggagctcaccgagaagttgattcgagaatcgctgcaaggaaagtgatttttgtttgcgagcagaaattcgtcgatctgttgaagcagcttccacaggagtttaacagctcctgagtagtttcctcgtgttatataagtaaaggaagatgatatcgaaatacatgggtgctgaataaaacagtaactagtacagtgctcgtgtgtgcaactgcacaaattattcaaggggagactgctgctgtgttagctactgctaatggaatgaggggatagtagagagggagcagaggtaggagacgagaataggggaggaaacaggaacagactgtattgattcagagtaaagttcatacatggttctct

SEQ ID NO: 36595 - DNA, 949 bp, Zea Mays
gtgacgtacaagtacaaccatgtgtgtgagaccaaactccccgcccgcgccgcaccgcttcctagttcctttcctgaaacggtcgcctggacatcaactatgctgatggatcaacgaacgtgatacgggtctcctgtcctctcctctctctctctctctctctctctctctctctctctctccaccggctatatcatcgtactgccttcgtctcttccgtcagtagctgcagatttctgtctggtacaggttgtcgtatacgttgcgtgttgctgcttgctggggagaggggagcgctgttgcagatggcaagcttcaaccaagagagcagagcaggcacacagagggaggaggcacctctacagggcaagtacggaggcatttctccgaagaaggcgctcatcaacaaggaccacgagcgcgcctacttcgactccgcagattgggtgctcggcaagcaaggcgtgagcagcaacagcccgacgacggtgcccgcagccgagcccctcaagcccaagctgcagcggacggcgtaccaccagcttccccctcggcggcccgcgtacacgtcgtcggagtagctcggcgagcggggagtcgctgcagtgcagcaccgtaggaagccggaatccacggaggtggcgccaattgggttgtacatgttgagaaacactaatgaaggattacgtggtaaataccgaatatatttctaaaggatatcacgtctatatatatatatatatacatatatatatatatagaacatatacaaatgtatcgtctcgtgtagaatatattagctactcatatggaatatagatgagaaagaggctagagggcccaccctatatattatgtcgtctcgtgtgtttctgtgtcgtgtttatcggaagagagaagtattctacagcttcttgcgtctaatctgctgacgtacggcccatcctat

SEQ ID NO: 36596 - DNA, 2865 bp, Zea Mays
ctcccctcaccctttctctttctccctcgaccgccccggatctatctcgccgcgccggcgcgcagctgagccgccgaagcgaggaggcaatcgaggcggacgaagcgccgcaccaaattcgacgggggatcgagcaccagaggcgtagcgcaaaatgttcaagttcctcaaggaggtggtcgcgggatccggatcgggactcaaggacttcccctacaccatcggcgagccctacgcatcggcttggggctcatggaaacaccaccgcggtacctccaaggatgatgggtcgcctgtgtcaattttttctctgtcagggagcaaccctcaggacagacacatggttgctggtcgcaacggtgttaagagattacgaacatactgaagcagaagctgcggatggacctgccatgaaatacacaatttatattgtaacagagcctgttatgccactttctgaaaagctcaaggaactgaatcttggtggtacacagagagatgagtactttgcatgggggcttcatcagatatccaaagctgtgagctttctcaataatgactgcaaacttgttcatggtaatgtatgcttggccagtgttgttgttacacaaaccctggattggaagcttcatgcttttgatgttctgtcagaatttgatgctaataatgaagcctctggtagccccatgttgcaatttgaatggttagttggaacacagtacaagccaatggagctgtcaaagtcagattgggcttcaattagaaaatcacccccatgggccattgattcttggggactagggtgtttaatttatgaactattttctggtgcaaagctggctagaacagaggaccttcgaaatactgcttcaatcccaaagtctctacttccagattaccagaggctcttgaattccacaccttctcgtagactaaatccttcaaaacttattgacaacagcgagtttttccagaacaagttagtagagaccatccagttcatggaaattcttaatttgaaagacacctttgagaaagacagtttttttcgtaaactccccaatatagctgaacagcttcctcgtgaaatagttctgaaaaagctgctccctgtattggcttcttctcttgaatttggttcagctgccgctccagccttaactgttttgttaaagatgggttcctggcttcctgctgaccaatttaatatcaaggtcttgccaactattgtcaagctttttgcctccaatgaccgagctatccgagcatgtcttttgcatcacataaatcagtttggggaatcaatgtcagctcaaattgttgacgaacaagtttttcctcatgtagccactggcttctctgatactgatggtactattcgtgaactgacattgaagtcgatgctcgtattagcaccaaaattatctcagcgtacaatctcaggatctctcttaaaatatctctctaagctacaggtggacgaagaacctggtatcaggacaaacacaacaattcttcttggcaatattgcaggctacatgaacgatgggacaaggaagagagtactgatcaatgcattcacagttcgtgcattacgtgataccttccctccggccagagcagctggaatcatggcactgagtgtcactagttcatactatgaaatgacagagattgcaactcgcatcctgcctaacattgttgtgctcacatttgacccaaatagtgatgtccgaacgaaggcttttcaggctaccgatcagttcttgcaaatagcaaaacaacaccatgaaaagcttaatacaggagacaacagtgtggctgaaagtactggtgttaagttaaagcctggaaatgcaggtttacttgggtgggccatgagttctgttacacaaaagggtaaaccttttgaccatgccccaatatctactgcaaatgccaataattctcaagcatcaacaacctcgactgccactccagacactcaggcttccacactagcgtatgcaccatccacatccacctcgcttgatcaagctgcatcagcatcagcaaggtcgtcagtagatgggtggggtgagcttgaggatggtaatatccatgaggagaatagtagcgataaagatggatgggatgatgtagacccatttgaggacaagccatccccatctcttctatccaacatacaggctgctcaaaaacgtccagtggtgcaaccaaagcaaccggttgcaaactcatctaaaccaaacccactgaaagcgccaaagtcagaagacgatcctttgtggggtcctatagctgctgcaccacctaaaagtgcagtaaaatctgcagacatcaagccatcaacatcacataatgatgaggatgacctctggggttcaatagcagcacctccaaaatcatctgggaagcctttgaagccagctgtagcgaatagtgacgacttatggggtgccatcgcagcacctccaccagcaaccaaagccagacccttagcctcgtcaggtaggggccgaggaacaaagccagcgcaaccaaaacttggtgctcaaagaataggaagaacatcttcaactggaatgtgacgtcttatgatatcaagtgttgtacaagaatgcaaagttttcctttttttttcccctgccttgcgttgagtctgtccaggatgacattctttgtaaactagtaaaaagatttatgtatatgagcacagttttgaccaatgtattagtattattttaccattgtgtattaaaatagatccagaagatttttgcacatcacagctgcaatcatcttaagtccatattattaatatattgctatgtcttattttggcgtgataagagcaacttaatg

SEQ ID NO: 36597 - DNA, 676 bp, Zea Mays
acggcaccaccctgccctcccgctcatcgcatccatttggagggccttctaggcttctagagatggctgatgtgatgcagcaggttgctgatgtgatcgaccgagctttgttcatgctcgatctgctaagtagtgctatcgtttcttgtacgtgtgctagccaaaaacggggaaagagtaggaaatgcaggccactttgcaactactccgatccgggcggccggagaaattgtcttgatggggtcagccatttttctagggtacaggggccagtacaggtacatgcacgcatgatgcatgcacgccaagccgtcccctccgattgctctacctaaaaggtgtgtccactccatgcatccatgataccctggagattgatacggggggtggctaccacaagtccacaaccacaatgcaatgcaagcgtcgtgcaagcaagctttcatgtacccgacgtccgacgagccccgattattctcccgtccatacatctgtcccctctcaaccattggaagttgtttatcttggtaggtactaggtactagctaggggtacgtatcagctgatcctggaactttccttcatgcggtgatgcctgaattcgtacagcaaaaacgatgggcaaacatctactgtgactgtatttttttttcagcagcagagatattcgttagtg

SEQ ID NO: 36598 - DNA, 2338 bp, Zea Mays
ccgccgaccagggcgtgtccagggctgccaccaccttttgctgttgggcccgtcccatgccccccactaaaatactccaagccgctgggccgccgtggcccacccaccgccgtcgtcaccctcccgccccgccggccgccgcagatgggccagccgcggcggcgcggctacccgcacggccgccaccaccggtgcccgcgcggcattgcgctgccggcggccggagcgggcctgctcttcctctccgtctcgctcctctccgtctcactcctctccgcgccgccgctcgcggacccgcgcccgggcctcggcacctcctcctcctctcgacggttcctccgccgccatccggcacgcggtggatggactgggcaggatgatctttggggatcgaagcttgctagcaacttccacggatgcagcaactctagtagtagatttcttgattctggtattaccacacaaccagatcgatacttgattgttgttacaagtggaggtctcaatcagcagagaacagggatagttgatgctgtagttgctgcacgtatattgaatgctacacttgttgttcccaaactggatcaaacatctttctggaaagattcaagcaatttttcagaaatctttgatatggactggttcatctcatttcttgcaaaggatgtcagaattatcaaagagcctccagaaaaaggaggtaaagcaatgaaaccttataaaatgcgtgtcccccgaaaatgtactccacggtgttacttgaaccgtgtcttaccagcacttctgaagaaacatgttattcgaatgactaaatatgattatagactctcaaataagttggacactgacctgcaaaaactacgttgcagagtcaattatcattctttgagatttactgacccaatacaagaattggctgaaaagctaatacaacgaatgcgagaaaagaacagatattttattgctcttcacctgagatttgaacctgacatgcttgccttttctgggtgctattatggtggtggagaaaaggagaggagagaattagctgcaattcgcagacgatggagaaccttgcatatacgtgacccggagaaaggaagacggcaaggcaggtgtccactaactcctgaggaggtagggttgatgctgagggcattaggctacagaagtgatgtgcacatttatgttgcttctggtgagatatatggaggggaagatacattagcatccctgaaagcgctctttcctaatttccatacaaaagaaacactatcaagccaagaggagcttgctcctttcctgaagttctcatctcgcatggctgcaatcgatttcattgtctgtgaggaaagtgatgcttttgtggctaacaacattgggaacatggccaaaattctggctgggcaaaggagatattttggacacaagagaacaatccggccaaatgctaaacagctctatcccttattcatgaagaggggaaatatgtcatgggatgcatttgcctcacaggtgcgaacaatccagaaaggatatatgggagaacccatggaaatcacaccaggaagaggcgaatttcatgcaaaccctgccgcctgtatatgtgaaaagaccagcagaaactcagcaatagtcaagtccatttctggaaataacctggaacctgtaactgacagtggaataaggaaaaccattggcattagtagaccaccatatcctgtttatactgatgaagaggcagatggatctgatacagaagaagatccggacagcagtgggagaggagaggtgattgacactgaacctgacgatgattctgcggtcagacaggaggaccctgagctagaggagatcctgtcagattagttcagttgtgcggctgtttcccccggttaagctatgctaatctgactgcatatacatgtgttgtatgtggcagcaattttatggtttgggcatcaccgaactagcttagatctgcagccgctggtgtacatagattttgtggtgtgcagctgtccaccctctttctcttagctgaatgagggcatgatcatgtttgtcacctgtgcaagccagatttgcttaccttttcttagtatcccgccatcgctcaaccctcaagcaaatgtgcaaataaaagagaataaaaaaacaagagaagttggttctccagtgccgttcaccatcttgggcattggacggcgcatatgatatggaccggaacctttgcccgacaaggcgacaagcagcttcaatccagttcctcggaggtcgcgttagagcgtgggagttcgcttgttttaataactttttaaaaggccgtgtgtcctct

SEQ ID NO: 36599 - DNA, 257 bp, Zea Mays
cccacgagtccaagcgcctgagcccgggaggcccggaccctcagcatcattaggtgatggactgatgatgatcaacatggtgagttagcagctcgcgtacgtgctgcctatggaaggttgccaagaacggtttcttatatatcgtcgtctcgtcggatactcggatgagatagagttgttttgggatatcaataagcttggcatcttcctaagcgttctttcataaactaataccatccttggctgttcatctttgc

SEQ ID NO: 36600 - DNA, 1702 bp, Zea Mays
gcgccaagggccggcctagagattcggcccatcgccggtgttctggtggatcacgcgtccttctctccaaccgcaccgaccgatatcttcctctccgctagggcaagggcggtgccggtgaggcgatccgtcggtggtgtcggagcggtggaggaggatggccgacgtgcagggagacaacgaagcagttctggaggacgacgctttccccgacgacgggcccttagatacggaggagggaggtggaggagaacccatcagcggaggcgacgaggaagaggaggaggacgtcgacggcctcgccagcttccttgagtcggagatcctctccggatccagcgacgaggatcctattgaccaatcgaattggttgccgcggcaggagcagcggcagcagaaggaggaaggtgatgctgcgaagaataagcggaagcagggttcaggatcggacggggatggctgcagcggcagcgagggggagcagacgaagagggcgaggagggaggagaagaggaggcaggcgaaagggaaagccgtggcgcctcagatcgacacgggcttgttcagcaacgtcccccctgagctgttcctgcagatcttcaagttcctctcctcggaggacctcatctcctgcgctctagtctgccgcttcatgaatgctgccgcgtccgacgagaccctctggcgccgcctgtactgcatgaggtggggactggcctccaatgccaaattcagggagtgcgcttggaagaacctctacatacagagagatagagaggatatggttgaatttgtgaggaatactcctacagagttcaaggagtactatattcagatgcaggctgcaaaaaggagtcaagctccccgtccgtcagaagtcaacgacgacaaggttatgcttgataagacagtagctgaccaggtatctagttggaaaaacagccgggggcttactgatgaagctgtcaaggggcactcttgttctggaaatacatgctcgtacacccagattggtgatgcttacatttgtgagaagactggtcgtgtccacgtgggctgcttctttgtacgatatctggccactgctttgagaggtggctgtgtcctgatgatgaatgggatgctgatgataccgatctgcaacaggctggtgtagtggatgaagcagagccattcatgggatctggacgttacgcacgggcgattatgttgggctacaactgcactgatgagaaggagcttgaggatgccttgcgtttctgttgacgtgtttctgtcgatatgcccttcactcttgatcaagtgaagacgaagccagcggggatatgccggatgtatagctctgtgctatgttttcactgtatttcaccctcgagcatgtacctaagaatagaaggatgtacctaagaatagaacttgtttttgaggtagatcgctgatatgttttgatcagcagagggagccgttatgttgtcgtatgatttcataaattatgcctgtaataaaatataatttacataatgagttttttgtttgtatgatatgatggtggtatatcgtagatgcatgtgagatgccgacgcgtctcgactctacgaatttcaggtccagctcaggctggagggctttaatccaagtatttcatgtctgttgtagcttctacctaaataggtgcgttgtagcttcttctacctaaaaatag

SEQ ID NO: 36601 - DNA, 1182 bp, Zea Mays
attttctgctgctcttcttttcatctcatctctggcctccattggggacaaggagtggtacttctacgtgccgagagaccgcaagtaccgcaacggcgaccgccccaaccgggtgacgccgtcgggctactggaaggccacgggggccgaccggacggtgtacgtcgaggtcaagcggccgatcgggctcaagaagacgctggtattctacgtggggaaggcgcccaagggacttaggagcagctggatcatgaacgagtatcgccttccttccggcgaggctgaccgctaccaaaaggaaatttctctttgcaaagtgtacaaacgaccagggatcgaggacaactttcacctcagcaccaccacggcaagatcatctggctcaaaggcagcagcaaacatggacaagaagcaccaccggacgtcggcgtcgccccgcctggcgccgatgttcgacggtggccactcatcagctcacatgaacaagccatacggtggagcaaacaccgccatagccataacatcatcagctgcagctcgagcagtaacaatggtgcctcagacgtcaatgttcctatcaacaccctcacttagctccaccacgtcgacggaggaggacggtacatcactctacctcatgaagggtgctaataactcaccgatgttgcattcttccacacatgccctgcttaatgcaaactcggctacaatggcaacaattccaatagatgagctgagtagggcaatcggatcatatagtagccaaggaaaccctaaccatcccttgccatcacaaggtccattgcttccttttcctagtatggaaaagatttgggattggaatccactcctagaatctcccaaggtttgcacaagcttcaagtgacttccaagtgactcgaagcatatatatgcatgcatgcttgcacgtattatatatatgaatacaggtgtgtgtatatgtgcaggcgccacaaaattattatttgggctagaatatggttaagatgtaatggaatatatagggtgagttagttctagtcctatgcaatgcatgctccgctatattaatcagttcaccatctccacacatcaatagttggtgtaacgatatgttaatttctattatttgataatgcagaccttgtagttgaactcgattaaattaaagatggaataaat

SEQ ID NO: 36602 - DNA, 843 bp, Zea Mays
tctttttttttgtcatctggctcttgtgagctttcatctctaggctatcccaacttggtaatagttgggttttgggactgaacaccttttgttgtatcttaagggtgagattggccgaagaagtggtggtgacaacgtgctagaaagggaagggtatgctgttgctgcaggttctgcattaggatttgttgccttgggtcatggcaatcgtgcatttggattcatggatactttcctagatcgactttttgaatatattggcaccaaagaagtctaccatgaaaagtacctaaatgcaacatctgccgatgatcaaagttgcaaccctggacagatgatggatggagcacaaataaatgttgatgttactgcacctggagcaatacttgctctagccttgatatttttgaaggccgagtctgaggagattgcagctagactcaatatccccaacacttacttcgatttgcagtatgtgaggcctgattttgttatgcttcgcattatagccaggaatttaatattgtggagcagtcaggtgtggtatttccaacatgagtgaagggactattgacagtgatgaattggatgctgaagctctttttcaagcttatgttaacatagtgactggcgcatgtattgcacttggactcaagtatgctggcagcagaaatggtgatgcccaagagctactctacgcttacaccgtctattttctaaatgagattaagcacatacctgttcgaacatcaaatatactaccaaagggattactacaatatgttgaccgtggaactcttgaactctgcttgcatcttattgttctctccctctctctggtga

SEQ ID NO: 36603 - DNA, 228 bp, Zea Mays
cctacacatataaccggacgcagatcaagctggacgggtggaggattcaagcgtgtgatgtgtctgctcctgtaggacagttggagggagaacctcagcgtgcttgttacggttttctaccttcctgttaccgacaatctcgtataaaactatacactatacagtgtgcttatgtgaacttgcgactttgtcttcttattaagtttttgaccgtgttgggcacgctgg

SEQ ID NO: 36604 - DNA, 2460 bp, Zea Mays
ccttctcctattctatctatatatcacccgcctcttttttctccctcactccgccacaccttccctcttcttcctcagctccgtcgcccaccgccggagctccgaaaggccccgcgcccgccgcctttcctgtaaaaaacccaacctttagctagctaaccgctcctcttctccccctactccccttgcccaaatcagagaagatatttaacggaggaggggaaggagaggatatttagctgattgttgattggtggtccggggtacggtgttcttgagtcgtgaagcgaccgtacagtggctagggccgtctccgggttgcgtgcaggatggtcgtcagagatcgggagtgaggaggcagctcgtggtcgtggaggctaaatgtaccgcaagaacgactcggcactctcctgtttctacctcttcctcctctggttcttcttcttgaaatagaccagcgccagccaccaggtagctacctactagctagcagcccagttgcgactggggacgggctgctgcttgcaagttggaatcttggagcaggagcagaggagcgggagatggagctggatctgaacgtggccgaggtggcgccggagaagccatcggcggcgctggaggcgagcgactcggggtcctcgggctcgtcggtgctgaacgcggaggcggcatcggcgggcggcggggggcccgcgccgggggaggaggggtcaagctcgacgccggccgtgctcgagttcagcatcctcaggagcgacagcgacgcggccggcgcggacgccgacgacggcgacgccacgccgtcgccacctcgccaccaccagcagcagctcgtcacccgggagctcttcccggcgccgcagcattgggccgagctcggcttcttccgcgccggcccgcagcagcagccggacatcagggtcctgccgcacccgcacccgtacccgcccccgccgccgcccgcgcagccgcagcaggccaagaagagccgccgcggcccgcgctcccgcagctcgcagtaccgcggcgtcaccttctaccgccgcaccggccgctgggagtcccacatctgggattgcgggaagcaggtgtacttaggtggattcgacactgctcatgccgctgcaagggcgtacgaccgagcggcgatcaagttccgcggcgtcgacgccgacataaacttcaacctcagcgactacgacgacgatatgaagcagatgaagagcctgtccaaggaggagttcgttcacgccctgcggcggcagagcaccggcttctcccgcggcagctccaagtacaggggcgtcaccctgcacaagtgcggccgctgggaggcgcgcatggggcagttcctcggcaagaaggcgtacgacaaggccgcgatcaaatgcaacggtagagaggccgtgacgaacttcgagcccagcacgtacgacggggagctgctgctgactgctgaagctagcgcagaagttgctgacgacgttgatctgaacttgagcatctcgcaaccggcatcgtcccagagccccaaaagagacaagaactgccttggtccgcagctccaccaccaccatgggcggccgtttgacggctccgccgttctgaagaaaaccaagatcgatgctccgtctgagctgtcgtcggcgggccgccctcaccggtcgttcctccctcatctcgtggctgccgagcatctaccgcctcggtctcaccccttcttcatcacacaccatgaggttagacgacactatacagtactgaatcatttgcaaaggtttgtcaagctagctagattggcatcataatacacggatcaggtgtcagattgttcatgcagtgcagtatgcagcctgaagagtgatgcatcaagaagagatcccagctgggcagcagcagcagcatggaaggtgaccgcagctgcacctcctcctcctaccaccaccctgttgccgttgccgctgccgtcgacgtcgtccgctgcagcatcatcaggattctccaataccgccacgacagctgccgccgccccatcggccgcctcctcccgccggttcgacccgccgccaccgtcgtcgtcctcctcctcgagccatcaccaccaccaccaccgccgctgagaatcgaagaagccacactgtaaatctgccgggaagcggctggtggcatccggcccgctcctccctccgggcgccgcaacttttttcgatcggttttgcgccgcccgggacgggttgtagttgatcgattggattcttcataactgtatttgcgtactgcttacactacccaagtgaaatcgaaaatggcgccttctctcgttgaataaattgcacgtacgctactcgatccgctgcggctcttgctggagtggccgccgccgctatagatagaaggatcaagccaaggaatctgtcatgcatgggcatgtgaaggaggagcctcctgcaatgttta

SEQ ID NO: 36605 - DNA, 1807 bp, Zea Mays
gtgattatgagaactcaaaaagacgacagtcacaataaagcaaatagacaaaagggacatcgattttactcgtggttcggctaatgactactccacattgtaatgacatcctttgggtcaagggttgcactcaatatgtgatccaaagattaaacctaagtgctatatttttttcctcatatcaaattccgtttgtgataaatctttataagttagagtctcccacatcttacataaataatcttaataaaaaacggagtaaaaaaacacaagaacataaccgcagcaataacaatatacacaaagacgggagagagaagagagatggcggaagcgacgccgtacgaggagcagcggcggaggcaggtggaggcgaacaaacggaagctggaggagctgcagctccaccacctctctgctgccatcagagaggccgccgccgccgccaagccctcgctggtcaagaagcggaaggcgcgggtgcctctcgacgtcgccgacgccgtgatggagccagtacggcggtccggccggctcgccaacctcccggataagcccgtgtaccgcgagaaggttcccgattttgggatgaagattaggaggacgtacggatcggtgagaagagatctgaccaaccgggtgtacgcgaccgacgatgcgaggagctacgccatctctaaggcggaggatctggagcaagagctggactccagcttccccatcttcatcaagcccatgacccagtcccatgtcaccgggggcttctggctgggccttccgattcatttctgccggaagtatctgcccaagcgtgacgagatgatcaccctggtggatgaggatgatgacgagtccgacacgctgtacctcgcaatgaagcgggggctcagtgctggatggagagggtttgccgtccagcagaagctggtggatggagattgcctggtcttccagctgattgagcaaacaaagttcaaggtctacataactagagcaagttcctactacgaaagcgaggactgatgaaactagtagcttgtaatctggtgattggagctcagttatggaggtggctgcgttggacaagcttgcatctgggaatcgctggggtgtcttgaaactttttggtggcagaaagttagctgatgtatgaaacccagtatctcctaccaattgttgctgatttgtgtacttcttgggcttaccacttgcacggttcagaaacctgcactatgtaagggggttgttggtggcagctaacctcgttttgtaaatgattggtgcccgtccatgtttctcttagcgttcaatctggcctgttagttcaatttttaatagctacttccatcatgccaccagtattggctttgtcaactgggctaggctggccatttctcattgtgaggaacatggttgatgggcagagaattgcggaggtcgtggagggaagaggtgagacgacgagggactgggtgccaccgccgaaactgtagtcatcgctggagaggaactggccattgctgttgtagcctgcaggcgcaggaggatgcggcggcacagacaggaggggcagactctgttgtatggttttcgcttagatttttttggtagcagttgtatgttctatatacaaactaccccttcttcttgagaggagagagtgcacaccccttcatcaaattgaatagcacgtatgtgtaccgctatctccagcagcttattagctcctatttcttattttaaactccactgtatacagtacaaaacactatatacatggtcctattggccatagcttagtaaccag

SEQ ID NO: 36606 - DNA, 571 bp, Zea Mays
atcttctttgccttagcattttcattgtcttccattacactatatcaatttacaagcgtacctttgataccttgagaggaggtacaaagattcttagaaggctaagaattatgaagctatggccctcaaaaaggtaccttatgtagggcactgttcatctatttatagggaagacgaactgcctttgtacagatttacaataatgcccatcaaggttttacatacgctgtttacaaatgatataaagacaataacgtattttctccgtttttggctttgtgggtctcagcctttgttgttcagttacttcctctttggctcgtgcccgaagtcattgcctttggtcgtcgtcttttctacttgcacatagatgaagcgtccttgttcactgctttagtcgaaagttagcttcgtatgcaagtggaaacgttcctaaacacacttattcataccgaagctatatgctagatagatgattgtttcatcgtaaacaagtgatcttcggtaatggcttttattgtactcttgaaacacaattatgtaatacagttaatcagaggaccttcggcaa

SEQ ID NO: 36607 - DNA, 2595 bp, Zea Mays
agtagatagagtctccactccaatggaggctgcggttggtagaagagttgtagcgtcgttagctgcagtcgttgcaatggtactgatgatgctaccgtcattcggtggcgcggcggcagccagagccaccggcaccggggaagcgagcaactgcacgaggagctgcggcaacatcagcatcccatacccattcggcatcgagcccggctgctacctcgccgcctggttcaacctgacctgcgaccactcgtacgagccggcgaagctgttcctcggcgacggcacggtgcaggtgctggagatctccgtcgccaacggcacggtacgcatcaacagcacccgcttgctgtacacggtgggcggggtgagcaccacgagcgggacgtggggccggggcctcccgcccggcgggcccttcttcctgtcggagtcgaggagcagcgtcgcgttggtcggctgcggcgcgcaggtggaggtgcgagggggagtggacaacagcctggtcgcgtcctgcgccgccgtctgcccgctggacggcgacgggaggatagtggtcgatagcagcggtgcctgcgctggcgtcggctgctgccaggcgaacatcgtcctgggctacgatttctacagcatccggatcaacaagctcaacggctcggtctatgcgctgacggcctctgtgtacttcgtcgatcagggtttccgcaatgcccaggacatgatcagtgcagtttatggctacttccctgagtcgctcccggccacgctggagtgggtgaccagtaactacacatgccccacaccctatgagtactcacacgaccctcctcccgtcaatggcgaatgctccatggaacacagtgtttgcctagaaggaccttacaatgttgctgatcgtgggagtcggtgcggcggcggggttggttaccgaggcaacccttacgtcggggatggatgccaagatatcgacgaatgtacttctccaagcacctactcatgttatggcgactgcaagaatatcccaggagatttcatctgccagtgccctcatgggtactatggaaatgcttcgcttccaaatggatgccaagacataaacgagtgtgagtacccggaagcccactcctgctacggcgtctgcttgaacttccctggaactttccagtgccaatgccctagtggaacctatgggaactcttcccaaaaatggggatgtcttacaatcaagaacacaaccgcagtttctggtttaggcatcgggctaggagtctctggtggcacaattcttttgctcctaacattcggtagtcctttgataatccgaaaagccaaggagagaaaggcgaagaagacgagggagaaatatttcaggcagaaccatggtttactactgcagcagctgatatcgcacaaggcagacattggtgagaggatgatagtcacactgagggagctagagaaggccacggacaacttcgacagatcccgcatagtcggcggcggggggcacggcgtcgtgttcaaggggatcctaggcctccatgtcgtggctgtgaagaggtccaagatcgtggtgcagagagagatcgacgagttcgtgaacgaggtcgcggttctctcccaggtcaaccacaggaacgtagtgaggctcttgggatgctgtctcgagacagaggttccgcttcttgtctacgagttcatctccaacggaacgctctaccaccatctccatgtccaagggccggtgtcgctgagatggaacgaccgggcaaggatcgcgctacaggttgctaaggcactgtcctacctacattcagctacctccaagcccatatttcacagagatatcaagtcctccaatgtacttcttgacgacactctgaccgcaaaggtgtcggacttcggggcctccagatacatcccgatcgaccagactggggtgactacggcgattcagggcaccatcgggtatctggatcccatgtactactacacgggcagactgacagacaagagcgacgtcttcagctatggcgtgctcctcattgaactgcttaccaggaagaaaccgttcgcctaccgctccgatgccggcgacggtatcgtttcgtattttgtctcgctgctcgcacaaggcagactgttggagataatggatcctcaggtcatcgacgaagaggacggagagatccaggaagtggcagcgctcgcggcgatgtgtactaagctcaagggagaagaccggccgacgatgagggaagtagagatgacgcttgagaatctgctagttaagaagaaacatgttccatgcgatacatcgttaagagatgaagagattgtggctcgttggatgtcaaatgagcaagtctctactgaaacaagcagcagacagtacaccatggaagaggacacactcttgtccgggaggtagctgggctggttctgtgctttcatggaaaatgctgttgcttcatatattgattccagccaggaagccaacacagaatgtctccttctttactgtcttcttggttattctgctagtgttcttgctatttttctgtcactgtataagtatcattgccccccctaaattac

SEQ ID NO: 36608 - DNA, 4111 bp, Zea Mays
tttatgcaagtgctgatctaatttcaaagtccgacaatatgtacggtcgtatatgagccgaactcggaggggagggaggggactgaccgagcgagaatcggagagccctttcggctttggctcttttagtagaagtagagatactcaggttcagttcagcacgcgtgcgctgtctccctctctcttcgcgacgactgtgcgaccgccgccgccgacctacgccaggttccccgatcttcgttgggcgcttcgccggcgacgagcacccatcaggtgtatatttgtaatcctatgccctttactgggtccgcccctggttgattctagccctgttcaggagtgatggggaagaacgagaaggctaagcgcaagaaccctcggaaagcgcatgaacgggatcttccagcctcgtcctcggaggttggacctggtgatgcagcatcgcaggatgcaagccactcagcagaggaagcagctgcttcggctaatggccgggagcattgcggccactatggccgtgacaatgcccacttagataaggtcctcctggagatcttgtcttccaagcacgttgcttcatgtgagcactgccgagaagatgcaccaagaaagaaagggggtgctggtagcagggagaaagggggtaagcagaagaagaaaggaggcgcctccaaaggcgctactgccaaggcacaggcaaaggcagacacaagtcatacatgggtctgcttggactgtggtcggcatttttgtggtggtgcagcagatgataccaagccctatggccatgccagacggcatgctaagcaggaccggcattggtgggccgcaaggtatgatgacccaacagttgcttattgtttgtcatgtgaaaaggaggtgtcagttgagatgcccaaattagagacagttgttgcaccagcagtggaagataaggtggccggtgcagcggatactgatttatgtggtttggttaacccggatgctaatgtgatcaaaggacttccaaatctgggaaatacatgcttcttcaatgcagtgctgcagagcatcctcgcggttgataggttgcgcaggaagatgttaggaccagatgttcctacaggagcccttgctatgtcactgaagaagctttttgcagagacaagtgcttcaaaccatgcaggaggcatgctaagcccgaagaacctcttctcaagcatttgctcaaaatatccacagttcaggggctaccagatgcaggatagccatgaattgctccgttgttttcttgatggtttacgcatggaggaaactgaagcacggaagctagcagaggaagcttcagatgcaggtgttcccacaattgtggactccatttttggtggtcagctatctagtactgtgtccagcacagaatgctcacacagttccgttaaacatgatcaattccttgacctctcactaccagttccatcaaggagacctccaaccaagagtgtttcatcaccaccagttaagaggaccaaacagtccatacgagataggaacaaaaaccgcagatacgggaaggttccagctcgagcatctccttcagtagagagtaacaaagaacaagttcattcaattgctgagcgcaattcccaaattcctggttcagaacttgaacaggtagtcagcgaaaaagatgctgagccctctggatgcagtgagtcatgtggttctgtgcctaatcaagaacaaaatgccactacaaatgtggagaatagcatctgctggttggattatgtcgctgatgcggatgaaacaaaatctgagattcttgattctgcagattctactgaaacaggacaaatttgggaatgcagggatgctgcacatggtcccttgcaccctcaggatgatgccctacccaaagagcagatcttgggttctgagcactcaggcgaaaacactgttgatgatgatgcctccttacagactgttatcttacttccttacaaagaatttggtactactgccaaggaaagggatgaagccatagaaaatccatataattcagagtgtacagttcctcctttagttgtttctccagtaagagaaaataatacacaacctgaatattgtggagatgtggagcaagatgactatgttggtcttggtgatatgttcaatgaaccagaagttacttctgaagtcaagaaagaagctggtaaagtagaagatattgatgtaatggcttggagtagtaacagtgctgatgatgaggtagatgatagtaatgctcctgtatcagttgagggatgcttggctgtgtatactgaaccagagctgctttctgaaccatggctttgtgagcactgtactaatgctgcacgcataaactctaatgaaagagaaaatgtcatggagatgaaggaccgagctaatgaaataaaggatggtgaggagatgatggcagatggcgatggaaaaaaagatggtgagaagttgatcgtgagctgcagcaaacaggtggacattgatcaggttatgggaactgatggttgcaaaaagcacattgaccagattatggcaactggtgattgctctgacaatatgcattctgatatgcattgcaaggaaggtgggtgtgttaatccttcttcggctgaccctgaacaaaaatgtgatggcaattttccagatatagaaaatacttctatgcagagaactgatgtagtcttcactatgaatgagactgaacaatcaagcagtcagactagccacaaggaacagtgtatggatttgaaaagcttagaaccggagtcctcatctttgaataaccaacaacatgattcatctgtccaatataatgattgtcataacgtggatataaccgttaaaggagcaagtgcaccactgagttgtggcgattctgtgtcttgcaatgcaactaacaatgttgaagctcaacctgttggtggtgctgaagaagttgtgtcgagtagccttccatcagatgcacaaaaaaccttgctgggtgcaaaagataatgaagatgccatcacaaagaatcagggcaggaggaagcgaatgaagatggttggtaaggcacagctagtgcaaggtaaccaaaataagcagaaagaggacgagacaaaggttttcagagctgcattgagaagaattcttataagcaaatctccacctgtattgacgattaacttgaacagattcagccaggattctcatggtcgatataagaaactgaaagggcatgtgcgctttaatgagatgcttgatatacaaccattcatggacccaaggtgtaaggtgaacaactccagcacttatcgtctagttggcgttgtcgagcacttgggaaccatgacgtcaggtcattatattgcatacgcgagagcttgcaagattggaggtcggcagcagcagagcagtggctcaaagtcttggttttacgcaagcgatgggcaagtcagagaagcctctctggaggaggtgctaaactgcgaggcctacattctcttttacgagagggtgggcgactaagacaagctctgtgccagcctgctcttcagtcagtcagtcatttatcagagcaagatcactggggggggggggggggggggtggcaaactgggaattgaagacaacattttttttgtgggcacagcccaatgagtttgcatactaatgtagctacccaccaagtccattctgttccttcgaccgagtcattccatggcccgaggtggctccattaccattcatctgctcggtcgaagagattttcgcaattggacttgcacagcagaactgttcatactcgcctacatccattctttcttttcccccctttttggcctttgaagaacatagctggtggtgcggggattggtcaaaattggcagggtttttttgtcgaacggttcatggtcagcttgagacatttcttcggcatgtggatgcccctagattttgagtgatgggggcactgtaaaacggctttaggagctatcctgtagttgcaacaatcgcagtcgttttcacacagcgtcgcccgaagtgattgtatctgagagatgtttatatatatgatcagattcttttttgttatggatttcccgcttga

SEQ ID NO: 36609 - DNA, 3525 bp, Zea Mays
cgccgcagtcctcgcatccgcgcccgcagccgagcagtcctgccgcgcccgcagtcccgcagcgtcgccgcgctcgcgcttccccgcgacagccgccatgcgccctatctccgccgtgcctacgcctcctcccccgcccgcccgagacccgccaagtttcccttccttacacggcgagatccaccatcggcgcccccttccctggcgagccacagccgtccacgttcctggccaccggcgacctcccttctctagcccttagcggcgagccaacacctcctccccatggctgccctccagaccccagtcccgtccgcgcatccgctccctcatcagcgacgcaccgattctccccgacgtcgcccatggcgtggacagcgacctccctcaccctgcactctggctacaaaaggaagaatctcttatcttccgggtcaccaaaacaaatgaagttagtggtatagaaaaggaattagttgcttagatctctggacttgaggagcaaaggaatcaactcgaggcagaactgaaaaagttcagggtggagacaaccaacagattttgctgtgaacattaatctttgttagttaggtttacttattcatagagggtaatgtttacatgagaggtttgtttttaaaagtgattctgaaactcagattacaggtgaatactaaattgaaagttgctacagtgaagcttaaaaaaactagagaggaacagaaccaatttgatgaagcaagcaatcagattgtgttgcacctaaaaccaaaggttaagtttttgtaggggtcgtaatgggatctaaaatttaaggatcaaatcagattaggatcatgctctatttttgttcatttttgaaaatcctatataagcatggtgaaagctgagaagagatattctcaacagaaacacctttgccatggaagccatggatttcctataaacaaatagctccagtgagtaaaattataaatgggtagtcataagacgtgtaaacgtacctaaagcagagcatatagttcaggaatattctccacaagtgtctcaaataatcagatccaagcaaccatgagcatgacaaaattaagtattagctactactacatcctgaatctgatgattcagctcaactttcctagattgagactgaaaagctgctagcccagttagttgagactgagatgaacagacgtttgaaggaggacacttacaaaggaaagaagtttaatgcattctgtcacttcttgggctaccaagctaggggagcactgcctgcaaagtttgattgcgattatgcctacgcaagtccctcaccagctcatttaataaagaatattgattgatgttggtttaacacgtgggttattggtctcaggttttggggcatgtgtgctaccacatcatagctgccggattgaacggataacggatacatgactacagtgacaaatcttaagaatccagtgaacaagtggcgatgtggtgcgactcctatttcggtaagatttgtgttgatatgcctaatagtttaggaaaagtaagaatgtagtgtctaacccatgtctatccctgcagtctatgatgactgtgaagcgatgatcaagtgattgttttatgtctgttttatatgcaaaaatataatcaagttttaccgaagatgctaccaaaagttttttcttatgaattttaattactgaatctaatttctgatccgccttgtgtctttactctaaatgatagtattactactttattcgcttgatgggacgcaaggcttcccatgtggcattggaatgtgctcttcaatcacatccaaacatggtcaaattttcaccattgatccaacctctgctacggcaatttccaggtaggctccgcatcccctcccacaggttaatatttgaagtttgtgtttctctaaacacaaacatagcttcagtagaaaatagaaactgatacaagtttatatttgaagtttgtgtttagcacacagtgatgtttatatttgaagtttgtccttttctttgaagctaatattttgtaagtcatttcatggctccacgccgcccgtgcccttgccggctgacgacgccagcggcaggtggcagcctgctagctggtgggtcgggcaagcgcaggatgggctcctctgatgatatggaccatggctacacgatatctccacaagatactcctcaatttcttcgtgccatttgacattccttttttgtgcttcggaccatggcttcggttcttgtgtgttttgtttccttttttagagttctttttcagtgttttttggatagattgtgctctttaacctatgacactcgcaactgaacggttccatatactttcagcatcggcggtgtgctctttacaaagccttagagctgcctctcctgcaaagtctgaacttgcagagatagtcccacaagagaaatcaccaaaagattccattcaaccaatgtcaccgagtccaaggtattctacctcaagatgaagggcgactaccacaggtatactgttatcgctagcagatctagaccatgcaagttgtggtttgtagagatcaaaacttaagatctgtgtgtagatatttgtctagacaatgggagtgacaggatgctggtttttagtaaggttggttgcttatctatgaatttgcctgtatgatgcatgatcctgtgctgtctcctgtagtacatggttgaaatataaatttgtgttccatgttttttacccgccccctacacgtatctcttggatatctgatttctactcatgatgatttggcatgtaccttgctgagttcaagtcaggtgcatagaggaaggatgctgcggggagcaccatgaatccctacaaagctgctcgagtttcctctgactgttcaccattattggaagcaggtcaggcagagagccttggaaccgaactcttggagatggtgcctagcagggaagaggagattaagttgaaagaataaagggaggatgctttgtcgacttttgtagttaatgattatgtgagacttcagtttaagggctcaacttttactggttcttggaagtcatttagtagccctaagatttcatcagcattcttagtagtaattgctatagtatcaaatgggattgtggtatgagttgctcgagtactaagtactaacgttgttgtacattgtgaagctaagtgggtaatatcaaaagggattaagatttatgtgtggtgcttactgtatttgtttttattattttattgtgctttgtacatgtaccgtcattcttactctggtgttcttttaatgcaaagtttgacacaatatatttttatacgagagaccgaaggttacttagtattgttttctgtttcttttatcgtctttgcagatctatgtttggatgatgaaaacagtgctactcgatgtgaagtccaccaatactatagtttaaattaagtctaagatcggtgctttagagggaattggtccgcccctctcgacgtgcggtggggtctggc

SEQ ID NO: 36610 - DNA, 740 bp, Zea Mays
agtagtgatgtgtaaataattgttgccctagcaacgtcactttgtggaatcagtctgttttgctttccttttaacagtggaaagctgcaaaagaggagcttcgtgatgaagaggaagatgagcctgaaactgctctagaggcattagaaaggaagcgacaaaaggaaatagaggagtggcggaaacaacagatagcttttggacatgctcaggaaaatgccaattttgttcctgcgtgaccgtgtaaaacgcagaagggctgaagcaaaaaaggagtcaaaagatgacattgttgttgcatctttaagtagttccaaacagcataaaggatctcctgatctagcagagctttccaagggtcttcctactggttggcaggcatacttggatgagtctactaagcaggtctattatgggaacagtctcacgtctgagacgtcctgggagcggccaacaaatgaatgaagatctataaccttggtgtgcggtcaaccgaacgatacaagttgatttgttaatgtagttgatgctgttgaatgggcagcccaattttgtttggcagccaaccccatcctttagagaagaacaaaccacacctcaccaggagatggctgattgtttcattgtcttggtcacaaggcacaaaatttttgatgggataggttttgcttggctaacctatctgcagtacaacatctcttattaatcactaactagatgaaggcacatttcggtcatag

SEQ ID NO: 36611 - DNA, 692 bp, Zea Mays
caggcgcagcgcggggcagatccccccatcctgtttcccacaacgccgccgccgaccggggcctggcgagatctcggctccgaactcccgggagccagtcgaccggagcagggcaggtaacgccgccgccgcctcctcctcctggatgcagtggctcgtgacaaagctggaccccagacaagaaaggatttttttggcggagaagcgattgagaaggaagggctacttgaaagaaacggagggaagatggttggaggtgcgaagggtggcaggctgtacacgaaacgcggtttcgaggttccgccccacccgatccttgtgacagaaacacggaggcgggagagggagggagggagaggtttcacatgcgagtgacgaaaatcgcaagaagcgaacgaggaaaggaagaggggggggagatcgacggctggacagtgaccgcaattaagacgcgggaggaggcaaacggtggaagaataggagcttttgaatccggagcagagatgaggtactatagaggaggcagacggcaagaactccgcggccggctcgggaccgccaacagcagcagcaatcggtgggagttacgccgatgtgatgggcggacggtgcatggatagcgccgccgtgtcgcgaagcagaggcggaggtggggagtggaggaagtgggcggttgggtcatctcgacgcgc

SEQ ID NO: 36612 - DNA, 1676 bp, Zea Mays
aagagccacaggccagaggccacgcggccacgccgtcctcttcaccccagggttgccgacgcggcgactccgatcacccaccaccgctgccccctgtcctccctgctgccgcctgtgccggggctagcccgccgcggagccatgtcgcggtccttgagcatgagagggagcatgagggcgcgccgcgacctgcctcctcctgagaagacaattgaaaggcttgagagtatggtggatggaggaaatttctatgaagctcaacaaatgtacaagtcaaccagtgcaaggtatattgctgctcagaagtattcagaagccttggacatccttcagtcaggcgctttggttcaattgaagcatggacaggttactttcttgtgatgtacaagtacgagttaacaaatgttgttagcagctgatatcatccatcaatttataccaagaaatccatcaatttataccaagaaatccatcaatttataccaagaatattcattgattcaatatcattgttacctgtggtggtgaacttgctgtcctctttgttgacaccctcatcacaggagagcttccatatagtgaacaaatttttgatcgtatcagaaagatgtatgaggcattcccaagggtaactgttccacatttccttggagatgactatgatgatgaggggcatcaattatctgaagctatttctgctgccaaagtgcgggcagagagttgctcatcattcatgaaagctgcaatcaggtggtctgctgagtttggaacatcaagaaatggttcttctgagcttcacgttatgttagcagaatacatatattcggaatctccagagacggacatgactaaagtctcaagtcattttgttcgtggaaatgatccaaaaaagttcgcttctatgctggtgaactttatgggcaagtgttaccctggtgaagatgatactgcaattgcacgtggggtcctaatgtacctatctcaagggaacttgagagatgcaaatttacttatggatgagatgaacgaacaactaaaatctgctaactcggaatttccgaaaacagatttgattcagttcatcaagtatcttttaccaacacttgagagagatgcttaccctctttttagaacacttcgacagaagtataagacaagtacagatcgtgatgctgtgtttcaggagttactggatgaaatagctgcaaaattttacaatatacaacgccagaaccctttagaaggccttttcagcgaaatgttcaagatataatgcacgagaaaagaattttatgtcgatgctttcatctaaaccattggctggaataatacaattggtcaacaaaggtgtttgctcaactatgaatctccaaggccatacatttagcatcatgctgcatgaagatatatacttagctctgcagcaaaatcgtcgattagtgtcagattgttactgagcatgtgtaactgaattttgttttctattacttgtttctctttgttgacttgcccttgattgttattgaccatgcataactgaattttgttttcttttacttgtttctccttgtcctgttcacttttggagatgtattttgtgtacccacagatcaaaactataacctatttaaattcattgattttaatatatggtgttatcagtaaagttcattgaa

SEQ ID NO: 36613 - DNA, 706 bp, Zea Mays
gttctgcgtacgccattattatccacaacactcatcgatctacacacatacatagtttcttctactacacgacgacaaacatggggaagcctgcgaagatcggagagtggggtggatacgccggcgatcgtcgggatctgagggctactccggaccggctgatcgaggtgaaggtcacggcggacaacagcagctgcatccgctccatctccttcatctacatcggagccgatggcaaaccgtacgaggaggggccatggggtttcggccatgctggcacggagtacaaggttcgacgagagcttgacggagatctccgggaccacgggcccagcctacaacattgacaatctggtcaagtctctcaaattcgtcaccaacaaacgcgcttacggaccgtacggcagggacgagggcaccccgttccgtgtcaaggtgatgaacaacggccacgtcgctggcttctttggccgctctggagattgcctggacgcgatcgggctctacgtgaaccccaactaataactaaaacgatggatcggatcatctgcatgcatgcatatgcagtatgcatgctgcttgcctgcctgtaacgaatatgaatgcataaaataacgcccctgctgctcccatgcatcagcagtgtgtaccactatgttatatatatatatattgtatttcgctaccgaataaaaacataaataaa

SEQ ID NO: 36614 - DNA, 5133 bp, Zea Mays
catgctttacctctgcttagataacgcggtggcccttgaccatgtctttgttccttcaatgctaaaaccatcagagttgtctgtaatttcttgcctttatggagctcatgtgccagatttctgtttgtgtgattcagtcacatctacacgttgcacttttgagactgttgagatgttaaccatttcttttttaggaaccggccttataagcaatattgtgatactctttacatgaatgtaggggtgtcagtataatcatgatgctttgtgtaattaggtatccaagcggcctcgttctgaattaacagaagtctcttctcatactggcaaagatgtttgtgaaaacatacaagacccgaatggtcaggttggacactcttggggctgggacgatgagggtgtcgttatggacatcaatatacttctgtcagagtttggagattttagtgacttctttcaacaagaggagttagattttggtgagcctccaggtactgctgaatcacatgctctagtaattcctgcttcagactgtggagatgtcacattcacagatagtccatcaacagcaatggatatccctgaacaaagactttctcctgttggtttcacaactttggatgcatttgaccatcaaattatggccccagctcaagatgttgttgctaaagttcaagaacctcataatgatactgcaacacctgcacagtcccactcgcaagttttatcatctggaagatttgattatcttaccaaagctgaagcaaagctcacatttgctccagaatatgcagctgttgaaattttgattgctgaggccccaacaccattgtttacaaatccatactttcctagatcaaagaaaccaggcagttctagttttagtgcaagagtttattcatatgatgttgcacaaagctctcaaattgaatccacaggagacaagccagataagacttctaaactaatatctggtaatcatttacatgatattagttcatcaaacttgtacacacttgtccaaggtgggaataaagggagtgataagatcttaaagagtactgatacacagccctctaagggagaattgtcaccacctatttctggtgtgacttcatttaatttttctcttgtttcacaaaagaagagtggcaacatgttcaatgctggctattttctgctgtctatgaagactgctttggcaactgaaattgaatgcatcacgttccaggctgccatgtgcagaattaggcatacactattgtctctgagaagcaaagcatctgccgagtttaacagtgcaacatccagcttcatacagacaaatgtcagcaacaaatcagatctcacccccagatccttaatggacaatgtgggagtttggaggcctgttgttacacctaaagggcctaaatctcttgagtctttgtctgctaacacattaactggtgcaagcccaagtctgtctatacaaagacaacctgttgtagatcttctctgtgccatgactctgcttgttcaacaatctacttcgtttgttgatatgtcacttgatatggatgacggggacggttcttttttctggctttccctggatgagcaaaagagacgtggattttcttgtgatccttctatggttcatgctggctgtggtggcctattaggaacatgccattcaaaggattgcgctggtgttgatttagtcgatccactttctgcagaggtttcagagccatccatgattagcttgttgcagtcagatataagagtagctcttaaagctgcctttgcaaacatggatggcccgttatcagtaattgattggtgcaggggtcgaggcaatgctgctgagtctgcaggtacgggagatgcatactcttttcagtactccagtggtgatatcctggagccgtcaagttcgttgtccattggtggagattcaatgagcccaccccagccaaccagtagcaatcgaggcatttcagaattagagttccaaaagggatatcaccgtgtcagaccaaccattgctgtcctcccttcaccttctatgctagtcggttaccaggatgattggttgaaggcctcggtgaatagtcttaaaacatgggagaaagctccttttgaaccttatgccttgccgaagcctgttacttactatgcactttgccctgatattgatatgttgacttcggcggtagctgattttttcatgcagcttggaacagtttatgaagtttgcaaactgggaactcattcgccccaaaacaatggaggacaaatggaactatctcctggaaaatatttgccttcaggacttgttctagttgattgtcctgagcagttgaagaaggatacttaaggatataaagctgacttcaaacatatctacaaatcagaaagagagcagtagtggaccttgcacagtaatttatgtagtttgcccatttccagaaccttgtgcaattctacagacgctagtagaatgttctgttgctcttgggtatgttatttcatccccggaaagggaaagaaagttactatattcacaggttgccaaagccctaaacagcagtgcttctgtagatgaagcatcagcatcaaatgtcgttatgctatccgggttcagtatacccaagctcgtcttgcagattgttactattgaaactgtactgagaatggataagccaaacaaggagcttgctgttttgaaggacatagcattcacagtgtacaacaaggcacgacgaatcccacgggctgtctccacaagcgatatgttccagtcaccaacttatttgggtagatctcagtccacaatgatgcatgttacatctcctgctcctactctttggaaggaatgtttagttcctcgaatgtctgggccaactctctctcgagaaaccgattttgatgcatccatgaggtcggcaacatgggataactcatggcagcctgctcgttcgggaggacttctggacccaagtaagctgcctgatttatgtgctcaggatgataggaaatatgcctttgagccacttttcatactagcagaccctgggtctgccgatcttaatgctttaatggaaccatcaaaatctggagcagatgcatctggcagcagggtatatggctcaatttcaggaagtaactctgatagtggagtgagccctctactcgacgtatctgagagtgacagtgcagcaagtcttcattgctgttatggttggactgaggactggcgatggctagtgtgcatttggacagatgctagaggagaattattggacagcttaatatttccttttggtggtattagtagccgccaagacactaaagttctccaaagccttttcatccaaattctacagcaaggctgtcaaataatgtcgtcttcacctgaggctagcaatatgagaccacgagatgtcataataactcgtatcggaggtttccttgagcttgaaatccaagaatggcagaaggcaatatactcttatggtggcaatgaagtgaagaagtggcctgtgcagttacggcgatccatacctgagggtattccacctagttcaaatggtcctacgctccagcagcagcagcagcaagacatggccttaattcaagatagaaacatgccttcctcaccaaaccctctgtatagccctcatccaaaatcaagcttcatgaaaggtgcacttggacaatctggcaacaaaaaacagatccttgtggaacaaagtggaatggacacttcaaggggatcactgcacttagttcgtagcatcagtttggttgcagtttcccaagatcattcgttgcatctcacatgccaagcagatctactgagcagacctgcttcagctggcgaagggagtcaaggcagcagtggcccttggagttacctggaaggtttcactccagtgaagtccattgggtcaatgtcagcgtcacactcgtaccttctagttccttcgccaacaaagggactgcgattcctttagcgatgggctatgtcgtctcgaaagccgtcccacctgttaggagggactctgcacaactcaccaaggatgaacagccctctgttctctcagtcagcatcatcgatcactatggaggcagcagtgggactgttcaagagaagatgagccgaggcggcggcggcggcagcaaacaggcaaggaacttgagtcaggagacaacaggtcgtgagtgtgagatggagatgcatagtgtgctggaagctgtggccgcggagcttcactctctgtcttggttgacagtaagcccggtgtacacagaaaggcgcacagcactgccctttcactgtgacatggtcctaaggatgcggcggcttctacactacgcagataagtatctatctgaacctaagggagagacaactcactaattgtcatgtacaattaatatctagctaggtaggtatgtgagggcacatttgacgagctttgtagactgattttgcaataaccctgataacttacaggtggatgctgtaacctttttctctttttttaggtctgtattgtttgtcgacacaagatttgagatatgattccgtttgttgactgtattaatcagaattacaagtacagcgtttactgggattgccgtgccctactgcgacgacgtttttttttcctttaatcagaaatacttgtaaaatcaaaatcatctctccgctacggctattgctcacaccccctggctggaataggcagcttaaaacccaggtaaaactgacaggtccgcaatccccttgggcaaactctcaatcttcctcagcaacgttagccggttgttgcgaactctctcgtcttcctgcgcataatatacaccatcatcactctcactcatcagcacaagttaagtttttcaagggcctcacaaaactcaccgccatcacgaagacactattgaagaaatcttctaggggttgtatcaggataagagaagcatccacaaaggtcttaatatcaacacctacagaatgggtagttggaggaatcagacaaatgaacatttaaattgaaatgaaaaatggatatgaaaaacatgtaccaggatggatcttatcagcaacctccaagtaggcgctccacaaaactttctctt

SEQ ID NO: 36615 - DNA, 2649 bp, Zea Mays
cattaccacactctccccgccactcgcctcctctgagctgcctgcttgttcgagctcccacggctccagtgtccccgacacatcagccgctccctccactcgccttcctttttgacgttccaggatcatccatggcatccaaaccaagtagggaagactagcatcgaacccgctcgtcacaggatccaaccgcctaagaaacaaagcagccgtggcgacctcctagaggagtcaaccaggaacaagaaggcatcaagcatgttgccgtaggtgggagggggagggcaagggcgcaaaaatggcaacaaccatggccggcgatgggatgcggcggcggtgagcgcatggaggaggacgaggcggggacggcgtcgtcgtcgtcgtcgccgcctattgtgcagctgggctacgaccaggtcttgtccgtcctccgtctgctcccgcccgaggccgtgctgtccttcgccgccacctgccgcgttttccgggcctgggcctcctcggacgcgctctgggaggcgctgtgctgccgcgactggggctcccgcgccaccgctgcgctcgccgagcgccggcgcgaccgcggcggcggccttcaggcgccgtggcggagggtctacgccgaggtcgccaggctcggcgcgctgtccgcgcgacgcgtccccgccaggggcgcctcaccgcggccccgcgcgtcgcactcacttaacctcgtcgccggctggctcgtgctcttcggcggcggctgcgagggagttaggtcaccatcttgatgatacttgggtggcttatgctggaagtggagctggaaataggccgccccctatacttagctggcagcaattagcatccggcactccaggtggtcgtttcagtcattcttgccttctagttggtgacacattagtcttgtttggtggaatcacagatcagggacagcgtttgaatgatacatggactggtcaaatcatctgtgaagagcctcgaaggccacggatctcatggagattgctggaggtaggtcggcttgcaccacctccacgtggagctcatgcagcctgctgtgtggatgacaagtttattgtcattcatggtgggatagggctctatggaagccggcttggtgatacatggcttcttgatctctcaaatggccttcagtctggcagctggcaccaaataggcaacacatggcctttgcctcaacctcgttctggccactctttaacttggattggcagcacatgcatggtattatttggtggtagaggatcggaatttgaggttcttaatgatgtctggctgtttgatatcagtgatcaataccccaaatggaaggagctaaagtatggcttgtctagtgctcttggtgagcttccttttccacgggttgggcattcagcgatacttgtgttgggtggcaaggtccttgtgtatggcggggaggactcacaaaggcgacgaaaggatgacttttggatcttggatacaccagctctacttcaatacgagtcaggttccaagaaaatgaccagaaagatgtggaagaaactaagaattgatggtcagtgcccaaactaccgatccttccatggggcatgtgtagatgcttctggttgctgtgtgtatatttttggtggaatggttgatggccttgtacacccttcagaagccttgggcatgaggtttgatgggcatctgtatcaagtggagctcgtgctacatctttaggacgtgtttgttcccttgtatatccgagaaattccataggtttgatgtttagcgtctggtgtagtaccatgtcacccaggttttcaacattgtaaggatactccagatggtgcctaacggtcgtttgcgcatggatgcttgcgcacagctgtcgctgatctgtgaaaggaacagtgacccttgtaattttggcctgatgtgtctgcatatggccatatgggtttgaattgtcattcctttgtcagattcatatgttccaaagaatgtccgtcaataccatctggagcagatggttgttttgctacctgatgagccatcatatagtcatgggaagagagagaaagatattcttttccacaataatccaatgcgcgaggattgctcgggaccatatggagctgctattggatctttgcatcccagtcacaggttagctcaatgcaggagaggaccatgtcccattcaacccttgggttcacatgcacagaacctgttatttgtatttatctaatgatggtgcatgagtcatattggcatcaccaagcatcagaatttcttccaaagatgaatgctggtttgatctttggtccaccagcactcgatagtcatgtcttgcgcgcattaattctgcgataacaggaccgatgattgcttggattatttcagattatggaccatttgcagtatgattgctcgagagaaatctggagctcctgttcagatccactttgtgacagcaaggcatgcttcagcatgaagatccatgtatgatacctctgaaaggtttacttaggcctagactcagtttgtctctgattctgtacattcttgatagattatatttgctcaagatgttgtttcagtgcagcattcaactgcaaattttattgctggatgaatcgctatccactagtacat

SEQ ID NO: 36616 - DNA, 1359 bp, Zea Mays
gagtcggagaccccaaacctctgtcgaaagtttcacctccggtcgctggtttcctccaatctccgtggtagttcagcgcgagcgggcggcggggtttgagctcgatggtcacttccggcgaacaatcggctggcggcgggtctgcggcgagggcgtcgaagctgcggtacccgctgcggtcggcgagcaaggggaaggcggcggtcgtttccccggcggctgatgctcctcccaccatctctgctccgcgacgggcaaaaccatcttcagatgtcagcaagagcatgtgtttagacctttctgtgaaggataattctgccaaacccccacggaggcactcaatacaaaccaagccaggagctagcccaaggccaacaccttctggaactgtgactccggtgtctggggttcggtcaaagaggtcggaaagccaggggaggtttgataccccgacatcagaagtgtccatgtccatctcaaggcgcaagttcagcacgctttcttcaatctcgtactggatgacacagatcaggctggcagaggctgcttccaagcactcggtttctctgggcttctttaagcttgctcttgaatcagaatgtgagcctttggaccggatgagggaagaactcaagtcctacgtagcacggcatggcctggcgacagaattggaggacccagttaaggacattctccaggtttatgatattttggatgattttgagaagctgaagatctctgcagagccctcacagcaaccaaaaaagtctgacaaggctgctcgtactgccacaaatgcgtcaccgaatggtaacctgaagccaaggtcactgaactctgatgctactgaaagcaaggaagctgtaaagaaagagagcattcagaaagtaaatcctggtgcaaggatcagaggctcctgtaacaggaatccagtcaaaaacaccaccgcaaaggaagcagttgccaagaacaccgctgatgttgtgaaggagatcacccatgaagataaagagaacatgggcgatattgaaatggcagtggatgttgccgtagcccaagatatctagaacagccggaccaacttcagattcgatccccttttttttctatcgctgaagatgaagtgttagcgtgtggttgcttattttggttttcaattgttaatatgttattagtagagcttgtctgtgtgattgctgtctggctggaccttgaacggtcttcaagagcgtgtcataagttgatgattgctttcattcctctgtcaagtttgcggctttgcatgtgctaatccgtgcaactgaatatagttgaatttatctattctcgtggttcctccgggcacaagatcctcccctg

SEQ ID NO: 36617 - DNA, 2432 bp, Zea Mays
gagcgcaacgcgaaaagccgaaaacccaaatcgagtttcctgccggcctgtccaatttctgtctaactcccagtcccagacccagacccagagaagatcagaagaagggggaagacagctcgtgcttcgacaggcgtcagccctagcgcagcttcccggcgacggcgatgagcctgggagctgaggtgatcgagctctccagcgacgaagacgaggagcctgtgcccagcactaccgctctcatccaccacgccccctcctcccctcccgacgtcaagccgcacctgctcgccgacgtcgatgtgaagccgctgcttcttctcccgccgccgctccaccccccgggctacggcgcgctcgtgcccgtgaagaccgaggagcccgtgcccgtggccaccgtctcgtcaccgcccagggcgctcccgccgccgcgcctctgccgccagttctggaagtccggcgactacgtcgtcgcgcgccgcaaccccgatgtggccggccccggtgggcggaaccggttgcggataaaccccaagtttctgcactccaatgcgacttcccacaagtgggcttttggcgccattgccgagctccttgacaatgcaatcgatgaggtgaacaatggggcaacatttgtccgtgttaataaatttaaaaacccacgagatgggaacccctcattgttggttcaagatgatggaggggggatggatcctgaggcactgagacgttgcatgagcttcggattttcagataaacagtctgatgctttcattgggcaatatggcaatggtttcaagactagtacgatgcggcttggagcagatgtgattgtttttacacaaaaccaaaataactgggtgccaactagaagtatcggccttctttcttacacatttttgatggaaacaggttgcgatgatgtgctggtgccaacggtagactatcagtatgatctaacaacaacttcatatgttcagatgttgcgtcatgatcagaagctcttctcttctaatttggcaatccttctcaaatggtcccctttttctactgaagctgagttgcttaaacaatttgatgatatgggagatcatggaacaaagataattgtattcaacctctggttcaatgatgatggggatatggagcttgatttcaactctgacaaaaaggatatcctcattactggggcccacaagaaggtgaaaacaaacagtttggacaagattgctgcacagaactacgtctcaactcggcttcgctattctcttagagcatatgcatctatcttgtatcttcatgtacctgatactttcagaattatcctgcggggatgtgatgtggaaccacataatgtagttaatgatttgatgtatcgggagtgcgtgttgtataaaccacaaattgctggacttacagagtcatcggtaatcacaaccattgggtttgttaaaggtgcaccagatatagatgtacaagggtttaatgtatatcacaaaaaccgtctaatattgcccttctggaaagttgcaaacaactcatacgggaaaggacgaggagttgttggcattctggaggccaactttatcaaacctacccatgacaagcaggattttgagaagtcagtcctttatcaaagacttgagttccgcttgaaagaaatgacttacgaatactggagaactgtgcatcattatattaaggagaataagaatggtctaaggtagaccaaagtacaagctgccctagaaggcaggaagaggggggacacaaggaaacaccaaaactaaatagaagagagagacggggggcaccagttccaacaacattcaaattaaggccacagctgcctaagatcctttgcacccgccattctccaaagcttaacatcatcttgaattgttcttgttatgaggaatgcattaatgccataaacgaattcattcctgaactaattctttttgcagggaccttcattgccatcgtgttggatatgacaacaaaaaattacctaaagcaacccgtgctattaatcgtgccaatcatatgaacggtggcagttccccaacaagtgctccacctcggttgcttgcagttgatattccaacaagcagctctagtatacctagattatcagcctctgcagcaagagaaaagatcagtagtctcgattctcttcccaagagcatgattggattgaagaggaagtttaatcctttcggtgctgtggcggccagtgctgatcaggatggactacatcatatggataaaatagatgtttctcaacgaagacggtttaatgaatacaaaactttgaccctggagaatgacaagttgcgaaatgaatgcttacaatacgagggatcagagaaacaacttgtcctgaagccgtggcttgttgaaagattgaaatggcttgcttgtaagatagt

SEQ ID NO: 36618 - DNA, 1189 bp, Zea Mays
gttcgcatctgggactgcaattccgccaaggtagcttggttctcggcttccgacgatgtatctgattatgcacgggttaccaacaatatctctgatatgcacgggctaccaacaatatctctgactatggacgagtaacgggctgcttccacggaggttccagtgaggaggttgtcattgttcgtggtggttcatgtgctgattagcaatgtgtgcaccctatggaaccaaccataaccgaatgtgtgttgatgtcatcaagatgggaggcaaggttagctgcatgatcacccatggcccatgggtactcattggaattccaaagtttgtggaggcatggaacacaaagacagggatgaaactaagatttcaagggccttctagtctggtttgttccatggctatcacggatgagatgctgtttgctggtactggagatggtcgcatcatggcctggagatttcctgctaaggaaagtaacactgaaccagtgttgatcctcagtggccatcaacggccagtgatttcactgtctatctcggcaagaagactttactctggctcactggacaagaccatcaaagcatgggaccttacaactcggcagtgtgtccaaacactctctgagcataaagctgctgtaacatctgtgctttgttgggatgagaagttattatcttgctcccttgacaagactgtaaaactctggactctgtcagagtcaggaaaccttcaagtcaaatatacccatgctgaggagaatggtttgcgcacactcttcggcatgcaccgagttgggaagacgccagttctcttgtgctccctccacaacagcaatcgcgtccgcttgctcgacttgccatcgttcgacgggattggaacactgttgtccacgaaggaagttaggaccatcgagcttgcggctggtgggctgctcttcaccggagactgctccggcgagctgaaagtgtggaggtgggcgcccaaggactaggaggcagtagctgatgtgcatcaaatagtgtagctgtagcctcattgaagaataatagccactgacgtgctccatcattgtattcgtttccatgtaaattatggctgctccccctgatgatgtagcacatacggccaattttgtgaggatgcaaccctggtatcatgttcccatgcgtctccctttaactgccct

SEQ ID NO: 36619 - DNA, 1295 bp, Zea Mays
tgacagtgtcagcgtccacaaggaaatgaccccgcctaccccaatccgcccacaaccgcgaggccccgccccgccgtaattccctcctacgctcgcgccgcggccgcggtcaccataaccctctcccctctccacgtccaccgctgcccccacccaacagccaccgtccagccccctccttgccctccatctgtgaccgcccaatctctaaggaatggatcgcgacaggccaccgctcgccatggggtgctcgtggctgtgaacgaatgccaacttgcagaaccagggctcttcgattcggtccttggcgccggatccaattcttgtcaggtggtccttttgtgctttcccttgcacacaaacacaaagtgaactttcttctgtgatcaggataaaagaagtaggcgcaatgaggagtcatgttcattcacaagctctaacagagaaagttggggcagatgttcatatttaggtgcagccagtgatgaatcattctcaggcgataataatgataagcaggtggattggctatgagtgtttgtagctggagatcaggagaataactttaaactacacctttctactttcaagaatctactcctggctggttgctgtacattggccgccgaactgcccagctgtcccagggagaggttgcacgcctcccattcaccatttgtcatttcgttgcctgccgctggctgagccttccaaggaggtggcggaaggtttccactttgatcatctacagagtatggatactagcgtcacttatttttcttcttcttcggatagaaaaagaaagattcatatgaatacagagagttctggttgaaagacagaagtgatacagaaaagtgcacacactaataaagtaataattaagtagtattccagaaagatataacagcagatcagatatgacaattcttgccatatcgtaattcagtgcttgctctgctggaaggttggcagcttgatcattccaccctgaattaacattattaaactgggatgcctgatcataggacgttccagcacccccgttcggatacagcgtcgcctgttgcgactagaaaggctgctgagttggagtgttgtatgcctgagatcctggaatagcagaacttagattgagaccaaaggggtcagctgcttgagttttgctgttaacggtgctgttctgtgaaaatattcgtttgacatcagttcattccatttaagtcggtgtatctataataatattacatatttatatcatcaatataatattaaagttacgatgatatttggtc

SEQ ID NO: 36620 - DNA, 4494 bp, Zea Mays
cgccgtttcgcattcacgctgctcgcggcccgagcccaccgggcagtcgtgcttgactcgagatgacgcgccgcggtgcccacgaggcatgagcccatccacatcccaaagtcccacggcaaagccgcgcctctgcggctctgcccgacgccatcgccacgccagacgccagcgcagatctcccttcccgtttgtccttccggcgggcgagggtgacgcccgccacaccgcgagctccagctgctctaatcgatggggcacagctctagaaagaaaaagaagcgcggcgcggccggccgcaaggcagccaaggaccacgccgcgcagctcgaaggagacgagaccgccctcgacgaggagctcacggccctggcttcaattttaggggaggacttcaaagtaacatcagaatcacctcatacacgatgtaatatatgtattaggccttattcggatgacatgggctttgaagatctaaatatttcagctattcttattgtgatatgttttcctggttacccccacaagtgtccaaagttgcggatcctgcctgaaaaaaacttgtctaaagaagatacagatcggctcctttcgcttcttattgaccaggcaaacatttattcccgagaaggacgtgttatgattttcaatttgtttgaggctgcgcaagagtttctatctgagattgctccagctcgtgtttcagtgagcactgcttctttcttgggtttgagctcaactactgatgacaatgtggaagttggctttgacagtgatccttacctgggaatctcttacatatataactccttcgatctatatagtcagttatatgatgatacttattggagtcgacaaggttcagatctgacaacagatagtggcaggaaaaatattgtatctcaagttcaatccaatgttagaagcaagaggaagaccatcattgaaaaatcccacatctcagctgataaggtcaataatgctaaagagtcatctggtgataaagctgaacagcaacatgccacaaagcatggtgccatacgggaggcagctccaactttacatgttgtggatgaggaaactgaaatttacggcaaaagtttgtctgctagcaatacaggaaatacatcagatactcctgaaaggggttttagcagtctaaatgaacctgaggacactgaccttgcagatgaatcttggaatgaacaagattgtgattcggacttcagctcttcaaatgcactaccttatgtttcatacatgttagatgatgcttcacgaaacaagaaaagggatttagttctggtacatctgcttcggatagcctgtgcgtcgaaggattctctttcaagtgctttgccaacaatatcagcagagttgtgcaacataggggttctttccgaatgggctaaggatttaatttctgattctcctgctgtttttggagaaactttcagtcatgtttttgggcaacaaatgatctcttcagagtgttctctattttggagacctgataattcatcatctaagccaaattctcgttatttgaatgattttgaggagctccgttcacttggtcaggggggctttggtcgtgttgcattatgcaaaaacaagctagatgggcgccaatatgctgttaaaaagatacgtctgaaggatagaagtcctcaattgaatgagaagattttaagagaggtagccacactttcaagattgcaacatcaacatgttgtccgttattaccaggcatggattgaaactgaatacggtcatcataatattttgaatgctggcgggtcctgcactgctgagagctctatctttagttatgatgaagtcagcctatcggatgcaggtggtgggaataagcaggaatccacgtacttgtacattcaaatggagtattgtcctaggactttgcggcaggattttgagacatacatctcgtcttttgatgttgaccatgcctggcacctgtttcgacaaattgtggaaggtctagctcatgtccatagtcaaggaatcctacacagagacctgacacccagcaacatattttttgatgtccgcaatgatattaaaattggagattttggtttagccaaatttctgaagctggagcagctagatcatgaccaatatcttcctactgaagcactgggtgtatcaatggatggaacaggtcaagttggtacatatttttatactgcaccagaggtagagcagaaatggccacagattaatgaaaaggttgacatgtacagtttgggagtaatattttttgagctttggcatccatttgccacagcgatggaaaggcatcttgttctttccgatcttaagcagaagggagacccgccattgtcatgggaatcaaaatttcctcgtcagtcagtcctgttaagaagcttgctgtcaccaagcccgtctaaccgtccatctgctgtcgaggtcttgcaaaatgaactgcctcctcggatggaagatgagtggctaaatgatgtacttagaatgatacggacaccagaagacacatatgtttatgaccgggttatatctacaatatttaatgaggacaggttcgccaaaatgcaaggccaacatgatagcagcaaaaagtccactggtaacattgataacagtgaacttttggataccatcgttgaggttgccaaggaggttttcaagcggcattgtgctaaaaggttccaaatatcacctttgcatactttggagtggaattttaccaaaaacaggggaaacacagtgaaaatcttaactcaaggaggagagatgctagaactttgctatgaactgcgaacaccatttgttatgtcaattgcttctaatcagacatcatcattcaaacgttatgaaatatcatgggttcatagaagagccgttggccattcaactccttatcgttttcttcagggtgattttgacattattggcggtacttcaccgattccagaggctgaaatcatcaaggtggctttggacctggggacccgcttttatgattccaagacgctagtcatacgtctgaatcacggtaaacttgctgaagcaatttgctcttgggcaggggtttctcaggatcaaagacaaaatgttgctgagtttctgtcttcaactattgttcagtattggccaaatgaagctgaccgcaagtcacagtggagtttgattagggggcaacttttacaggatcttcgtctttctgaagaagttgttgagaagctacataaagcagatcagcggttttgtggctctgcagatctagtacttgctagattaagagggaccctgttttatgatgaatctgcttgcaaggctcttgatgatctatccgcgcttctgagatgtttgagagtatggtcggtagaacaaccaattactactattgatgtactcatgcctccgtcagaatgttactatacaaatttgtttttccaggtatactcaaaagaaggtaatcatggaccgggtttccatgaaaagttgctggcagttggtggacgatatgattggttggtggaacaagcttgggatgagacatctaaatctaaacccccaggtgctgttggtgtgagcattgcacttgagaaatttcttcctaacaatccttcatctgatctgggattgcgaaggttactgtccagggttgaacctagcatcagtgtacttgtctgttcaaggggtggtggcggtctgttgactgaacgcatggaacttgtcgcagagctttggaaagctaacataatggctcagtttgttcctcaggaagatccaagtcttcaagaacagtatgaatatgccagtgaacatgatattaaatgccttgcaattatgactgaatcaggcctgtcacaaacagaccttgtgaaggtccggcatcttgattttaaaaaggagaaggatgttgaaagagagggactaataaagttcctgtctgatgcaatgtgttcacaatacaaaaatcctacgatctggagctgaccaacggccctcccaagtgcttagtgtatttgttttcaggttctagcagagcatcaaaaaatgaatgagcctggtttgtggttaacagtgtctttcgaacttccgggtgaaagcaatgtttgctgttcgaacatgtgaaggcaatcatgcgtgttggcttccgtgcatacggtgaggcagctgttggctctctgcaggttgttgccaaacgttacgccctggtctttactgaagatgggcgccgacgtgcggtgattggccaattggtataatcctggacctcttgattgttctcctgaggaccaatgccatgcaacaaggttgcttcagacacaaggtggcgtgtagttggtgcaattctgcagttttggggctgttggtattatatggatctgaaggtactctttcgagggacttattggtgtcggttctgggggcttctccaaaggcgtgaagaaggacatcgtaaggatcaaagttgcctgcagg

SEQ ID NO: 36621 - DNA, 3181 bp, Zea Mays
cgggaagcggcaaaacccagcaggccagcaccagcaccagcaccagcaccgtgccgcccctgggccggccagccgccagcgcgacatcgagcgagcaatggaggtcggcggcgacctgcagtccctcctagaggcgatcaaatcctccgaggtgcttgaagatagaattgggctcatcaaccgactcgagagttcctttgagtattctgcggatgatctgagaccagtacttgacagtcttaatgtatcttgggatgattctggatgttcaggttgctctaaaatgttcatatatagaaacaactggttgtctaggccaatttcttgcacttggtgcaaaggcgagctcatggtgtcgaaagcatatcgtatgttccatcgaatctgttgatgattctgaagatgtccaacaggaagaacactccaaaatactcccagagataattttgatggccttaaatatatcaatcaagattcttccttctgcggcaaaatgtgttactgtagatatggtgcataatattggtgattttatctcagagttgctaagtcttatggaaagctcaatagttgacaatgacaagaaaattcatggagctgctctggatatcactaaggctgcacctgtttttctagatgaaacaactaagctgtgccgggcatactctgaggccacaaaagtagacaactgcacaatgagtataactgatgaagatgctactgtgaaacacaacaaacaaggtcttgctagtgatgtcatcaggattacatcatccactattcagactatgtgtagattgggaacctatgcagcatccagtggtggaagccaggtgattttactgaatgtatcatggaagggtgtagtctcattactccaaagcggtaaagggatgattgaaggaaaagtaaatgtcagagaaataattgtaacccttctatctctgtccatagaatctctaagagttgctgctgaaacatggtgtgcaccgttactagaaacccttggtgctactgaagccagaagggcgttcctaccaatcaagtttttcttaataaatgctgtaaggatttgttcaacatatccatctgaagcaatgattatatacaagaacataatcaattgtgcagtagtgatcacatcctcaagcattctatttagcaagaagccacagttgaaggcagcaaatgagacccttgttgaattgttggagcctactttatttgttttactagatacacttatgaaatcatctgacttaacaccagaatccaaatgccagcttgcacatcatttttttgaaaacgaagaagataagagtccagatcttatgggacaagctaatcagagagagataaatttggcctcactggattgcattttctctatggattcagatgtggatcatagaaatagagcacttttacctgctgagttgcttgtgtttttgcactttctcaatgcttcatcatggttgacagaaatggtggtcatcacattatctaaaaagctacagactcttcttaatatattgacatcagaagacatctactcctatgtccttggcttccaaatccctgccttaaatggcgcagaccagtctcctgcagttgtttggcaacctgtgtatacttctatcatacaagcattgaaggcttttatgatttctactgttgcttcaagtgctgcttggaacgagttagaggctttcttacttgaaaatattttccatccccatttcctttgcttggaaattattacagagctgtggtgtttcttcattcgttatgctgaaactgagacttcaattaatctagttaatcaagtctcccttctactaaagactgttgcatcaccagaggatgttctttcacctctcagtgctttgcggaaagttgcacgatcattgtgcatcatcttgagctatgcatcttctgcaactgttgatcaaatatatacttgtgtgctgaatggtgaaaactcttccaagtcttcaatcttacacttagcattgctgatggaaggatttcctttggattcattgtctgatggtacaaaggaacttgctatgaagaaaatgtttacctcttttgctggctatctggagagctactccaagaaccaccgagtaatcaatgtgccaacttgtaaattgggtgttgtaggacttcctatacatgctctagcctctgcattgcagcatagtgcaaaccgtcaatggcttcctttatgtcaactctcggtcacttgaacgttaccgaagacgatgctaacgaactttgttctgcaatatgggatctgtatcatctcctgctgaaggaacggcactgggcgctcattcacctcgcaatggattcctttggctacttcgccgcccgcacatcctttacgcagctctggagatttgttcccagagatgctgccctttcgtacaatgcaagcacagggacgagcatagatgaaaacggattcatgctggagttgagggcttatcttcagaaagaggtcgccttgcacaccgataaatggtctgaagagcagattcggctcctggtttctgaggggagagcgctgaagaagctggttgaagcttgttgtgaaattccggttgttgctgagcctgagaaggcgccggttgcgaaggatgccagcacgaagaagaggaagatgccagatgggatctgtgaaggcatggcgatgctgcagaacggtctcaaggtcatgcgaggcgcctttggtgaaggggacttcgctgatctgaaggataggtttgctgcacacttgtctcgcctcgaggatgcagtttcccagtttgctagtttatccgacgaaatttgatatagtgcactgtatgtcgcgctgttacctttaactgcaaaagagcattcattctagtacagttcacgatcatagcacagctgatctctctcgtggcaagcaagctccagagtcatcgggttgacagatcgttcaacatggccagcacaacttcaaggtttgcaggtcatctccgcgccggcgcttgcgtggcgacggcccttgtggcttgttggcttgtggggcgaaaatgcaagaaaatggatgtgaattatcttttgtataataaccacacgacatcatgtactgctttaatttaacaattggtagtacaccctgcagacgaggcgaatacaatttttg

SEQ ID NO: 36622 - DNA, 3536 bp, Zea Mays
gtggccttctcttctctctcctccccgctccgacgcgacgaattcgaagttggaataggcgagcggggcagcgccatttccgtccggatttctcttctgtcttctccttccttggctgtccagtctaggaggggagaaaggcaagttcaaaaaaaaaaaaaccccgcccgaatcccaacaaaaccctaggcctcacgtccccggccgccgccgccatgccgcccggggccgacgcgtcctccctcgccgccgccgtgctcgacgcaggcacgccaccggccgccgccgccgccacatccagagtgctcgactacctctcccgccacgccgacgaccaaccgcgggccttcttcgccgacgccttcccgtccctgctctaccgcctctttgtctccgcaccctcctccccatcattcatcgacctcgccgctgccgaccccgcgctcggcgacctcatcctctccctcatctaccccaccggcccgctcctcgccgccgccgccgccgcagaccgcctcaccctcatacgttacgtcttcccctccgagcgcctccccgactggctccgactcgccctcgcgtctcccccctccaccgacctcgcctcgccgctcctgtcgcgtcgcgtcgcctccgagctccacctctccgtcttcgagtactacctcttctggttcgcctactaccctgtctcgtccgcatcatctgccgccccggccgcatccgcctccaaccctcgactcacctcgcgcgcccgcctcgagacctgggtctctactctcgccaccacggccatccgcaaatccggtcagaagcccgaaaactcgctatacctcaggctgctctatgcctacctcagggagttcgtgccaacgcgcactccacccgttaatatgtccgggggcggcaccctgctccaccgtgcacccagccatggcgtcgatgcaatcgactcgtttgcacgggccgagttcttccttcacacccttgtccacttctggcttgtcggcgatgacttctcgccgctccccaagcagacttgccatgcactcggcttgcggttaccttctcgtgctcatgctgacttgagtgagcggccaccgtcgccaggcctgggtgatgcagtgaagctgcttgtcatgtacctcaactgctgcgatggccgcgcactagccgatgcgtgtgtgccatctcctcaagggttgtcagtgtccaatgggctctgtgatacccaggttgggttctggaatccattgatacagaggcctttgtaccggtttgtactcaggaccttcttattctgccccattggcactgcgataaaaaatgcgtcacaagtcttctctgtgtggttggcttatatggagccatggaaagttacccaacaggagctggataggtatggcaagcagcaaggcggggatgagaaggagccacaaacgactaagatggtgtacaattcatcgtggaggacgtatgtcctgtcgaattacctgttctacaactcaatggttgtgcatttcttgggatttgcgcacaagtttatccattctgatgttgcctcagtgctgctaatggtacacaaggtgttggaggtcttgagctcttccccggagctattaggtcttctccataaagtggacgctgcttgccactctaggctagtggcatcatccccagcatctgatcatgtgttgaagtatgtgccatcaatccgtgaacagctaaaggactgggaggatggtttgtcagaaagtgatgcagatgggtcattgttgcatgagcattggaactctgatcttaggcttttcagttacgatgagaatggggcttataatcttcttcagctacttttggtccgagcagagtcagagatactgcgccttccaggtgagacgcaacaagcactccagacgctggattctatcaagtcacagatgaaaacagccttccaagggcacattgaaagaattaacgggaatacgtcgttggaggaatcacataatcaacagcatcaggtgcgtggggaggtattcacacctaagcatcccagcttgaggaagggttcttgggctgatgttaaatacaaaggtagtcctgctggcgccacctacattcagtttgatgggaacacgacggtgggcgggccaagggatgctgcgagaatggctctcggtgctgtatgttcattcatggtgctagtggggcaagcggtactgaagttgatgaggtcgcacagggtgaagatcagtctgagagtgtttgcttcgaagaaactgctctcagccgctgttgtgctgtatgcagtggtggccgtgacacggaatgtatcgcgttgagagttttgatttgataatggggttatgctgtataagctaagcttgtagaggaagtcgatcgataggaggaaaagaaaagaaaagtgtgtcgttctgctgttgtccagtaagcttgatgtaaatgcctgcactggaatggttttggacttaaaaacgcaatggagtaattaggacagttctaacagtattaaaacagctgctagctcctcatggaagcgttaaatgtatcggtggccttcgaagttcacttaaaaggtcaatacatttttaggctcttatttctaagcttgtaaaaatggtgcattgttatggataacaaacttaaggacctagaaacaatgtaactcagaattcatgcatttaactcagaatgtttgattctgcgtggacaaaacagtccgattgcattcccaagctcttaaacgattagtactagtatatagtagttagaagaaagaggaatcactattgataacagatgtcggcattctcctcgctcctgctgccatcgtttttcctttttcctggacagccactgcaactcctcccaaatcctcccacccggtttagccggctccgctgccaccgccgcgactccacctctgtcgccaccatggtcaagtccaaggccatcagggtccacgagctgggcggccccgaggtgctgcggtgggaggaggtggaggtcggggagcccggtgaaggggagatccgcatcaggaccaccgccgtcggcgtcaacttcatcgacatctactttcggaagggggtctacgccgcgcccaccatgcccttcaccccaggaatggaagccgttggcgtcgtcaccgctgttgggcctggcctcactggcaggaaggtgggcgatgttgttgcatatgccggcaaccccatgggctcctatgctcaggagcagatccttccagcggctgtcgctgttcctgttccaccttccgttgatcataagcaagcagcttctgtgatgctcaagggcatgaccgcccatgttctgcttcgccgggtattcaaggttgagagtggccatactatcctggtccatgctgctgctggtggtgtcggctcactcctttgtcaatgggcaaacgcccttggtgccactgtcatcgggactgtttccaatcaagaaaaagccgctcaggcagctcaggatggatgccaccatgacgaatctactag

SEQ ID NO: 36623 - DNA, 1312 bp, Zea Mays
cacacacactcactcactcgtacgccgtcgcttcctgcgctcatgataggctccgccgcctggtgctgctcctcgtcgttgccaccgcggcggcggctttgcttctggcgccgacgacggcggatgctgcgctgccgcgggtgcagcacacgcccaccaaggccgacgggtcgctcgccatcctcgtcgtcggcgactggggccgccgtggacagttcaaccagaccttggttgcccagcagatgggcgtggtggggcagaagctggacatcgacttcgtcatctccaccggcgacaacatctacgacgacggcatcgccaacaccagcgaccccctcttcaaggaatcgttctccaatatctacactgccaacagccttcagaagccttggtacctggtccttggtaaccatgactacacgggaaacgcgctcgcgcagctcgaccctgccattcgcaaagtggatagccggtacaccgccattgccaagtccttcattgtcaactcagggattgcggattttttcctcgtcgacacaacgccgttcattgtccactactggaacaacaccaagttcgattggagaggcgtcgctcctcgagacacctacatcgcgaatctcctcaaggacttgaagtgtgcactgacagcgtccaaggctccctggaagatcgtcgtgggtcaccaccccatcagcagcgcctgcgggcatgggaacaacactgagctggaggagttgcttctcccggtcctgactacacacggggttgacatgtacttgaatggccatgaccactgcctgcagcgcgtcagcagcagagacagtcgtcttcagctattaaccagcggcggcgggtccaaggcatgggctggcaagttcaagcccaccctcgacaaggtggagttcctctacgacggccaggggttcatgtcgatgcgcctgagcaggacggaggcccgcctcgcgttcttcgacgtcgctggcagcgtcctgcactgctggaccatgcatgcccaaaaattaacgacgacgacgactgctgctgcagctaggcactaaagctttgctgggtacgatgagttgatgatgcaattaattatttggttttgtcgtcttttcgtgcgtgagagggaagcaataataattaattgctgctgcttctgttgttgtgtgcacatgcatgtgagggtgtcaagtatgttcagcctcttgcaagataaaatctctcgtcttctgtggaataaactgggaaaaaagtttttttttgtaaagtatgcaggagtttcgcgtgtgctgatatttcatagtga

SEQ ID NO: 36624 - DNA, 6993 bp, Zea Mays
gcatgtatatagatggattttggagcgctacgtttcatatgttgaaaaagggcatgataaagaaataaaaatatcaaatcaaacgagccttgatatacttaacggtacacgcacttgtgtgtgttttgtttcgttttaatctgttactattcggttgcccgtgcgttgcaacaactcataacaatacccacgtaaactatgcaccaaaaagatctaaagatttttattgattgtctctgctttctgcataattttttttatttgactaagcgagtcgacatcgtggtaaagaaaaggtcatgtagacaggcgatgtcaaaccatcgaatgggtaccataggtagcaaatcagggacctcatccatcgcctctcccacttccaaagtttcgtagaccaggaagggaaggaaagaggcagtcatacatgttcgttgccggagaaggacacgacgaagacatggacatctggaggcgacataggtaatataccgctagatacatacatggagacagcacacaagcggagaaagaagcccaatcagggcaactccaaaccgagaggcacccgcaccaggcgtcagtccgaaaaaggcgagagaatgcgagtgccttccagccctggatccgccgaggcgacacaacaccaccaccaactccgtagcatatgtcgactactgccgcgctacaggctttgattgtccaatatctcagatctggactcgtcatcgccaagataacctaagtgtggcaggcaccgtcgtgtcctcctcggcaacacgcacgaagaaaagttaggagcaagattgacttgcccgtacccgcgttgacgagcgtcggtcggctcacggctgcgaccgtaggcaggggcagcaggttggggagaaagaaaagggcgaaggccaagaagacgaacgggacgtccgacgacagcgaaaacgatggtgcgtgcatgctatgaaacaccctcgtggacgtgcaatagccactgcgcgggtcggtgtcggggctggtgtcggactaatacggagaggagacgcctgctcccacgccgtctgccgagaatgcgtggcacggaggcgaaggcatgaggggagagagaaaataagcagaatgacgaacgaggtggcggcaactgaggtgagcaccatcattatcgtgcgaaggtatagatggacaaatgggtcgtgcctggcgggctggtctggggcacggaccatttaatagttcctgggccagcccgacacgatcgtcgtgtcatgtttgggctgtagcctcggcccgtagtgctgatccggcctgacacgattatatttttatttattttacaaaactcgtatatatgtaaaatttatattcaatatcaaaaacaattgaccatgatgttctactggttagacgactccacttagtgtctcccgcccttcttccattagggcttaggttcgaacaccacattttataaatattttacgctaatttaaccacccgactggtaacgggccagacgtggaagttgtgtgcatggaaggatgcatggttaatttgagatagatgtgagggattatttgtaaaaatatgacatagaacgaccgttgaaactgatgctttaagtatagtagagataagtagtatctcgatgctgtaacaatagaatcggacctattgcttattactacactcttcctcaaacatttatcgtccataaatttatttttaaacaaaacaatgataaatagaaaagaacaaagagagtactatatttatgcgaaacaaaacgagcgtccgtggtactaaaatagaagtacaactaaacgaattgataataaactacacacaaaaagaaataagccaaaatacgcatggggacagtatgggatctagagctaagcgaatatgaccttgtatagaatcaaaatatgactcagcggtccgatgacaacgaggaatttaccgtcagggaatagctttttatgcatgttcatgcgacataaaatttttcctataaagattctcacgaacgtttgcgggccatatttttctccatccctgtttcgagataaatccccgacaaggatcgccatcctcgtttaaattataattagaacatacattatttattactaatgcaaaacattttcacttatacatattgttatatgtaagaaatcattatatatacattaaaataagcatatttatataaatgagtgatctatagacaaaataattatttatttttatcattaactaatacatgaaaactttgtcacgttcaggtttaacgggtcccgcggggagcgaggatgaggaatgcttcccggtccatatccccgtttacctaccgggggaagattttcctccgtttagatttccttgaggaagaaactttctcatccacatcctctaaggactattttggaaggcacaaaaccggagatgattgtaggggctagaatacacttcttatttaaaattgaataagaagaggattagctctaatagaggaattccctacgagaaatcgggatcggcgctcattgccatctctaagtgaatctcagctactcaagcactccaacgaagatgacaaacaatacagtccatctgatggcggagctgtacaccacatccacgagccaaatgtcgagtcaacaatacatgaggatagtaatgcacaactcttcgttctgcccaaatatatagctccaagtcatgacatcgagcaaacaacaaaagtaagatgtatcttttatatctttttacttgaggctatatcattgttacttgctcgataaacttcgggtcataaacgaaaccagcatagaagcttaggagtgtttgaatgtgctaaaactaatagttaactgttaaaattaattgaatatatctaaataatctagttaatagttttgttattagctacttttagcaaattagctaatagttagttagctatttgtaagctagctaattccactagtattttttagtcaactaactattagttctagtatatttagacacacctttagacacatcattttgtctaaaaatagcatatgtgcacctatgtgaatttcccgtcatacattgatatttatccaagcaatttcatcattttctccgaataccaattttgttatcttggatgtggattgggggcggctctttatatcctagggatagcaacagatcggattaaaattagatattgcaaatatctgttcccagtcatatttgcggttgcaactaatattcgctcgcgaccatacctgagggtaaaaaattatattcatgttcgtgcctatcgggtttctgatatccatcggatatgacacaatctttttcaacaattcaataacatgattaatcaaatctcttcccaattcactatcatacacggttaaaaaattaataaaaaattatacaatacacatgttttttaacaagcaatattctcaatattacaacatggaagggtcgacggactagaaggggtgggagtcgaggaccgcatgaaagtggcgggggaggctcgttggcgttggactggaagcgtgaatgggtagcaacaacgtggactgaagagtgagtggtagttggaagggcgactacagtaggattgaggtgcaagcaagaagtggcgactacaagcattagaggggatgacctgcaaggtgcaggctgcggccaggggcactgtagccgtcgaccagacgccaacggtgctacggtctatgggacttaaaaggggacacgacacacagcgcaggaagtcatcaaggctagaaagagtgatcaacggtgtggaattgggagtgcttggggtttagggagttagggttttctctttattgtgtaataatatgtgttaggctaaaaataaactatggtccgatttcggatatctaatggataacctaagggtgagaggtaatgtcctaatacatgcccacccaattttgggtcggatatgcggctgacccacaggtcaaaaatgtatccatatccggcttcattaggtcggatatcagaagttggtgaaggaggttattaagatcttaagaaaatcgtgaagttgaagttgtaaacctttaaaatacattttgatataagttattttatttattatttatatttaaaatattttttaaaactatttaaatttaaattgtaaactacagctttacactgaagcaagaaactagggcactcctaaacacacccttattcgtgtcatcttctagtgcaacaagttaaaatgaattatatttaggctatcatttgtcaaaaacaaatatatttaatttttaaatcgattatatttaggttgtcatttttgtacctgttggaggtcttcgtcttccgaaggtcctcaaaaacataatttaacaatgttttccaagtgtaacacgtgaacaggtaccttcggattcgggttaaaaccatatacgatgtgaaaagcgtggtcgagacgaagactgatgttgctccgaagctacgcgcaagggagcttcgacgcaatggcggaaaaagaaaccgacataaagaggaaaagactatctagtccccattaggttgtccataagtcaatagtaaatatgaagcgcatgaatgtaaatttacacaggctgcgccccgtgcctataaatagatgaatagtaccccctactattcacgctgacttgtattcgtttgtgcgtcacgcttggactttttaccttctgtcaagccgaaggtataaatataattcaatattgttctcattcatccatagtgtaatagagatacattaccaatgtcgtatgattatttatgttatttctcatgtttcatatgcttcgtctttcatttatatatatatatatatatatatatatatatatatatatatatatatatataagctgtgatgatgaaggtatatcattggtaaccttcgtccgaagatcattatatccttgaggaaataatgcttcgaaggacgaagggacattaaccattaacctatttttgtgtagccttgttcttaattcatagcatttgagaacaagtccacaacagtaccgaatatggatacacctaatttgctagtggaaagggatgtcaacgggtcacatttaaattggatattgcaaatatctacccataactatatccgtggttgcaactaatatccatccgtgatcatatccgcgggtaggaaattatttctatgcccgtggccatctggtttcggacgggtttcgaatatctatcggatatgacatacacaatcattttttaacgattgaataacataattaatcaaatttctttccaccgttatacacaattaaaaatttaataaaagaattattattgattggagcttgaatagtgctagccgcctacggtggtgcgacctatgatatttggaatggggcttaaggcacattgcaagaaaccaacaagactagaaaggccggtcaatggaggagaattgggagcattatacatgaggttcatggagttaggttttgttctttgctgtataatatagtctagacaaaaaaattattggtcaattttgattatccaacagatatcccacacgtgtgagataatatcctaatttataccggtccgacttcggatcaaatacgggttgatccacgggttaaaaaatatatttagagctagtttgagaacccatttttccataaaatttgtaattttctaaaagaaaataaactaatttctcttggaaaaataaaaaatctttggaaaaatatacctcccaaactggccattatatccggcttcctgcggtcgaatattatcatcctcctcccgccacgcggccaccactcaacgccaccctccctgttctgtggccatcgtcctcctcgcgttcccctccatggccctaccttctctgattctgtcgaccagataagcacaagactgctacttcaactattgattccccgccttgacgctgcactcttgcctgcactgcctcgccaacctctctgcaaacgcttcgacggatacgagtacagagagttcaactgtgcacagtgatcaaaaaggtattttcgcggaaaaaggatccgatccgttataaacctgcgtgtagtgtagtgtagtgagtgattcacgatcacgagtaggagtaggagcacctgtcgtctaagttggtagcatcatcaggttattcagctcggattcgttgttcgtaaacaatcgtagccgatgaaggcgtgcaagcgacaccgccgatatatatatatggtagagataagattcccaatctcccaggatgaacagacgggcagcaatccaagaagcagcagcccacatcatctctgatggtacgcaacggagtatctgtctgtcgcaaacaactggcgcctctcccacacacagataaataatgcagcgcagcgcacacagtggaaagaaaccggaggaccacaagtgaaggctctctctctctctctctctctctctctctctctcacaggaggggggtggtgtggttgcaattgcagcggggacgcgacgcgacgcgacgggtggagagcacgagcacggccgggtgtccccgtcgccgtcgcctccagtcgccatctccatcccgtcagatttttagcaaacggataacacttgcttgttgcttccactccactcgatccgagaagacgcaactcagtgctgccatttacttacgcgcgcgcgcacagatgcagatgcagaaggtctcgctctcggttaataacccgtggccgcggtacaacaatcttctggacgccagacggcatcgcgcagttgatgatgagacagcaacggcggcgacggcgatatgcgcgcggcaatatctgtgagaccggttggtggaggggcgatcgggccgggccggttcacctgcactccatggccaccgcacgtttgcgaggtctgagaaaaaaaaatcttcaaccccgcatgccttgttcacaataacctgcg

SEQ ID NO: 36625 - DNA, 271 bp, Zea Mays
gaacaaggcaacataaaatgttaaatatcaatgcccttcgtccgctgaagcattatctcccttaaggatttaatgaacttcggacgaagaccacgagcggaatattacgaaggtttcaccttcgtaattaaacttacaaaaataatacaaagtaatataaaatgtgaaacaataaagataaatacattggaaataaatgacatcatttatatatcttattatatgaatctaagatgtttgaacataatatttaggtacatttatacctttg

SEQ ID NO: 36626 - DNA, 1773 bp, Zea Mays
ccccaccgcacgcatccagtggctgctgccgcctcgcccccgctcctcctcctctcccgccacccacgccgcgcaggcctcacctactggtcgtcgttgcctaggggccagaacgcagggcccacagccccgccgcccgccaccgcctccaagcctgctgcgccgctcactgtcaacctgcctcgccaagtcgcccggatctcgacgccccacctgcggccggcggcggccccgccaaggtgccctgacagacgcggagacgccaccagaaccacggagttcgtgcgctggctggttgtctgcggaagactctccctctggacgagggtgttgcgccacatggcggcggagctgcgcatagatatgaggaccgatggatacgtgcgcgtccgcgacctgttgaagctcaaccttcagaccttcgccaaggcccctctcaagtctcacactgttgacgagatcagggaggcagtcaggcaggacaacaagcagcggtttagtctgttggaggaagatggcgagctgttgatccgggcgaaccaggggcacacagtaacaactgtcacatcagagagcctgctgaagcccattttgtcccccgacgaagtgtcagaaaaaaccttgactcgattttgcaatttgggctaaagcgtatggcaaggttacacatacatttctcaagcggcttaccatcagatggagaagtaaccagtggtgtacggcagaatgtaaacatcttgatacatctggacgttagtaaagcacttaaaggtgggatgaagctttatatttcagacaacaaagtgatcttgacagaaggttttgatggcgtcgtcccggtgaaatactttgaaagagtcgaaacatggccaggacgagctccaataccgttccagagataacaggccatgttaccatttttcgacgagttagtttctctgtgcctgaggatgtcaagagggtttgccaaccatctatcctaattaatggagtacgagaagtttgcggagtatgagcagaagtactcagaggatgcagcaaccaaacattgaaaagtatcatggggagttgcctgcctgctgggctgatgcccttcctcagctcagtttggcaacttccagaagcatacgcctgaggtgcgcaacgtctgcttcggagcgagggagcatggcatgggcggcatttgcaacggtgggcacagcccagggctccgtttcatggccaacgactgctatgcaagcagtccttctttacaagcgtgcaagcaaacatccggtccattagattacgatccaaccacagatataactataatttgttatggttttttataaagattattgagttggtggtgaaaaggtttaagtattaaatgtgacctacggttgaatcacgatctaatggaccagatggtttgcttatggtttgcttgcacgcttgcaaagaaggactgcttgcatagcagtcgttgccccgttctatgttgttggtacctatcttgcttctctgatcgatcaataaaaggagacattatttgagggaccctttttgggtgccttgtatgctgtagctgttcaagtggctgaataaggctgcaagtcttgtgtaaggtgagactctgatgcataagctttgcaacttgcaagtgatgttggattttggaatgttatcaactttagtacacgttttctggccgtctgatcgaatcctggacaccaggggtagaattaattggtcgatcagagctgttaatcgtccaggccttgaaaaacg

SEQ ID NO: 36627 - DNA, 1896 bp, Zea Mays
agcgagttggattcagagtcagagcaaccctatctcttccccactccgctcctcgctcaccctctcaccaaatccttctcctccgcgccgccacagccgggcgcgcctctcgatcgagatccaggagatatgcctcgttatgatgatcgccatgggaatacacgcttgtatgttggaagattggcccctcgcacccgttcccgcgacctagaatatcttttcagcaaatatggaaggtaagagccgcactctgtctgcacagagagttattctgaagttcagagtgtgctaacttttattatgagggtgagacaccagttctgtcctagtatcacgagcagtttgtgctaacactgtggttgaattttgtggtacacagctacacatcaatcctgctaaactacactagcaaatatagggtcctttcctattttgttgatgatatgtggtttatgaaggttttgtgttgcttgaagtcattctgaggtttttgtggatggggtcatacaagtcttttttcttggtgtatgctctgttacatcactaagcacttcatagatgtttgacctccgggcctgtttgacttgaatgatcttgttgaaggttttcggttttttacccaaccatggaggtctgtggtggaagggtgcccttggtggaattggtggccattgttccgatatttgtggaggactttggtgaagggcgcccttggtgtaatcttattgactgttgtagatgaagttgcaagttgatgcatttgagtacttgactcatgtcagcagcttactgtttgtggaaactatttgcgcagaatacgtgaagtggagttgaagcgtgactatgcattcatttacaacctagatggcagggaagtcgatggaagccgtattattgttgaatttgctaaaggagttcctcgtggttctggtggttcacgtgagtacatgggaagaggacctccaccaggaacaggtcgttgttttaactgtggaatggatggtcactgggcaagggactgcaaggctggtgactggaagaacaaatgctaccgctgtggtgaatcgggccatatagagagaaattgccagaacagtccaaggaatctcaggcgtgataaaagctattcacggtctccatccccacgtggtggacgtggccgcagccggagctacagcagaagccggagctatagccgatccagatccccatctggatctcccaggggtggacgccgtgaacgtgacgagaggagatctaggagtcttagctacagcaggagcgcaagccccaggcgttctgtctcacctgcaaaggaaaaggagcgcagtcgcacacccaatggcagtaggagcccaaggagccccagcccaagggctgaggtgagcccaccactgaaggataatggtgcacgcaatggctcagaccatgaaggcaaccctggtggtggagagaacagcaagaggagtcggagcccatctgatggctaccgtagccctgtggccaatgggcgcagcccgagcccgagggacgatcggagcccaagccccaagggcaacaacgaagatgacgagcgccgtggttcacctagaggaagtcagtcccccctgaactgagaaattctgatcaaatttgggccgcacgattcggttgtaactgttatattttagtttgagacaacaaactgtatttgctcatttctcatacagtcaggtttatgctttttgagctagaaaacatgtgtaagaatttgttaccttcaagctattcctggtttgtgatatggtaatacttgaactatttagcttgccaaatctgaatacttttaactatcaagtatcttgagttagtttgtctgttttgctaagctgcagcatttctcactaacgctttcgg

SEQ ID NO: 36628 - DNA, 3558 bp, Zea Mays
atgtatgtatctgcgcatttgccatttctggttacgctttcctctccggcctttccatcatcgccaccatttcgcacctcctccacaccggcaaacaacttcacgtcgcatgatctcgcgggagcgctcgaggatatgcaagtggcggccgctgcggcgtcaatgcgcggcaccgagacggttggcgcgaagtctgctgcgcggcggttgagccgcgtgctggtcgggcgccgccgccgggccgccgtgctgctcctcgcgctggcttacgcggctgcgatgctcatgctcaccattggcggcagcgaggggtctggatccagcggcgtggtggcgggtgtgctaaggcggggcgcgcaatcggcgccccccgggtcggtgtaccgcagccacctcgtgttcgaacggctgctcccggaaatgcgcgccttcgcctcccgcccgaacccgttagtgacatctcaatacaaaaagtttggaaagcaatgggaaccttgtatcagcaaggggttgatacactcagagctaccgccttcaaatggtttcctcatagttgaggcaaatggtggcttgaatcaacaacgcatttcaatttgtgatgctattgccgtggccaaaattcttaatgcaactcttgtgacaccagcatttcatttgaatagcgtttggcgtgattctagcaaatttggtgatatctttgacgaagatcacttcattgagtcacttagaaaatatgtaagggttgtaaaagatcttcctgaagatgtttttctgcgattcaaccataatatcagcataataccaaacatgagaaccaaagctttctcacccccaagttactacttacaacatgtgcttccaaagctgttggagctaggggctgtgcgtattgcccctttctcaaatagactggctcattcagttcctatgaatatccaggcattgagatgtttgacaaactataaggcattaagattttctgaaccaataagaattcttgcagataatatggttgaccgaatgatcaagaggagttttttaagtggcgggaagacatggtagctttttcatgctgtaattatgatggtggctcgacggagaataatgcaatggaaaatgctcgcgaaaggagctggagagggaaattccaccgacctggtcgagtgataaatcctgaggctaaccgaaggaatgggagatgccctttgacacctttggaggtcggaatgatgctgcgaggaatgggatttgacaacactacttccctttatgttgcatccggtaaaatatataacgctgaaaagtacatgactcctcttcgacggttgtttccatttctacaaacaaaacacgctctagttacacctgaggagcttgcacagttcaaggtacctttttccttgattattccagtcctcaaacaaattttagaaagtgtgcctcccttatcctgtttgtattgcatcaagaaatggaggccaggtatcaaaggataagttggccttcttacacactctgtagggacattcatcaagacttgcagcactggactatactatctgtcttcatagcgaagtgtttgtgatgacacaaggaagcaatttccctcactttctgatggggcacagacgttatatgtatggaggacatgcaaagacaataaaaccagataagcggaagctagttcaactctttgacaatccaaatatcaggtaacaaggtaatgaaggccgaattcaggagacaaaatttgaagacatgacctcagataaatagcgtctaaagccatcaaaatatctcccttgatgatactctagcaagatttatagaagtggtcagtaaagccatctggccctggcgccttgtccattggcatgtcttttatagttgcccatagctccgcttccatgaaaggagcatctagttgagagagctcaatctgctgtatacccaattctgcaaggtcaacggtataaattggttcttcagctttccccagcaggttttcataaaagtctagcacaactgcttgcttgtcctcttgggaaactgctatctgatcaccaacattaagcttgggtatgaaattcttcttcctgaaccttgcttgctgatggaagaaggctgtattagcatcgccgtcttggagatagaggatacaggaccgcaagcgggcaatggttctttcaagggaggccaggccaaggcagtgtagtttaagcttcctccgcagccactcctgttcagagagatcccttgaatcacgctcaatttccagtcgatgtaagatttctttggccatttccatctgaactttgatgttgcccaccttcctctgaccccatttctgcagccctttactgagcctttgcaatttcagaaataggcgctcaactgcacaatttgaagacacaggagcttcctaattctgcttcaccgcatccaagaagcccggtattttggtccaaaaactttcaaaatggaaccgacgcttaccagcagtcttcactttgaggccaagtatgagggggtagtggtcagacactcctgctgtcatgctttgcagaattgactccggaaataaaccatcccaatcaacacagcaaaaggctctgtccagcctaaccaaagtacgggtctacgggactgccgctcattagaccaagtgtatttccttccaagcagggggatctccttgacctccatatcattcaagaagcgtctgaaacttgccatcatcgctgtatccaggtttgcattgtttttgtcagcagcctgatagatgagattaaagtcacctgctactagccaagggccactgtagatcgccctgatatccctgagttcctgcaggaaggacactttctcatcgtctccctgtggtccataaactccagtgaacttccggccttcttgctcagcaaattgaatttcgttcatcctcgtgaagtttcataaactgtcaatgaatgtggcttgaaattcgtccacatgtagccatttttgtgtccaagataacggtcatctgatgacccttatttcataaaggtttcgccaaacatgattgcctctgtgtttattctaatctaattacagtataccgaatcctttatgtgcatgctgacactgacatacattgaatcttctgtaactggttactttcttttagttctgaacacctgcaatgggcagaacacgaaagggtttatgatttttttttcgtaatcatcatctagttgtggagtatcaaagctaatcttgtacgtagatgggatcgattcaagcaccacatgcaggacatgcgtcggcacagtgagatgaaaggtttcgcattaaggaaaccacaggaatccatatacacccttcctatgcctgactgcatgtgtcagcaagctgaagcacgatcaagggacacggcaaggagctaggcatgttccacccttcttctaacttgtaagcaggcacattaagcaaaggaaaaataaatattggtttgagcgtagaagagaatatagagatttcaaattatatggcccttgatatgaatcccttcctcaa

SEQ ID NO: 36629 - DNA, 6281 bp, Zea Mays
gtgagcttctggaggggtgaagtcagctgatatgatgtacctcatttggataacaatttgactggcaccagattttacagaaatatgcaggaggggctagggcaaaggatgcatgtacctcatggtatcaatctgtgtatcgcaacttcttccatgccctttcaggcgcaatctttcattgagcccagtaccggacaagtgaaccctcctgtaacatctgaaaacttatctgctaactcacaagctgttaatgatgctggagcagttgaaggtactgacatgaacgaaaaatcggttcaaaaacctaagaggaaaaaacataggccaaaggtcattaaagaaggacaatcagcaaagctgcagaagcctaaaactcccaagcctcccaaggaaaatgggaatcagcctactggaaaaagaaagtatgtcaggaggaagggactaagtgcaccagctgaacaaattccactatgtgctgatacacacactagagctaaaccaggagtagtccaaagatgtttggactttgatgtggaggaccagcatggacatttggatctggtaccgcaaacccaggaaacagagatacagactggtcctgcggacacacaaccatcaatatctggagttgaaagaagtaatgttcaaatatcataccattggggtggtacaagcagttctattagttcagttgacccaatagctggtatacacggattacaggcagactgcaattctaaaagagtcagttttgatctgaacaattctatagtaagtcagctgccaaccaattattctagtccaatggacagctctgaacaatttttcaattttgatttaagagaagaagttcgaacaaaccagttattgcctcatctaaccagctcggtagatcacacacgacacccctcggtcaattttgaccaatacataagcacatctcaagattgtccagaaaaatcacccagacattatcagatggtcagtagttatagaattctagaaaatatgacaacagcttctcagtataccgaaagggtgtctatggggggcaatttcaaccctgaagcttgtatgggcgaagatgcaataatcaaacaaatggcccaaagctatagacctctagaaagtccatttgtacctcccaatcataatgaaagggatatgatgaacggaaatctgaacgagtttcctgtgaagaatgattacttgaagttttctaccaatagtaactaccaaactggagcaggttttgatcattgttctccagactattcagatgttcttgcaatgggtacaaaaagagaacatgatgctatcagtggccatcagatttctcttggcattgactttattaactcaaatagaacaaggaagttctgtagtgatgaccccctttccactagctctcaaacatcttactgtcctcaatcatgcaaaaggatgaggccagaggatcatagcaatcagctccatggaactatgggtaagctttcttccgcatcagcattttctgatggtttgaacacaaataaagtttcagctatgaaccctagaattggtaccttggctgacgtacaattgttgatggcccttgagaaatcaaaagcttcacaacaaatgtttgagtttgactatgttacgtcacaaaataacatgatccatgaacgtactgggcttgctctgcaaaatattgctgacaaaggatttattgctctacctaataaacagttcccaagcttcgctgcacagaacatacctttgcctggcagtactgtgaaccaattgggagaaagtaataccttgaggaatggagtgcatcaaattcaaccttgggaaattacatataggctacatgactctagagacaatttttctttaccagggaacacacagttctcgaatggcacagtgaatccatcctcagaaaactatattcagagtaatgctattcatgaacatcaatgcttagaaaacgttgtggctaaggtgccagttttgtctgaaacacaaaatacttccactcaagagggccataaccactgcactgctgctactactgatgagcatatcagaactacaagtgatgaagttgttagatccctcacccgacgtgcaagccaaccaactacaaatgggaactacaatattaaatcttctagagtaactgcagaagcaaactgcactgagaagccaagaaaaaggggtcgtccaagaaaagtagtaaaccccaatggggagccaaaagaaagaggtactaaagggaaacaaaatgttggtcatgcagaacttatatcaccaaaaggttcatgtgctgactttttaaaaactaatggtattacttatgcttctgaatcttccactggaattactcctaggatgtcaactgtggagttgaaaagttctgaccaagataaggagattcatggaggtgccatgcctcaagctacagcagcatcagttgatcctttagatggcataattgaaaagattaagctcttaaccataaacggaccagacaagggtgtgtcagaggtacctaaaaatgctcttgttccttatgaaggtgaatttagtgcactgattgcatttgaggggaaggcaaagaaaagccgtcctcgggccaaagtgaacatcgatccagtcaccactatgatgtggaacttattaatggggccagatatgggtgatgatgccgaagggttagacaaggataaagagaagtggcttgatgaagaaagaagagtgttcagaggacgggttgattcattcattgctcgtatgcatctagttcagggggataggcgtttctctcgatggaaaggatcagtcgtggattcagtcgtgggtgtatttcttacccagaatgtttcagatcatctttctagttctgctttcatggcggttgctgccaaatttcctgttaagatagaggtccctaaaaaacctgtggctgagatgtctcatactcctgaacagaaggatagttgttctggactgtttggtgattctatcaaattgcagggcaatatatacattgaagagataagtgacattaaatcgttaattactacagaagataatgaagaaagtaataataacgaattgattggaaactctgctgggaatggagtaaactgtgcaactggaggatgccatgtctcttatagtgtggtagaaactgaagatggatcactggaggatgttatttcttctcaaaattctgctgtttcttcccagaattccccagattatgttgttcgtagaaccgatccaataggttctagttcgttacaaaatttcactgaagagggctgtattatgagaaatatgtccaatgggactggcatctctactgactatacattgtttctgccaattcaagatccaaaaggcatgctcggattatcagaatattgtggacttaatcctcttccagtttcaggtgtgaacaaggacatgttgcttgatctaaacagatcatatcagccattacatacttatatgccctatgatcagaatagtgagtctgatttcacaggtgtgtcatgtttgaaccatatgggtaaatcattccacacaggccctgataaagtgaatctttccagtgttacacagtctgaggctagtctttaccctattgatcctttagaacaaggcgacttttcaccactaattaaacaaaacttccaaccattacatagttcagacgaagtgccatttttcaaggagcactcttcatgtaatgattttttgaggaacaaaactgaagctcattttctggaaccacttgtctgttcaaatcctcaagaggtgtacacaacctcaacagatcaaatgggtgctgaacaatctcaatcaggatgtggccaaaagtacaatgatgccagagttcagacagcatcacatgaaaggcatcagtcttcaaccttgtgtgataaccagaactcttgttcggtggtgttgcaaggagttgcttcagactcaacacagaagttcgttgatactcaaaaggggccgtcaaaagctcgacaaaatggatcaaaagctaaggtacggggccgacctaaaaagaaaactgatgactgggacagtttacggaaaaaagtgctttctaatggtggggacaaacaaagaagtcatgatgcaagggatactgttgattgggaggcagttaggcaagcagaagtacgggaaatatctgaaaccatcagagagagaggaatgaataatatgctagcagaacggataaaggaattcttgaaccgattggtgacagaccatggaagcattgatcttgaatggctaagagatgttcaaccagacaaagcaaaggacttccttctaagcattagagggcttggactcaaaagtgttgagtgtgttcgcctcttgacactacatcatatggcttttccagtggacacaaatgttggtcggatatgtgtgaggcttggatgggtgccacttcaaccactgccagagtctcttcagttgcacctcttggaaatgtatcccatgctggagcacatacagaagtacctctggcctcgactatgcaaactagatcaacgtacattgtatgagcttcactaccaaatgattacttttggaaaggttttctgcacaaaaagtaagcctaattgcaattcatgtccaatgagagctgaatgtaagcactttgctagtgcatttgcaagtgctaggcttgctcttcctgcacctgaagaaaaatgtttggttacattggaagatccaaatgttgtagagttttctcaccaaacatacataaactcagggagtgttggccaacttgagtggagtgcaaattatcctaaacatgctgtttctggtaatcatcagccaatcatcgaggaaccactgagcccagaatgtgaaactgaaaatatagaggcacatgagggtgcaattgaggatttcttttgtgaagaatctgatgaaattcctaccattaatcttaatatcgaggagttcacacaaaacttgaaggactatatgcaagcaaacaatgttgagattgaatatgctgacatgtcaaaggcattggttgccatcacgcctgatgctgcttccattccaactccaaagctcaagaatgtcaatcgtctgaggacagaacaccaagtttatgaactgccagattcacaccctcttctggaaggattcgaacagagagaaccagatgatccctgtccatatcttctttccatatggaccccaggtgaaactgcacaatcgatcgatgcccccaagacattctgtgattcaggggagacgggtagactatgtggaagttcaacatgctttagttgcaacaatatacgagaaatgcaggctcagaaagtcagaggaacacttttgataccatgccgaacagcaatgagaggaagcttcccacttaatgggacgtattttcaagttaatgaggtatttgctgaccattgctcaagtcaaaatccaattgatgtcccacgaagttggatttgggacctcccaagacgaactgtttactttggaacctcagttcctacaatattcagaggtttaacgactgaagagatacaacgatgcttttggagaggatttgtttgcgtgaggggctttgataggacagtgagggcaccaaggcccctttatgcaaggttgcattttcctgtcagcaaggttgttagaggcaaaaagcctggagcagcaagagcagaagaataatagtacattgaagaaatataggggtgctaaccagacgaggatggatagcccgaaatgagatgctgacccaataggtcgccaaatcacctccaaattctaacccaatgacttccatctgtaatgaatggcaataccttgaaaacctgtgatggagatgttttgtggcgacatgatctcttaaattagattccgtctttggtaacagcctagctgttcttgttgagtcgcatattctttattctgaagatcaatatagcaaatgggagaaaaaacatagtgcacagtcgagctgttctaattgtacctcttgtgagtggaatcagttgttgtacaacaggaagatggacctatctgtacaatggtcgtacatgttctttgatcatagtataaacaatgtaagcctcatcagccgttatttgattgtttcaaaacaaaggaaaagcattttcaattcatctgttcaaagactatttccttttccccccttctatcttgagatggaaactgactaattttttacttgtggggatctgacagtgaatatatcaaaa

SEQ ID NO: 36630 - DNA, 3852 bp, Zea Mays
cccgccaggccagcggccatgcccctccccggcggcaacggcgagccctctccccctccaccgccgttcccctcactcatcaaactcggctgcgcggtcaccgctcgccacgtcgaccgcctcctgacagtgctcctccgccgccgcaggcaccgcctcctcgccgcgctcgcctcccaggcgcttgccaacggcatcgcccctactccgcgcacgcacctccttgccgcctccgccctgctcgactccgcgcggccgcgtgacgccgcacagcgcctcgcgcttgcctccagcacctccactcgccacctctgggatgcactgctccgccgggcctgtgccagaggcggcgacccgcgccacgctctggagctactctccgctgccattgaagaccacggcatggtgctgtcgccgtccacgtattgcgggatggtggtgttgctgtgcgcccacggggaggtggattgcgcgctcagggtgttcgacataatgaccaatagggggtgtcaggtagacgatcgcatttgcagctcgatcgtttctgggttctccagaaccggaaaggccggagcagggctgcatttctacgacaaggtgaagcgtcagttcagtggatttgatccaggccttgtgacattgacatcagtcgtccatgctcttgggttggaggggagaactggtgagatggcagagcttatgcgggagatggagtgtaaaggcatgaatgctgatgctgtgttttacggcagcatggttcatggatacatgagtcgtgggttcttgatggaaggtcttcgggagcatcgatccatgctagggaaggggatcacagctgatgtaattaactatactactgttattgatggactctgcagagaaggtagtgtggagaaagtaacaggtttcttggatgagatggtgcgagtggatgctaagccgaatttgattacttatacatcactggttggtggcttttgtaagagagacaggtgggaagatgctttctctatcgtgaggaaactggaacaaacaggcatggtggtggacgagtatgtatattcgattttgattgacagtttgtgcaaaatggacgatttagacagggctttctctttactcacagagatggagaataagggaataaaagctagcatcataacatacaacgcgataataaacggtttgtgtaaagctggtcactgtgaaaaggctgttgaaatttctgaaggtgttgctgctgataatttcacatatagcacactgttacatggttacattaacagaggtgacataactggtgttatggcaatgaaggataggctcgaaggtagtggtatttctatggatgttgtcacatgcaatgttcttatcaaagcattgtttatgattaacaaagtgaatgatgcctggagcttgtttcataaaatgcctgagattggcttaaggcctaatactatcacctaccatacaatcatagacaaattgtgtaaagctgagcaagttgacaaggcactggaattgtttgatgaatacaaaaaagatgcaggattctccagtgcagttgttcatgagtgcctgattagagcactgtgtaatggaggaaaagttaacatggccgaccaaatattttatgatcttgttcagaaaaaaataaggcctaatttctttaactgcaggaagttgattcatgcacacttcaaaggacacggtgaacatagtgtgctggatttcatttgtaaggttggtgaactagatattgacttattttcatctgtttgcaattatgcttctgcattcttaagcaagagaaattgttgtcaagcagcaatggatgcttacaagttactcagaatacaagccattgctgtaagtagtaaaacatgctgcaagctgctcaagagtttacaccgaaatggaaatgaagaggtcatacaaccattgctatgtgatttcattaaaatccatggcctgcttgatctgacaatgataaatatgctgtcctgttatctcagcgaaaaagatattagcaaaactatttggttttctaattacatggacaaaggtagtgttcctgtcagtgttctgagaggagctgtctttgctctaaagaagcaaggtgaagttctggacgcatgtaactttttgaaggtagctgaacaaagtgggttttcagtagatctaactatgtattccatagtggtggatggcctttgtaagggtgggtatcttgaaaaagcgctagacctttgtgaaggcatgaaaaaagagggatttcaacctaacattgtcattcataactcagttctcagtggtttgtgtcatcaaggatgccttactgaagctttcaggctctttgactacttagaaaacagcaagatgcttccaacaataatcacctatactattcttataggtgctttgtgtagagaaggtttattagatgatgcagatcagttattccaaaaaatgtccaccaaaggtatcaaacccactacccgtgtttacaacttgctgataagtggtcattgtaactttggattaactggaaaggcccttgagcttatgtctcatatggaggaactctttatacttccagattgttttacacttggtgcaattatcaatggactttgtctgaaaggtgagactgaagctgcattaagattctttaatgaataccgccataggaatatagatcctgattttgttggtttcatgagccttatcaaaggactctatgcaaaaggaaggatggaagaatccaggggcatcttgagggagatgtttcagtgcaaagaagtcacggagttaataaacagtgttggagataagattcaggcagagtcccttgttgatctcctatcttctgcatgtgatcaggggaggattgatgagattgtaacaatcctaaatgaagtgggactcatgcttttatcctcttcaaattctatcagctataatgcgcttgcgcatataaaaaaggtacagaaaactgaggatgcttatggttccatgtcaaattcaggacaagcaagtccagtcgcttatgatatttcaagcaatagtctttgtaggagttctgatggaaaagttcaatccatgatagatggagatgatagtttatcaaaatcgagtggtgacactgatattgactaccgaaatttgcttgggaagtctttcaatgatgattttgagtcatattatgctggtattgcttcactttgctcgaaaggggagcttcttaaggccaacaaggcagttgaagcaatgattcagaattgtggttaaatttggttactgctcaactttttagggaaacctttcctgctgcagtatcaagattgcaaacatattaactcgagtcgagagagcgtctgctggttgacccatggcactgacccatatagttctgaatatttgatggttcaatatggtttaaggttctgaaaggcctggaggttgaggatgcatcttgttagattcaaccactttataaccctcagctgatatcctttgtcttctaggcctctggtgtaaatgttgaactgtaggacatgagtaaaagagagccaatagaccagcgggttttgcaaatgcgttttctttaaatacatgaaagcagaagctgtcctatgatttccctcatatcagtgttcaagaatctgaaacaataccgacatatatgaggctgacacaaccagtatcaagctttatagtttgtcagagcatgtaatataaagaacataacagaggaagcagaattgaaccttgacaaagcagtcatggaaatgcagtctgaccaaagatgccgccatcctggtctccttggccacagcctgtgccacaatg

SEQ ID NO: 36631 - DNA, 2105 bp, Zea Mays
ctaggatgggcagcggacaggtggttctcgtcggccgggtgacgccgggaagctcgatccagaaggagctggtgaaggaggccaagctctgcgccgccatggtcgtggtgcttggcgccaataagaagtactccttcggagggtcgtcctgcctggccaagtactgcgccaagaagctgccgccgacaaccaccgtcgtcgccatccaggacggcaaggccgtcttcgtccgggaggcgcccaggccgccacttggagcagagccaaagccggtgctccgcacggtgctgcacccgagcgtggggctggagcccaaggtgatcatcccgaacccgaaccggcgcgcgcggtccatgtccatggacttggacgccccatgctgcggtcacggcgccgcggacgcgccggcaagcaggtgcttggacgacgccaccaaaggcgacggcggcgtggcacccgagcagaggctcgggtggccgctgctccgccgcgcgcacgccgccgccgccgcctcagctgcccctgtacagacgcccggcggcaagaatcatgagccgcggaagcagtcggtggtgcactgggtgatgagcctgccccggcggtccgcgccgtcggagtccgccgagccgcatgccggggcggggctcgagtcggagctcaaggcaatgcttggcggcagtggcgcgcggtgccggtggttccgctacgaggagctctacgactccaccaaccacttctccgcagagaacctgatcgggaacggagggaacagcagggtgtacaggggcagcctcgcctgcggccggcaggtggcgatcaagttgtgcaaggcgtcggcggaggcgtccaaggacttcctccgggaggtggacatcatcaccaagctgcagcaccaccggatcgtccccttgatcggcgtctgcgtggaaggccgcaacctcatctccgtttaccgctacctccccaggggcagcctcgaggacaatctacacggggaaaggtcaaagccggcgctgtcgtgggagaaccggtacaaggctgcgctggggatcgcggaggctctgagctacctgcactccggcagcccgcggccggtgatccacagggacgtcaagtcgtccaacatcctcctcgcagaagagttcgagcctcagctatccgatttcgggctggccatctgggcgccgacgaatccgacgtccgtgacgcacagcgacgtcgtcggcacattcgggtacctggcgccggagtacttcatgtacgggaaggtgaccgacagggtggacgtgtacgcgttgggcgtcgtcctgctggagctcctgtccggccggaagtccatcagcagcgacgggtcgtcacccaagggccaggagagtctcgtcatgtgggcaactccggtgcttagcagcggcaacatctgtgacctgctggacccgaggctggacgtgaagcacgacgaggtggaggtcaggcggatggcctctgccgcgtcgctctgcctccggaggtcggctcgactcaggccgccgatatcgcagatactgagcatactacgaggagaaagcgcggcgagcatcgccgaccagggcgcgacggagccggactgcgtggacgacgaggcgtaccccgccgcgaacgtgaggtcgcacctgggcctcgcgcttctcgacgtggaggactcggagtccatctccagcacggagcacagcagcggcctcagcccgttggaggagtacctgcgagaacgttggagccgatcgtccagcttcgactgatgattcatgcccgcgctgcgattttgtttgtgggcatgtgttttagtttttttttccctctccgccggtaattcacatgtttatcgtatggtttggttaccggggccgtgtgtacagtggacagtcaaaaatcaccagagcgagccacatcttcggcgacaaagacgcgattggttgagcttgacctgcctcgcacctgccggccaggcaagttgcgtacaagtgacaagtcgcatgtgttttgtggttctctgcccaagctgcatccgtcatacgatacaagagccgtagaataacagaaacggcacaagcgtccgtgctgcaccccgc

SEQ ID NO: 36632 - DNA, 1831 bp, Zea Mays
tcaactactttatagtagcccatatgtatcataatatgcactgtatgctactttccataccgttcactggacaaggctaagagaaatgaaataaaatgctggttagatatgtgtgtttcttgtatttgatgctaaattcttattttgtaaatagaaactgtattgtattttgtgctaggatcgtcaacaaggttgtatgagacatgatcacttgaaaactttgatctctattactccatccatccacaaaagggtgcaattttcacttttcgaggagccaaacagtttgaagttggaccataattataccaagaagtattaacctttatggtaagataagtagaatggcagacccagtgccggaggctcccacatgagtggtgtgtgggaaagggataaaccgaggcaagtctttccctacaaatacgaagagctttgagcccgtgacctgatgactctagtgagacaactctcaccgctgcaccaagcctgtccataaaattaattatgagatatattttcgtagtaaatctagttagggacataaatgttaatattattcactataaacttggtcaaactagtttgacttgcacaaatcccacagttgcatccttttgtcccattagctgcatccttttgtggatagagggagtacaactttgcaagcattccatctacgaattagaataacgttaacagtcagttgttttggtgtgtgattggtgattataaaagtaacaggacatgctgtcgtgcactcaaaatttggtttgttaacctcgtgattagggatgtaagctctgacaccatatagttgtgggccagttagctacttagctagctaacttctatcccgcatcccttcctttgatatttggatttgttcaatcgagtattgggttgatccaatgtcctaggaatgcaaaactcccatccctactcacgatctgaattttgatgatgtctgctatatatctatttaaatttattcacgaaaaatatgttgaaagtgctggcgtattgtttatggcctgaattttgtagagaatagttgttacaatgtaatatactggatacgtttgcagctatgaagctttcattctagttgaagacttgcatcgcggtaaaagatctgattcacaccagcatatgtttgtcacagcttcttttaagttttgtttcttcaaggatcaagattctcatgcatttctcaaaaagaaagaagaagaggaaagaaaaactggtatccaaccagtcaagaaaattgggaaagctgaatctccaaatctccaaagtttcgtgaagcagcagttctcgggtactcctccagatcagcagaaagttaacactctaggacctgaggataggcctaaggacacaactcatacagaagatgctacgacagacaatgagaggtatactgaaccaacgggaactggtgccactttcaagccagggacttggcagccaccaacatgaatgccaacatgaactttagaagatgaaggacggtgtaccggagcattttcctttcacctatctgtgtaacattttaacatttgctctgaaagaatcactagcctatgttccttctttcagatggttacccatctgatggagttatagccttaagttccttcttttagatgcttacccatctgatggagttataggtgatcgggggctcccacggtatgctgttttttttgtggctaaattgtcctctgtaatctttactgtgatagcaactgtaataaactggaccagtgttttgcatcagggctctcttagagacactgttcaacatattctagtatgtctgatgctg

SEQ ID NO: 36633 - DNA, 1823 bp, Zea Mays
attctgttttaactgaaatagtttgtcgatttttgcgtgggaacaacaaatacatgatggtaccccttccatccaaaaaatgcaaggcctctatttgacaaacagtcgaactcttagtagaggcggtccagaggtcgttagtggatagtcaagaagagattcacagttgatgtcgaacaaataaaggaatccaataaacttactgcaacattgagaagggaaaatcctacatcagctacatgtataatcgaattatttgtataaacaagataggtacaggcagagcaattcggtagagagaagggagggtgcatgcttgcagcctcattagattactcagttactattttaggctgtcttattgcgccttcatagttggaagtagtatagattttaatcttctctgtatgagcttaatatacttttatttagcttcttgcaagcttgaatttcctggtgctcaaatgccacctgccacttttgtagtctctgctcggaactgtgttttcttactctaattatacatatacgttcatatagagatggaatcaccacccctcacggttgaagcgaccgcttttaccgagaaaatgatggacatgactttggaggatataatcaagatgtgaaagaaaaagaatcctggaggcaagaaaccccctaggcggccggtaaactctaaggaacgaaccaatggtaacaattttcttcatttaatggtggattaaatgaaactatcttcggtctttggtacttgctcaacatctacaataagtaggtcagtggaacatatgtcctgtcaccgttagattgggcgatcgaaccatggtacatcagtcaccttctttaatgatttttttgttctacttactaatctgctgctttactcttccctggtgtttgtactgacctttttaggaaatcttgcagaactgatattcaatgtaaaatattcagtgtgatagaaaaaagaagattagtcgagtatgatctttatttcaatctgccaatgctcttggtaattccagtttgcctaatagtcaacttgtttttttgtaatgttcgagcattcgctgaaattactgatcgtattcaaaattgttgctaaattgacgattaacccttgtttccatggatagcgagaggtgtgacgtggtatgtttatagctattgtgcagtatacaccttgcttacaggttgccacaactccgccggttggatccactaaacttccaatgtgtcctgtttgcattggtgtgcttacagttttgtatttttgtttcttagggcccacgccaccatgatgtcacatttcaattcattttgtgacctctgatgaagagatttaaacacatctgttctatcctatccatagttttaacttcaaatattgttctatttaatgccacaacaacatatatctttactatgtcatattatatatgattttgttggcttacaacctctcgatagggcgcccgaatgggcgcctcatgttctagttatatttatgacgtatcttatataattttccctccgtaatccatgcagcgtgtcaatggatgtttgcaaagacaacagatgccaatgcagactggcttcttcctaacaacaaacctcaacaagccaagagagacgacaattggcgacgtaggaaaaaagacgcattaatcaataacgtgtggattcctggcagtggcgtagacaaggggctctaaggtttgtacaaacatataaatacatattaattactactattttttaaatagttaagtatataaaaacagtgactgattcaataaagatttgttatttcttttgtt

SEQ ID NO: 36634 - DNA, 774 bp, Zea Mays
tccaaacgtccacgaccactagaagccgccagccagcctgcctatttgcctaaacctaatccactagcagttcggcactgcggctgcggggatgcggcggccggcggcagcggcactacggagccctcagccagcaccaggttgcggcaacggcaacaaccagcaagtggccagcgattcacgggttcaggcgttcagcgccacgccgtcgtcgccccaagccagacctccagtcaggaaccaccgattgtgatttgtgaagaactgtgaattgattaactgaagatgtcaaatagtggaggcaagggatgtcgttcccgtgctagatcaatgccacccgagaagcaactaggtatttcaagtttcttgcctgaacctccaccgccgcctccttctacgaaaggtagtaccaacggtcagccctgcatggatgatgaggaacaagatgctgaaagtgatcccgacgtcatgaatgattatggtgagctttgaccgtgagtcagcgactagtcatggtgcttaatgcttgacaacatgtttggaactttagataaatatgttgctgtgtccatgtgcggatgtgcctgtttctgtgtgttgtgtgtaatgaaccttgaacttttttggaacattggggcaagaaaaggtgccagccgcatggagcacccttctgtgtggctgtgtgtaatgaaccttgagcactattctatgcgacaacaactttgtcattgtgtgttcttaaatatgtgtgcccgtgtgatgtgtgcatatctg

SEQ ID NO: 36635 - DNA, 1966 bp, Zea Mays
aaaagcggcgctgccagtgtgtatattacacggcgcggaggacggggacgcggaggactcgcccggcccatcccgcaccccctacctccgaggctgcgatccgctcttgtaggctccctcgccaatccgctcctcctccctccctccaactgcggcgtcggagaagagatggcgtcggaggccaaggacgtgggcatcctcgccatggacatctacttcccgcccagctgcgtgctccaggaagagttggaaacacatgatggtgtgagcaaagggaagtacaccattgggcttgggcaggaaaatatggcattttgcactgaagttgaggatgttatttcgatgagcttgacagttgtgaagtccctcctgaaaaattataacattgacccaaagtgcattggacgtttggaagttggcagtgaaacagtaatagacaagagcaagtctataaagacatggctgatgcagatatttgaggaatctggcaatactgatattgaaggagtggactcctcaaatgcgtgctatggtggaacagctgcattgtttaattgtgttaactgggttgaaagcaactcatgggatgggcgttatggacttgttgtttgcacagacagtgcggtttatgctgaaggtccggctcgtcctactggtggtgcagctgctattgcaatgctgattggaccaaatgctcctatttcttttgaaagcaaatataggggatctcatatggcccatgtatacgacttttacaagcctgatctcgcgagtgaatatccggtggttgatgggaagctatcacagacatgctacctcatggcattggactcctgctacaatgtattttgtaaaaagtacgaaaagcatgagggaaagcagttttcaatttttgatgcagattatgttgtgttccattctccatacaacaagcttgtacagaaaagctttgctcgtttgtactacaatgatttcttgagaaactgcagcacggttgatgaagagtcgagggaaaagttggcaccgtatgcaggcttgtcatctgaagaaagctaccagagtcgcgaccttgaaaaggcatctcagcaagttgcaaagaacctgtacgagtccaaggttcagccaacaacattgatcccaaagcaagttgggaatatgtatacagcatcactctatgctgctcttgcatcggttatacataatagacatgaaactctggcaggccagaggattgttatgttttcgtatggcagtgggttgacatcaacaatgttctctttcaagattaatgaaggccatcaccctttcagcttgctaaacattgcaaacataatggatgtttccaagaaattgaaggcaagacatgtggtcccgccaaagaaatttatcgaggtactgaaactgatggagcaccggtatggggcgaaagatttcgtgaccagtcaagacacaagtttgctatctgtaggcacatattatctcacgcatgttgactccaagtaccgaaggttctatgacgtgaaaggtgacggtgtcaccactactgcaatgtccaacggccactgatctgtcttctgcccggagctgcaacaagtcaaataacagaggcaggtgttcctaagcattctgattcttcttagattatctattaggaagggacgctggagcttagattaatctctgccaagttgtaaggttgtaaagttagttagagctgcgtcattgctgtaatgcttgcttggtaaaagttctggcgctcttcagttcttcagtgcttgcaaaattcaaatcaagctcactactagttgtaagaattctgaataatctgcagaatcactggttacatccaagttacgctgttgaatgcatgatttcatgtttaacacgattaatgcatctggattcagctgtgttgttggagtactcgtgtcgtgtcttgtacctttttaaaaagaagtttcttaca

SEQ ID NO: 36636 - DNA, 3002 bp, Zea Mays
acacaactaaagtgccgatcgttcctgtcattgtcttgaattgcagaagcagcagactcagccgatcgatttacccatctgtgacttctctcgccctgaggtatatgtctgcgctgccgtatcatctgctggagcaaataaagggcacatgagttcttaattcagtgcggggtttcctcgcctccctccttccatgggagcttggaagctgctggatctctgcaagtgactatgagccagagttttgacatcaacgtacttcgtgaagaagcaaggagtcggtggttaaagccttctgaagtgtactatatcttgcagaatcacgagaggttcccgatcacccatgaggcaccaaagaagccgcccagtggttccctattcctttacaatcgtcgtgtcaatcgttatttccggagagatggtcacacatggcggcggaagaaggatggaagaactgttggagaggctcatgaacgactgaaggttggaaatgttgatgctttgagctgctattacgctcacggggagcaaaatccaagtttccagagacggtgtttctggatgctggaacctgcatacgaacacattgtgctggtacaatatagagaggttgatgtggttagaaattattcatcacaactgtcaaatggcctcccagaacctctttcatccttgggatatccaaatgccatctgtggaaaccaataccacagctcctcttctggcgctagcgagtgtagtgagtcccatcagagctattctaatttgagttctgtaactgaagtaagttcctattccggtaacaaagagtacaccaaaaatgatggcggtttactgagcataccggaggttggacacacttgtctgcaacaaaatcggactgataatggtaactcgaaaaataaatctgggcttaatattgctttaaagaagatagctgagcagttaagtttgggtgaagatgatgatgactatattttctcaaatcaagctcattctgtgggaggcgacaaccaagtaaaacatattcaacaagaaggaacacagaaaggtttaagtaggaatatagcgccatcatgggaagatgtactgcagtccagttcaggtttaccaatttcatccatataccagcaatcggatgtcgagtatcagaaaaattcagaataccatccaccagaacgcctggacagcagtgatttacgcatacaacttgctgctgctaaaaagtttcttttaggaccagaagccaccgttgactcaccatctttgaactctgtgctgagaaatagagcgaactgtgtaactgatactatttcagcttatgacagtagatttggaagctctctgaacccagattggcaaacaaaaacagcattaacatttcaaagcaattctcagggctctgaaataacggagttgtttgaccatggtcattttgaacactactccagagaagatacaacattttctttaggacagacaaacaagtttaatattcgtgagatctctccagaatgggcattttcatatgagatcaccaaggtcatcattactggagattttctatgtaatccatcgaatttgggttgggctgtgatgtttggtgatagtgaggtacctgctaaagtagtccagccaggtgttcttctctgccacacgccactgcactgcagtggaaatctcagaatctgcattacttcgggaaacagagaagtttgcagtgaattcaaagactttgagttccgctcaaaaccctcttctagtttcacagacatcgcaccatcttctagacatctgaaatccagtgaagagttactaattcttgcaaaatttgctagaatgcttttgtctgggaatggaaaccctgaagttccagatggtgatccccaatctggacagtgtccaaaacttaagatggatgaagggctctgggataggttgattgaagaactcaaagtagggtgtgaaagtccattaagctcggttgattggattttggaggaactgctgaaaagtaaattacaaaagtggttatctgtgaagctcagaggattcaatggaacggattctatatccaagcatgaccagggtattatacacttaatctctgccctaggctatgagtgggcattgtcttcagttctcagtgttggtgttggtctaaattttcgtgattcaaatggatggactgctcttcattgggctgcttattttggaagctgttcattcagaagaaatacaaaggttgcaaaggtcgcaacatttctcaacatgagaagaaatgcagttaaaatacaggctcatgtaagaggccatcaagtgagaaagaaatacagaacaattgtaagcactgtcagtgtgctagagaaagtaatacttaggtggcgccgtaaaggtcatggcctccgtggcttccgagctgagcagcaatcaatggtcgaagcaatagaggaagatgatgaggaggatgatgacttcgatgatgacgaagcagtcaagatctttcgccggcagaaggtcgatcaagctgtaaaggaggctgtgtcaagagtgttgtccatggtagactctacagaagcgaggatgcaataccggcgaatgcttgaggaatttcgccaggcaactaattggaaggatcaaatgaagtaacatcaatatttgacagtgatttagagttattacttattagggatcaacgacttcatgtaaggagcatttatgtctcgagatctgccagcacccatcaatgacataaattaagtatttagggaatgtgttccagttgctactaattggccgtctaattgtacagtgttagcgaaatcgaaagtagattatttctgccacgatgtattttcactttctgtatttaggtatattttgacaatggcagatcaattaagtatattttttatgggttgttggcttcgccagtttggaaaaaatcagtttctcaacaatggcagaacttcataatgctgttaaaaaaaagacagcatgag

SEQ ID NO: 36637 - DNA, 876 bp, Zea Mays
atttgctggaagcatggccgacacctatgacctatccatgtagagcaccggcccagaaactcctactgctcttcttagctcgccgaaatgacgcacggcctcgccgtcggcttcggctccctccgctgcggtccctccgtgtcgtcgtcctctgccaccattcatcgcaccctggtcgctccccctcgtcgaagcttacggatatgctcctcgaccttccctcctccacccgcgcccgccatcgagggtcgtgacgtcagcctctcggtgaccacgcggcggggcagggtgttgccggtgcttaagggatgctccctccttgtcccgcccgggcagctctggatgctcctcggccccaacggctgcggcaagtccacgctgctcaaggttgtgatgcctacagtgggatctgatgtagcatttggtctcggtaagctcaaacttccgttagatgaggtcaggttaagggtatcaaaatctttggatgccgttgggatgttgagctactctcagaggccaatccaaactctgagtggtgggcagaaacagagagttgcaattgctggtgcgttagctgaagcatccaaagtattactgctggacgaactgaccacattcttagatgaacatgaccagataggcgtgataaatgcagtgagggactctgtggctgccgatggggaggtcgccgcattatgggtgactcatcggttggaagagctgaaatatgcagatggtgccatctatatggaagatggccagataatcattcaaggcgacgtctctaccatatcaaaatttataaagaaaaaacaggcatatatgaatacggcctggcctgggaaaagcttggtccctgctgcctatactagattg

SEQ ID NO: 36638 - DNA, 1021 bp, Zea Mays
aattctgctttcgcgctggtacggtgagacagcagagaaatcaagtgacgggtgaaaagattgttgccatcagtcagggatgaacagcaaggagatgtgccaagaaccgtgcgacgagctgtccgagatcagcagccaggaggcgtccaactcctccggcctggtaagcctcgacctcacgctcaccgtcgccgccgccgccgccgccgagtcgagcactaccgacaacagtaacagcggcggcacgccggccgacgcggcggcggtcgcccgcgagccgtcgcgcgtgttcacgtgcaactactgccagcgcaagttcttcagctcgcaggcgctgggcgggcaccagaacgcgcaccggcgggagcgcacgctggcccggcgcacgctgcggctcgacgcggcgggcccctacggctactacgccgacgtggcgtccctgccgctgtacggctccggcctgtaccccatcggcatccaggcgcacgcatcgatggcagcgcacccggagcagcagcagcggcacgaggacgccgccgagctgaggcccgcgcgggggctgctgagccccatgccattcctcgtggccgacgaggcggagatgagcttcggctggcccgggagcttcagaccagccaccgccgtcgctcctgcgccggcggggagcgccgtcctgaactcggctggcggcgtcgccgtgcatgcccgggaggagcccgatctgacgctcaggctgtgaagtgtgtgtgaactgatccgtcgactagactggttaatccgtcaggctttcattctctttaaattgatgatcggcccatggctgatgcagatcagaccgtggcggtctcttgcttgaccagattcttcctattgtttcgtgtgcgtgcaagaatttttgtacagcagttggatgtgcaagagctcgagatatctctctttattcaatgatcttggtatgctatcgcatgttcgtacgcgttccagctgtgaaacacaatgcgccatggctgtgaaacacaac

SEQ ID NO: 36639 - DNA, 399 bp, Zea Mays
gttggcatgagcccggtctggtcttaagaaccccagtggcgagttgacatatgcaagggttaagtgctacatatgtcgtgtgatcggagatccccagctgggtattaatcaatttggatcgctgttacttctcggatataaagacttggtcactgacttacacatagcaatgcagtgaactgatggtatgataaaaagacggctagtataggccaagtgcttgaactagggtagaaagaactctggatgcaggtaacttcacttaacttgacaagtaaaaatggatttttaagaatccattattagtaagcatttctgcaaacagagtctttgattcttgataagccataccttgattcccaacagctagcatatccttgagagtctttttccttagtc

SEQ ID NO: 36640 - DNA, 1824 bp, Zea Mays
aagggccgctaaaaaccgaagcaacagttgagcgaaagcgaggagacggcgaggtgagttctggagacttggagaggcattccgcatcggtatcccgtatccagcaaaggcggcaagccatggaggagggtctggtatcagtggacaagttctccggtggcagccaggcgtactttctgacgcacctccaccaggaccacacccgtggcctcggcgcggtgggcgggtggcgccacggcccgctctactgctctccgaccacggcgcgcctcctccccatccgcttcccgggaatcgacgcctccctcctccgcccgctagccccaggatcgctcatgtacctcttccgcggagacctcgggtgcatgctgtacacgggggacttccggtgggagctcggatgcgatgaagcgcggcgagcgaagcaggatttactggacgcgcttgacggggataccattgatgtgctctatctggacaacacctactgccacccatcgctcaacttccctccacgccccgtcgtcgctgagcaggtgattgatattattcggtcacatcctgatcacgaagttatcattggtgttgacactcttggaaaagaagacctcttgcttcatatatctagagcactacaaacgaaggttagacttattttctcaacatattccattttctacttttgagtcttggcaaaagattgagtgatgatgactaatttcttttaagagacaactaaagtagccatggctgatgctctatgtttcaacattaacttgttttttcagattagtatatgcaggctataactaagttgagctgcaaacaattgacatgctaactgctaatttaactgattcccaaaaatcacatgtccagcttcgtaactccagaatcttttccttcaattttctcatcagatctgggtttggccccagcgcctacagacaatacacctcctagggattgatgaaaaccgtgatatttttaccacacagaccagtttgactaggatccgtgctgttccaagtgaaggaaaggccaaatccaagggtaggtcatcagtgaagtctatcaggagctcagggagagagctggaggattttatgcatacagtgcgtccatggacagtcagcggcatcgtcagctcatcgttctgctatgtgaatccccgtcaccacttcagacatctttgtttagacaataatgttaatgatgaaactgacatgacgcccataaaaaataagggcagggataatgataagctgacaccaaagagatggcgaaatggttctgtgactccaaaagaaaggaaggtcaggatctccagttcaagtctgtatagaagcaaagttacaatgaaacggaaggagtgctgcggtgcaaggatcaatgacactgaagaacacattggtgttacctgactttgtcccttcccaagtaatgttatgttttcttttgtaaagattaacaactggatggtggaagtcttgaagcaatgagatgggatatgttgttccaagccaaacttcagcttgctggtattcaggaatctggacgtggtctttggctctctgctatctgttccttagaaccctgtcgtgctagcaagatgcattttggtccagattcggtttgggttgtacagtgctgttccttttgcgatggtgttcagcatttagattgctgaaacctttgatgcatgttagttgctactgatacatctatttgtagtattttcatatgtctgacatgatgtcgctactgcttcaaatatatataatgttcttacaacaatgcactatttggtccattgtttgtccc

SEQ ID NO: 36641 - DNA, 3114 bp, Zea Mays
ccttccttctctcctcctccctgagggctgaggatatccttcaatacatccacctcacgaggaatccgcactcgcgtttgctccgcaatttattgctcagggttcttgctgggtggtggtggcggcgggtggtgcaagcagtactcgttcacaagagcaagctgtttttgtgtgcgtggttttatgcctgcttgcttggcgaggggaagaggaggcggcggagtactgggagttgaagggtgcaggtaccggcattgctgaggcggcgtggggagatccggcgatgtcggaggccgaccggatacgccaccgcacggcggcactggtgctgcacgacgatgaggtaagagacaaaccggacgccaaggcgaacgtcttcgcggatctcggctcgccggtgtcgccgctgcgggcgcgggcgagcgtggcgacgtcctcgtcctcgtcctccgggtcggccaagtcgccggcgccgtcgaatgctgggatggcgggcgggaggagccactccggcgagctggtgggcgagtgcaatccgccgcggctgatggcgcacaggcggtccggatctggacagttaatattctctggcggcagcagccgggggagcggcggcggcggcggggaccgtgggagcacggcgagctcgccgatactgaatgcgctcccctccgggaacatctgcccttccggccgtgtcccggcaacggccgctccccctccgccgcgctcccgcccggacgtgctcggatccggcaccggccactatggccacggaagcatcatgcgcggcgccggcatggcccccgccaggagcagcattgactcctcttcgttcctcggacactcctcgaggtcgccggcaagctttccggcaagcagtgggagcctccaggaggtgacccgcttggggaacgagtggtacaaaaagggtaagtacggggaggcactgcggcactacgagcgcgccgtggcgctgtgtcccgagagcgccgcatgccgcggcaaccgcgcggccgcgctcataggactcggtcgccttgccgacgcgcttcgtgaatgcgaggaggctgtccgactcgacccggccagcggccgcggccacagccgcgtcgcaggcatttgcctccgattggggatgattgacaaggcgcggaggcacttcacccaggcgggtcatcttcagcagtcagaccccaccgactggcagaagctgcaggaggtggaggtgcatctgggaagatgcacagatgcaaggaaaattggggattggaagagcacgctgagggaggctgatgctgccattgctgctgcttcttgccttgaggtcagaagcacttctccaccttcacaagctggaggaggctgagtcgactcttgcgagctttctgaaattggacagtgcattgccctcatcattgacagcagcagaactctcgggcatgcttgctgagtcatacgtacatattgttcgagcgcagattgacatggcattggggaggtttgatgctgctgttgctgcagctgagaaggctagagatcttgatcccgggaatgcagaaatcgggatggttttgaataacgtgagactagttgcaaaagccagagagcaaggaaatgatctcttcaaagctgccaagttttcagatgcatccatggcttatggtgaagggctcaagtatgatccctcaaattcagtgctccactgcaatcgagctgcttgttggtcaaagctagaaaagtgggaaaaggctgttgatgactgcaatgaggcactaagaatacaaccaagctatacaaaagctctcttaaggcgagctgcatcatatgctaagcttgagcgttgggtggattgtgtgcgggactatgaggcgcttcggaaggagcttcccagtgacaaggaggttgctgaggcattgttccatgctcaaatttccttgaaggcgactcgtggtgaggatgtatcaaatatgaagtttggaggagaggtagagatagtttccagtgtagagcaactccgtgctgccataagttcacctggggtatctgttgtctacttcatgtcggcaatgaatcagcagtgcacacaaattacaccttcagtcaacactctatgcactgaatgcccctcggtgaattttctcaaggttaacatcgacagcagcccaatggtggcaaaggcagagaacgtgcggatagtcccgacgttcaagatatacaaaggaggggtgaaggtgaaggagatgatctgcccgagcttgcatgttctgcgctactccgtgcggcactattctgtatccagttcttgagaagctttaggtaccggtaccccaatttcccatttttcactaatgcatagagctccccgtcaaacttgcaaacaccactagcagcctccagaacattttcaccaccagcataactactcccctcccctattgagcatgagcataacgggctaagactgtctggtggaagagccccccctcaattccccacctctcctgtcaatttcgccttttcaccgttcatataccaacccattcaattcaatatctttgttcatgttccgggctctctccacctcaatttgtactttgaatactccatttggattcacctcatcatagtccataggccagtaccctgcttctcaaggaaaagggaaatgtttgtaatgtcgtgtagggtttagcggtagcgtctatccattaggggagggggacggcgggagcctggggggttgtagtttttcgttacatgtacataccttataggaaaaaaacatgagataaatccattggaagatttgttccctggagaaaagagaaatggtggcatcggattgagatgagattttggcggttggggtcaggtaacagagctactagctgttttgagttcctattagtctttatctacctatatctatctttagagggagagagagagagagaggtgttaagttaactgatgatgcagacatggtttggtgtccattgaagacgatgatgtcatgtccttttgctgcttctgttggttttatggcgctgatgataccatatatatgctaccatttccatgaataaaaaaaaaacattgcaacattcgttc

SEQ ID NO: 36642 - DNA, 852 bp, Zea Mays
tttgggcacgtcatctcctctatccccacgcgtctcctgctctatgtttccaaagccaagcgctctttctccatgccgctcagcctcctctctgtttcagtcgtggagcatcagcaatccacatcatctccgttggccgagcggttccctcgcggcgcccaggatccttcccagacgcgctcggctccctggtctgtctgtcaccttgccgacgcctcctctgctcctccacctgtagctcgcccctatctcctcctctccccatggcggctccccctggatccctccctgcgcgaaccctctcctgcagcacgccagtgccgaccacaatctcccatggcgcaggagctccccattctcctcttgctagggcgccgtcgctgggctcgcccagtctctcgctttctctgctccagcagcaaccgtctcaaggtattccagttcgtgagcagcagcaatcgatatagctcctccgcaccgtggcgcagccagccgtcgatgccatgtccctgcaacctcgtgtcgtcgtcgtgcccgccttggtggagaagaaggttcagttcaacactccctaagtgttcgatgatatgctccggtggccatcgtcgttcttgcaaaaaaatcaagtcggatcatgatgtggtgaggtacgttaattgatcacggagtgggagaacaagagctgagttgatctcaagggatactgatgaatgaacttgaagatttgcgtgatcgaatcaagcgccaggataagagatgctccccaagcggacgtcatctaacaacactgacttagtgttatctcaggttgtaattttgtaattttgttctgttgtggatgatgctaagtgc

SEQ ID NO: 36643 - DNA, 2387 bp, Zea Mays
ttcttttccccctcccctgttaaacacgcgcagcgaagcaacgcagcagcaacaaaccttttcgctcgcagctgccaccacctcgtcgtctcgcctccccctcggcctccgcacgcgcgcgcgggatctcgccctcgcccgcctcgccgctcgcgcgcgcgcaccgaggaagggcgcacccacccgcaggcttcctggcgggccgatacggcggcgatggcgagccgggtcaaggaggacgagaggcacgagaagatccttcgcggcctgctcaagctgcccgccaacaagcgctgcatcaactgtaacaatttgggaccacaatatgcctgcacaaatttctggaccttcgtttgtaccaattgcagtggagcacatcgggagttcacgcatcgagtaaaatcggtttccatggccaaatttactgcacaagaagttactgcccttcaagaaggggggaatgaggtaacatgtatctgtttttttttctacttttcccatcaatcccatgtcttctattcaacacggcattgattttgaaggagaatagaattggtgtaattgaatggatgtattgcaatattgcattgagcccttagtcagtttatgtagagtacaagacttgggagacaaggaacacatggatacatgtggcggtctacgatacacaatatctaaactaccaaatatactctaacaaccctccgcagtcgtagcgggaacatcgcagacgattggactggagaagaggagccaaaggctaacattctcctgaagtcgtagtgacattgcaatgcaaatgttgcaactagagtagaaaccaacaaggagcttatgtggttgtgccaatgcgaggtagccgagcataaggcacaattgatgtggttgaaggagtcgtgctgaagatagcgaggccgacatagttgtggtgaggttgctgtgttggtgtagttgcaagcgcataagaggtgtcaaggagatgatgaagacatgtctgggtagtcgtcgtggaaggaggctatactgaggttcatacagtcagggctgccaaagacgaaggtgaaaggagacgatgcaatcgaggcagatggggtgggaacatgagagttgatgccgatgtagatgcagtcaagttgcctgaaccgaggcttgggctggatttgccagactcagcaacgcgccagacacgaaagcaagtgtcgttgttgccaataccggacgtacaaggtagagggaccatcatagaagtagtagcgttgattgttgtagaacagtagggtagaaggtatggatgcagcacacagttaacggaatagacgaagtggtggggacaagacgaagatgctggtgatgttgtgttggacggagaagcagtgagggagtggatgcgttgaacccgaaggcaagcagtccgggctggcgatggatgggcagcggtgctttcgcgcacaaggcctcacgctcacatgtagtgctctaagtcgacgacaaaggcgatcaataggacaaaggccttgtgcagacggatggtgcaacagattgtgcagcacagtcatcgatgcacatgggatgatgatgtatatgcaaccaccaagcagaccttgatgatggtgtggctcgacgaggcgacacagcagcagccctgttgctcgaagaagacgtgcatagtaccctgcgatggacgtcacgggagccaggtggaccacacaatcaattgtagggagttgggaccaagtacgcgcgagatggagcgacgacggaagaggtcagcagaggtgtcttgaatcctgatctatgctggtgatgacaaactgacaatatagacatgcagacgggatggttgagaagcgacgtgggaatgcatccccacaacatcgcacgcttggccaagccgcacagtcgaagatgtagatgccggtgttggagtagcacgtgaggttggcaagcaacgggtgacttagtcccgattagtgatcatgcaaaccaaaaagggtgcaacagcagcagtgggatcttccctgtgcaactcaacgggtgcacctacaacttgatcgcagactaaacagtgacaacgagtgtccaacgcccggcatgaagaggtgggcgcctaaacagtggcgttgcccctggtggagataaatctctccccgggggtgcgtggtgcagaatctatcgctggctagggttagatctaaaccgaacccgggcaattgataccatggaggaaaataaaattgttgtaattggatggatgcattgcattgagtccttaggtggtttatatagagtacaggactaggaaacaaggcaacccatggatacatatgatagtctacgatacacaatatctaaactaccaaatataacagattttacttgacttgtag

SEQ ID NO: 36644 - DNA, 769 bp, Zea Mays
ctttccctggccgcgttggcttcctgggtgtatctctatctcacgcgtgcactttcttcctgctccagctccgcagtgctctagctcgtcccccatggcaactgcacccctcaagctcgtcgcgcgcccctgctcacgtcccccagccagcaggtgcagactctccacttcctctgctccatagcgccatcctccatccccagccgcgccgctcgacctctgcttttccctggcacccgctcggatctcgcctggctcccttctctctctgcttcagtgggtgacggcaccgaccgctcctctccctctgctatggccgttgcgcccttcttccctatccttccatggccaccgcgctctttcctgcaagcagccgagtcccactctgcccagccatggtatccgattcctcccctccactgtctccctcctcaagcgcgcgctccctgctcctccatggccgcgccgtcttcccaacagcgccccctctctgctcggccatggccattgcgtcgagttccctgcgcgcgctcggcccccagctcaatctccctcggccgtgctcactccgaccgcgggcgccatcgctgagctcgtccctgctatggtgttggctgccgcagcacctgctcccatctccaagatgcctcgtcatccctgttctccctcacatcgtgagcttgcctctgcgtgtttgtatggcgccacaacggtctcataccaacaaccactgccgatgtccgtggttaggataacaggtgaggaagca

SEQ ID NO: 36645 - DNA, 2069 bp, Zea Mays
gcaccaaaggcacataacacatgcatgcataagccatcggtgcaactgtgctacaaaatggaaatatagaataggtgtttgtgttggtggtgctgcctaagctccaaggtcctgaaattatgaaggcaaaaattgtactgttggttattattatttgtcaatatgtgcctcgactgctccgaataataccactttaccttcaaatcacaagatctgctggcatacttacagagacagcatgggctggtgctgctttcaaccttataatttatatgcttgccagtcatggctttggagctctttggtacattctttccatccagcgagaagacacctgttggagacaagcatgtatcaatcagactggctgtgatcctacatctttgtactgcgggtatcattcacttgcaaataattctttcttacaaaatgcgtgcccaacaaatagcactgccaatccagaccctatatttggaatctttctaccagctctccaaaatgtttcacaatcgacgagtttctttgaaaaactattctattgcttttggtgggggctacaaaatctaagttcccttggccagaacatgaaaacaagcactaatacattggagaatctgtttgctgtttttgtctcgacatcgggtttggttctatttgcactacttattgacctatttacagtcagcttctgtgcgtatcgaagaaatgagagtgaaaaggcgtgatacagagcagtggatggcacataggctactccctgagaatctaaaggatcggattatgcgccacgaacaatataggtggcaagaaacaagaggggttgacgaagagggccttcttaaaaatcttccaaaggatcttagaagagagataaagagacatctttgtttgtcacttctcatgaaggttccaatgtttgaaaacatggatgaacagctgttggatgccatgtgtgatcgtctaaagcctatgctgtacacagaaggaagctgcatcattcgcgaaggtgatccagtgaatgaaatgctcttcatcatgagaggaacactagagagtaccacaacaaatggtgggcaaactggtttcttcaactctaatgttctaaaaggtggagacttctgtggtgaagagctcctcacgtgggcccttgaccccacttcagcttcaaatcttcctggctcaactaggacagtgaagacgttgtctgaagtcgaagcttttgctctgagggctgacgacttgaagtttgttgccacacaatttaggaggctccacagcaaacaacttcagcataccttccggttttactcacagcaatggaggacctgggctgcttgcttcatacaggcagcttggcacagatactgtaggaagaagctggaagaggctttatatgagaaggagaagaggttacaagcagcaattgtaagtgatggcactacttcgctcagtctcggtgcagcgctctatgcttcacgttttgctggcaacatgatgcggatcttacggagaaatgccaccagaaaggcccgtttgcaggaaagagtacctgcaagactgttgcaaaagccagcagaacccaacttcttcgctgaagatagctgaacttgtaccctgtagcaagcagggattcatggtccaaccggtgaagtttgtgcagaagttaagattggatgctgtagatagacagatcaggtgctctaaagccgtctggtttaaatcacctaattcgcgaaaaggcctggtccgagttagattctccgttgaaataaatttgaagctgacgttaaaaaaaaaatccgcttttgctccacgttaaattctggcttccatagtggtcggactagggtgctgagataagggtattgagattttttagatctgtgtgaaaagattttctgtaacgtaatatctgaaggctgtcttatcctctgtaggttattttaaaaaaaacacgtatatttcgattgtatacaggtttcatgtattataaacactctaatttaccttgtgcatttgaaaaaagagagaagatgctgtgaatataatcgattaattgtttgttcatt

SEQ ID NO: 36646 - DNA, 2650 bp, Zea Mays
tacctactcactaaaagtacctgatcattgcaacttatatttatatattttggatgacgaacaacttagaaatgatatcaaggttatatataatatcatatcttgtgtttgttcccgtaaaaaataaccaccaatatctttactactctataagcctttattgtaggcctccacacccgtgcgccggttctgcctctcgatgcccgtctgcccgcgcgccccactccctcttccctggcgcgagatggatccgccgcgaatcgcccacaaatcatggcagtacttctctggttcacgcatctgtcggtccacaaatcacgcatccgtcatggcagcgacagacagacaagatttaacttgcatccatggcagccgccgcgcatctgtcggtccacaaatcacgcatccgtcggtcccaaatcacgcgccagggaaggtgctttccaaatcatgcgccagagaaggcgccttcccaaaacacacatccatggcagccgtcgcgcccgcgccagggaaggtgcttcccaaatcacgcgtcagggaaggtccttcccagatcacgcattcatggcagccgcgcccgtaaaccgcgcctcccccacgacgctcttccatccacagcgtcgcccccttccatccatggcagtcgcgctccctctgcgagcctatacgtgcggggatgttgggaggcgctaccaccaatcgagcggcattagccccgacctgaagcacacatggccggaatccagaggatatcgtgcccccgcccccatccggagtctgccccgcatcgtgcgatgctcgttgctgagctcccgatgaccgcccgatggtgtcgaaccccgcaccgtcgtcggcaccgcgctactcggcgtactcgctaccgtcgacccacctccccggagaggacatcctcttctgcatcgacgccgacctcgaggtccacgccaagatgaagtccgctgccgtagcatcctcgggatccacgtccactgcgtcgccgcagtccgtaggagctgatggtgccccggcggtggggacccggactgtggtcgcccgagaaccacccacgttgagactgacgcatcccaagccagataaggatggataccctcacatcttcgattatttcgccgtccaaacacatgatttcctggttcccctttggcttcctccagatcttgccttcgcccgcatcgaccatcgcgccgctgccgtgacctaccatggagctctgcctcgccgcgcgcgccgggacgatggcggccgcgtgccggaggatggcaccgacgataggcgtgccgaagaagaggcacgacggtggcactgtgcgcgtacgttgcgtggtgacgacgcccatgggggagaagacggagtaccgggacggcccgctggagcgtgcgttcatggggctgttcgcgcgaagatggagaagtacgcggcgaagaagtcggcggcgcaggcgaaggagaagagggcggtgtgggagtgggactacgagagcttcgtggacgtgtcgtggcggttccggcggctgttcccgccgacgcggtgggcctgcgagttcaacacggcgctgaccgtgcccttcttccgatggctcgtgggcccctcggaggtggaggtcggcggcctccggcagcgcagcgaggtgcgcatcgagaagtgccggtacctggagagcagcggctgcgtggggatgtgcgtcaacatgtgcaaggtccccacacaggacttcttcaccaacgagttcgggctccccctcaccatggacccaaagcggttgtgtcgtccgagcattgatctgaaccagcacagtttatcagggacgtagcagtgagttggttatagagaactcagatttgatggctaaacataaaagcgacttagaaggattcaagttatatgtatactaaagtggtgaggactcgcaagaagttcaatccactgccagaaggttagatttgagtctcaattattttcaagggaagagatcatgctgataattcactccatgggtacgaggttttcaaaaatccgagcattagtgatgtcctgtgcacaacaacagcagaggctcttgcaatggggaaattcgtgatttgcgcagaacatccatcaaatgagttttttcatgtcatttccgaactgtttgacatacaagacttcagaggagtttgttgcgagagtgaaagaggcaatggatagagaaccctaaccgctaacccctgagcaaagatacaacctttcgtggaggcagcgactgagagattcatggagtactcagaccttgacaaggttctgaacaatgaggctgctcagcctaaacaaggctggcaaccgaagccattcctggtacccgggactactataagcagcactgtgtggatattagtctcttgcctccttaagtagcaccctgtatatggctggtgatatggctggtgatgactaatcgtaggtatatatgtacataatacaccatgtcgctcttatgtcgactaatgtttggagtattgtaattgtagcacgcatgacgacctttggccattgttttgtactctgtaataaggttctttctccttaaatttggagttttattgcagaaatttgtagtacatggatatcaaaagttcataactccagaaga

SEQ ID NO: 36647 - DNA, 1278 bp, Zea Mays
acctgcaagttgtcttactccttataggttgccatgtatcaagatcctcgggatgcctgctcagcaatcgctgctgagtcatacaaactatggcttgagcatgaaaacaggacagatgatataacaataatcattgtgcatattcgagacatggaaaatgcagtcaggtcctgcagggagtgacaaagcggactatggtagcatcggagcatcaatagctgggcagacaatacagtcagagatacctgtatttgtacaaccagaagcaagtaacatgaacagatctgctgctaccggaatgcgatcaccgtcttttggctctccaactgaacggagcctctcatgtgttgctccttctcctacggatcctttgttgatacatggcagagtatcagatgcttccaagcctgggcaaagtgagcagcgagctgcatcacaaccaccggtacaaacttggcatcaaatagacggggttactactgagctggagcggtctatgcagcaaagcatccttccaacctcctgctgaaagtagagaatgcgagttgaatgacaaaaagaggcctcgagataacccaccgccatcttggagctactaaccgtaccatggatgcgatgtttgccagcagcaaatctcgtgctgttgctcgtgttttggtagagcacctgctgctgccgacgatgcgaggttcctgatcctgtgtgggatcatctaaccatgggctgagtggaattgagttattctccgtttcatttgtactttgtttacttttcacaagatatagattaattctaagttgatgcctgtcgaggtatcagtatcatttgagacgcaactgtgcattgtcgtccttccacagaattaggatctggaattgaaatgcgagtgccgtacagaacagatcagctgggtggcttttcagatgcaaagaagaatattggatttagcctgtaagctgacctgagagctctgtcaaccctttaaaagtgtgctacgcatatacgataccgtcagcgagctctgccaagaaacaaaggggcctgtttggttcagcttttttctaaccagtttttctgaaaatctggttgtggggagaatctggctgtggggagaatctgagtatcattactattacgtgtgaagtaagataaatttgtttatagtgctcatgatctagaaagtgacgaattcctactattacaacgactctaccgattatgtgtttatgttgattttggatgattttttgtcccaacgaattttatagaagctggctg

SEQ ID NO: 36648 - DNA, 1651 bp, Zea Mays
ctttcatctcaaactcaaatgtggggctcggtcatcctgttgttccgcatacggacacggcatccgaggtcagatcccatcgtctggagtctggactctggacgcatcctttccccccacccccgactcgagtctagttccgttcgaaaaaattcaaatccccctccccccctgccaacgtctcgttctccccaagcggcctccgcagccagccattgagccatgtccctcttgtcgcggcacgcgcgtcaccccactacgccgccgcccgcctctttctccggcggcgttgagaccccacctcgtcgccgcgtccccaaagagaacgttgacccctcctccccggcgcgcaaccaccactctgccctcgaccacggcgcctcccccttccgctccccgtcctccgcggccaagccgctctccgcccgcaaccgcttgccaccgcgtccgccgtcctctaatccactaaagaggaagctcgaagtctcccctgcagcggccgcggtgggctccgcgcacgatgccgcacccgggctcgactccggcgtccaggtggtggtgaggatacggccgtcgtgctgggtcgatgaagaggaggcaggcgaggatgggaggggaccggaggcctgcgtgcgcaagacggcggccaactcggttgcgatccaggggcaggacttcacgtttgatgctgtcgctgactcggtctccacgcaggaggatatcttcacccttgttgggctgccacttgttgaaaattgcttatcaggtttcaacagctccatatttgcctatggacagactggcagtgggaaaacctacactatgtgggggcctctatctgcattgtcagaagattcattgagcagcgagaggggcttaacacctcgtgtatttgagcagttgttctcccgcattaacgaagaacaagttaaacatgctgacaaagagcttacttacaattgtatctgctcgtttctcgagatctacaatgaacagataactgatttgctagatccctcgcagaagaatcttcaggttagagaggatgtcagaactgcctgtgtttatgttgaatcattgacaaaggagttggttttcaccttgaaggatgtaactcagttgttggttaagggcctggcaaaccggaggactggggcaacgagcgcaaatgctgatagctcacgctcgcattgtgtttttacgtgtgtcattaagatggattctaagaatccagaggatggctcaagcatcacaagatcaagtaggataaacttggtagaccttgctggatcagagcgacaaaaactaacacatgcagctggggatcgactgaaagaagctggaaacataaaccgttcactttcacagctcggaaacttgattaatatacttgcagaaatatcgcagtctggaaaacaaaggcaccatgttccatatcgtgattccaagcttacatttctattacaagaatcccttggaggcaatgccaaactggcaatgatttgtgctgtttcaccgtcccaaagctgtaagagtgaaacgttaagcacacttaggtttgctcaacgtgcgaaagctataaaaaacaatgccgtagttaatgaagagaaaattgaagatgtaaatgcgttgcgtgagcaaatcaggcaaa

SEQ ID NO: 36649 - DNA, 1253 bp, Zea Mays
gaaacctgtgagggtcagtactataaatatccgatctcgtcggaaccctacccttttgagaactccccttctccgccactaccgaagcccttgtacccctcaccgccgccgctgctgctagggagcttccatccgcgcgcgcctacaacgagagctagcagcggtagcggccgttatcttgtcgctccggctccgttcgtgtacccaagtcccagcctagatgccgcagatggaggggtccactgatcagatcgccgccggctggttcgctaaggagccggcttccgagcggcccgtgggcttgccgaggaccggctcttccagtcgcctcaacgcgcaggcgccggagttcgtgccgcgggggccgccgccaccggcgccggcggttgtgctgccgcctccgccgcaggtgatccgcatgttcgccgcgcctcccccgccgccgcgtgggggcttcttctccgcgccgcagccccggccgttcgagtactatgcgcctatcggtgaacgcagcggatttgctgccaaggagcaacaggcgccggagctggaagcggagatgctcccgcccgccgcggtgaagacggagccggtggtggatgggctcgacgacgaggtggtgcacaagatcaccaagcaggtggaatactattttagtgacatcaaccttgctactacagaacatctgatgagattcattaccaaggattctgagggatttgtgccaatatcggtaattgctggctttaagaaagtaaaaacttctgtgcgcaataatgtgatgcttgctgcggctctccgaacctcatcaaaacttgttgtaagcgatgacggtaagagagtcaaaaggcagcagccatttacagaatctgatttgcaggagctccagtcccggattgttgtagcagaaaatcttcctggtgatccctcctaccagaatcttaagaagatattttcagctgttggaagtttgatttcaatccgaacttgctatcctcagactccaaatggcactggtcctgcaactaatagatcttccaagttagatatgctttttgctaacaagctgcatgctttcgtggagtacgaaactcctgaggatgctgcgaaggctattttggagctcaatgatgagaaaaactggagaaatgggcttagagttcggttgctgaatacttgcacggtgctgtttggttcacccagtggagcggggcgctgcctatgtattcttcatcttttaatttaatggggca

SEQ ID NO: 36650 - DNA, 282 bp, Zea Mays
caggctacttactagtggtgagtacggcgttgaggctgcccatggagctagacggaacggcggcagatcgtgagctccagcgagcaattctcgatgctcccggaatgagaacgagcccgggtgatctttgcgctggcttcaagggaccccagggatgaacccggacacacaatggagaacaagtcaccggtgagcgacgaacggcgcacgacgggccaagtttccttaccgcggcggtaatccttccttcctcctcggcgacgatcctctggttcccttgcc

SEQ ID NO: 36651 - DNA, 1376 bp, Zea Mays
ggcaaagggcgttatacattgtgctaggggtattgtagaactcactggctctaaaggagaaagattttaagttgaaattatagtaactgcctctaccagatgtggcagaacctcccaagttattgggcccacatgcacctgtccttgtctcaaagacctcagacggctatgcatgtgcactaggtaacttaacaggatctgtccaagtgccccaaggacctcggataaaccacttacaaccagaaccgcgggattaagtaaacacaaatcacacaccaacaaattttgcagcggaaatcttattaccaaattttacatgttacatcaagttttatgtacatgatcggagtgattacaaaagtgattcaaagaaattactttgaattgttataaattgtttataagtttgaaatatatgctagcttaagtgaccatcctcaataagaagtttagaagagttacttagacttataagaaggccgtgcccaccagcgcttaacaccaatcacaatcaagtgactcgtaacctgcaacaacaatgggtaaaaccctaagtacgcaagtactcaacaagacttacccgactaaagaaaagactctcaaggatatgctggatttgagagtcaaggaaaggcttttagcaagaatcaacattaatagtttgcagaaagcttactaaaatgagtccttactttcaacattttaatgctagattaagtattaatagacctcgtttgcatctagtctaatttcatcataacttcaatcaatacaacatgatttttgctcattatgattccatccatgacttaaattgcaagtcagtgaccaagtcttcatatccgagaagtaacggtgatcctaaatcgattaatacctagctggggatctccaatcacatgacatatgtagcacttaacccttgcatatgtcaactcgccaccggggttcttaagaccagatctggttcatgcccaccgagagcacagatacaccaccgtccagcctcttgccacggagggtacacgctactctcaccatctctccactcccattgcgtgttatcttattctggtattagtctgcccgaggcaaagcttacccatgatgaggcatgtgaccagttaaaaggtcctcggtcagcaggcctacattctctataatccttaatcaacctgggtagaacatcacttgttcctagcccaagtctcgatttaagtacttccacccttaggattgtttttgttccttaggatgaaaagagtattatagggaactttgtagtaagatcccaccactgctcccaatgaaaatattcttgcaggcagaagctaggcattaacgcaaaggacaacctctatccacaagatttacct

SEQ ID NO: 36652 - DNA, 1772 bp, Zea Mays
cccctcccaacggcgcccttcctccccgcacgctacgacggccgagacgaacgcgcggcttcctccccaccaacggcgccctttccaaaagcctcgacccgctgctctcgccgagatcccgcgcgtagcacgcgcggcttccttcccaggctggcgagatgcctccttctacgctcgcgcatgcactatgcccctgtcgttgtccacctcccacgcccacgcatgcacccatcccctcgtcacgcaaaccatagtctcctccgcccccgtgctcgccaccgcgtcgacttcggtggagtccagcgatagggcgagtgggagacgatgccgccctcggttcgcgatgccgcccactcccacacgtcgtcgcgcgaagccggcgctcacttcgggccagatctacctgcccgtgtggtgttgtgcgtacgaccacctcgtgaagatgctgcaacaggcgtacgcgcaggtcgaggagctctccgtcgagcgcgagcacctcgtcaatgagctctagcttctacagagccgcttccacaagcgcaagatctgccaggcctgcctccagaagatggatggatttgatcaaacagtgaatgtgaaggttgtaatggcaactaatagggcacatactctagattctactttgttgcggccaggtagacttgacaggaaagttgagttctctcttcctgattggcggtagaagaggcctgtgttccaagtatgtactactaagatgaatttgagtgacgaggctgatttggaagattatgtttgcagactggataagatcagtgatgctgatgttgagttggtttcatggcacagaccaaaaattttatgcatttgttgttttctaacaattgtattgctagggacttttgtcctgcgctggccaaagctgtcaaaactatgaaaaaggcagagaagctgctccttatatatagtaaagccattggtagaccaacagttggagaggaaggtgttctgatgagcatcatcttgttctgcatcatcactaatcaacttgttatgcacagtgtccgatgtgcctgtctcaactcgattgctaaggcatataattgacctaaaaaggcacttcaagcgggtaggaaaattcaaggtcgttctcaagtacttccaagtcggtacggtcgttgagcctgcatctgagttctactcaagtaggctgaaaaatagggaacgcaaggcaacattggttgacgagctgttatcagatcaatctctgaagagctacagagtcattcatgttggtgggcgtcttggatgaactacattttcttcaacaaagatggagctcatgcagattgatttagtccctttttgcaatgcagctacgtgcccacgtttggcgaggcgccatttccggccaccggccacgtcgccgcgcgcaggagagaagctaggcactacatgatgtcagccgaccaagatttttaaaaaaagatacgaaagcttgctacaaaataaaccggtccagtcacaagctagctagctagccagattaagtcgatgccgcactgcttgtatatgcattggattccatattgttctcttcagatggacatcaaatgttctgttcattaattaaggttaatcagtggcatcctatgtggaatcgtccctgcttacatgcatatatagtgcgtgcgtgcattatatgtatccattccacatgcatgcatctgtttcaccatctttaatttggatgcttatgcatgcatgcttctttactttgattattgtttttt

SEQ ID NO: 36653 - DNA, 2145 bp, Zea Mays
tgcaatcgagttgtgagtggttcctccctacctctcccgtcgcacctcgccctctcccttgccctgccccagatctcggccttcagtcctcgctgccgccgcgacttgctcgccccgtctccctccggccccgcctcatcgcggccgtggtggccaaggaacacgagctcattggaaaacactcttaaataaagcttccaatgaacaagacaggagctcgacttcgcctagctccgaacaagcggtcgacgaggcggaggtctcgcgtcctgcgtgcgtcgcgccgttgcctggctccgtcctcgccgttcctctgtagaagctggccgctgacccccgcccgcctccgcttggccgtctggccgccccccgcgtggtcacctagatggctggccgtgcccctagatttgggttcctatcttgttaggacttccatcttcgttcattttgctgtgtgtccgtcagatagatgactaatgcatcctcaaagttctccaaggcggagccttgcatctttgtgtgtttgatttggttgagctgcaacccgtgctgctgtccttttcagtataaaaaaaaagatttagatgtaggttggcattcggatgaaaaatggaccgtgaaaaaaaggaggtccattcacctcgtgttctgtcatttgagcacggatcctttagtgtatcggaaagcgtgatatttctgataatcttctgcttttcagagaaaagctttgagtaattgagatgtatattcctctattgaaagaaaaagaggggttttcaagcaatatgaaagcctgatgctttcgttcttcgttttatttaagatcactttcctcccttgttcttatgaaatgtgcaactctttaatcagggatggcaaccgatagtgaagcctcgaaggcagctgaggttgtggttgactggcataaacaggacaaaaagaggatgctccatgcagtttaccgtgttggggatctggaccgcacaatcaagtactacacagaatgctttgggatgaaactgctgaggaaaagggatgttcctgatgagaagtacaccaacgccttccttggctttgggccagagaacaccaactttgcagttgaattgaccaactttgcggaggtctcgcgtcctacgtgcgtcgcgccgttgcctggctccgtcctcgccgttcctctgtagaagctggccgctgaccctcgccgtcgcgccgttttttattagatgaagaatgaatcaacccttgtagaagctaaagatagaagataacactactctgtttttgaatgtctgaagtgtaattttgcagccttgcaactataaaacaaacaatgtatggcttaattattgcagttgcacagtgtgaagatttaaaattgaagtgctatgaagagatggataagaggaagaaactttataatattgttcaagagacaaaaggaaattatcagggtttttttgtcgatgccgacccttaagcaaaaatgaggtgtcatcaagcctgaatgcaaatggtggaacaactaaaaagacatttaagtttgatagagtattcacgccgaaggatgatcaaggtgtgggcgtctccggcggcccgactatacgaagcgagggcgtatcggggctaaggacacgaaaggccaagcgcacagggcgtacggcagtaagcccgcctgcaccgcaccagaccgtcacccgcgacgtgcccatgtcatgacgccacggtggcggcacgctgacccatcgacgtcaccctcttcctcgcttccgctcgacagcctccagtttcctggtcagtcttcgtgccgcctctctgccacacaccgtctctcagagatggaatcaccacccctcacagttgaagcgaccgcttttaccgagaaaaatgatggacatgactttggaggatataatcaagatgtgaaagaaaaagaatcctggaggcaagaaaccccctaggcggccggtaaactctaagtctgaaggtttagggttttcatgctctcgactctgatagctaactcagaactgatattcaatgtaaaatattcagtgtgatagaaaaagaaggtgaacgttggattactgccatcaaagcgacaaaagatgcataggctgggaacatactttcctgttgtaattg

SEQ ID NO: 36654 - DNA, 2275 bp, Zea Mays
cgaaatgcccaccgtgcgtgttcgttcaagtccagcttgggagagttgggagtgagcggctgccgccaggccggggcggctataaaagcagcggcaagctcctcgaggcctcgtccccacgcacgcagcaagcacacccggttagcgtccactaatccgcgaaagcttgactgctccaccacgggtcaccggacatccggcttcctcgccccgtcccccgcacgcaggccgccccttaggctcctttgtcattcgaccttcctcttaagcacagcacaagcagctacaaggttctgacctacaagttccaatgacaatctgcagtagtgaagaaatcattgatgagtttgagttgctaacgcgtgatgctaggcgcgtgcagcaggatacactgagaaagattcttgaactgaatggtgatgccgaatatctgaatcgcttcaatcttggaaggagaacagactcaaagagctttaaatcctgcattcctctatgtgtgcatagtgacatagagtcctacatccagaggatagcggatggagatgactcgccggtgctaactgggaagcccatcacttccctctccttaagttctggtacgacgcaggggaaacccaagtttttgccattcaacgatgaattgcttgagagtacatttcaaatattccgaacctcatatgcctttagaaatcgtgaatatcctattgtcaatggaaaagccctgcagtttgtttacggtagcaagcaagtctttacccaagggggcattcttgcggcgactgcgacgacaaatctgtacaggagtcaacgtttcaaggaagcgatgaaggacgtcatgactcagtgctgcagtcctgatgaagtcatctttggtcctgacttccatcagtctttgtactgccatctattgtgtgggttaatcaactcagacgaagtccagtttgttttctcaccgtttgcgcacagcctcgtccatgcatttcacagtctcgaggaggtatgggaagatctgtgtgctgacataagagatggtgttctctcaaagagagtcaccgcgccatctatccgccaagctgtttcgaagatcttgaggccgaatcctgagctggctagctccatttacatcaagtgccagagcttgagcaattggtatggggtgatcccaacactgtggccaaacgtgaagtacatctatggcattatgacggggtccatggagccatacctgaagaaattgagacactatgctggtcacttgccgctgctgagtgctgattatggtgcatctgaaggatgggtcggctctaatataaacccaaccctgccacctgaggaggtctataccgatacagactgggagatattgtgaagatagcaggcttccacaacgcaacaccagagctccagttcatctgccggagaagcctagtcctcagcgtcaacatcgacaagaacacagagaaagatctgcagctggccgtggaagccgcggagaagctcttggccgcggagaagctggaggtggtggacttcacgagcctcgtggacaggtcgagcgagccagggcactacgtcatcttctgggagctgagctccgacgacggcgccagcgaagacgtcctgagcggctgcgcgagctgcatggacctggccttcgcggacgcggggtacgtcgggtcgaggaagacccagaccatcggcgccctcgagctccgggtcctccggaagggagccttcgcgcaggtcatgaaccactacctgagcctcggcggcgccgtcagccagttcaagacgccgcggttcgtgagccagtccaacagcaaggtgctgcagatactgagccggaacgtcacccggagctacttcagcactgcgtatgggctctgatcgacgatgctacggcgctacgcaccaagtactggtaataggctggaagtatagtgatcgagagtgcatggcgcacgacgacgatccatcatgctgggagcctgggagttgcacgacgactgacagatgtatcatataattgtcagtgtaaatatagctgttcgacagtgtatgtaggcgaaggttgctgcgttccgtttagcagccgtgtcatcgctcaagaaaactcagaaagatcacatgtgttctgatttctgaatcaaaaagctgtgtacaagaagcagcgaactcactcgatcatattccgcgcgctacagccttcgcatatcagaaataccgccaaaagtttccatgtgctttacatacaaatctggctcgtacgagtcat

SEQ ID NO: 36655 - DNA, 940 bp, Zea Mays
ccgagccttcccgtcccgaaaccaaagttcccgtggtcgtcccacactcccacccctaccaacgctctgcgccaacgaacgcgtccgcaagtcaaaccaggcccggagccaccagcaaccaaccgagcgcatggaggccgcggcggcgaccgcgctcccgttcgcggcggccgtccccactgcctggagggtgcgcgcgagcccgcggacgcggcggcgctccgtggcggcgaagctggagcgcgggctcggcaagggggttcccaccaccaactacgtggtgccgctcgacaaggccaccgggatgacgcgcccgctcgtcgagatcctgcgggacctcaacaagcgcgtccccgacaagatcatcgaccccgacactaacaccgtcaactggtaccatgccaacagaatgcttagcttttacgcaccaggttggtgtggagaagttcgtgatgttatctattctgagaatggaactgtaaccgtggtatatcgagtgatacttaaaggaactgatggagagagatgccacgggcacagcacagttacatgaggggcgcagggaagatgctgttgcagccgcagaggaagctgcattctgcaaagcctgcgcacggttcggttttggcctgtacctgtaccaccaggatgattctcattacgacgaccacttccattgaggctcagtctgcaaaagagctgttcataagctgcaacatgcgttggatatgcctctcgaaaaacttcgcatctagaatcaatttttgctctttgcgtagtatcatactcataacacaaagaagtgaacctatgtagatgctattcgaaaccttctttttattaatattagaattcttattaatattattgtataattatttttttaatgtatatgtgtcggacacaatctattgattgatctatattctggcagtctact

SEQ ID NO: 36656 - DNA, 1217 bp, Zea Mays
tgaactttcaatctaagcccagcttcgagctctggcagtctggcacaccgcactctgccacaggtccacgcttccaccagcccactccccgtcgccgacctcacccccctcatggacggtggccgagccgcagccgtcggcggcgacccctctcccatcgctgctccttccaatcccccggcgctgagcagccggcccgtcgatgtctcctcgttcacccataccccgtgctactgcgaagaaaatgtttacatgttatgtaacgagcttattagaaccggagtggctgatcctgcgggcactgatctttatgttgttttcatatccaacgaggaaaaaaaggttcctctctggcatcagaaagcaggccattctgatgatggatttatttgctgggattatcacgtgatatgcatccagtgtttcatggtacttcttgatgtgcatatggaagtctaggcgaagcaaagaagttcttgattttgtttgggatctggactccgatcttcctttcccttccccattgatccaatatgtttctgaggcgattcaaccactatcattcggcaattccagatatgcaagactcttccgtgtggttcatgctcctgtgtttcttcaatcgtttgcctcagacagaagccatatgaaggatcctgaggggaactggattcagttacccccaaaatatgaaccgatcgtggctgaagatggaaccaccaataacctcaatgagtacatcatgatgtctgtgggggacgtggcagacagagaaaggatggctaatgatgtttactgcaacaagcatggtgtggtgctaaatgaaacgatcttccctgaattcttcgcccagctgcctgctccacatacttagcaagcgatctttctgttgtgatgggttactctgtacacttcaatagtgcactcacaagattatgaattaaaatatatgggcactattggacacatggtgcctctaagtagcgtttcagatagatcctggcctgttttggaaagcaaaatgtggggatctcatagttctgttagcctagacatctgaaagcttcatcttgtcccaaataatgatgactaggtcatgtttaacggctttagctttctttggtcattgttcgtcgaaacttatatgaacataacacttctatgtgctcgttgttaccttacaagtaaatatgcaacccataaactttaaacttgca

SEQ ID NO: 36657 - DNA, 2993 bp, Zea Mays
agtcagttggtcaagatttttgaaaaaattgaaaagctggaattgataaattaggtctgttcgaagaatctctaagggactgtgacagggccataaccatttctcctaattattctaaggcttggtacaggaagggaatggtaaaaacagcgctcaagaattattcatctgcaatacatgatttagaggtggcattgagccaggaagtgacttcttcggggaagagtaacatagaacaagagctgaagttgattttagagaagcatgaaagtgtcaatgaagctgggacatcaaactgtgatagcaaggatagagatttgcctcttgcaggacaacctcataaaattgttatagagagtatttcaacaccaaacaaagttgaatgcagattatcatgaaatcttcccgtgaaacacactgccacttttgcttcagtgaaactccagccgatgttgtattctgtccttcatgtacaataccaatttattgttcaaaaaggtgccaggagcaatcagcaggtcatatttctcgtgatgaagatactaatcttggatattcaacgaatgttgcaaacctgagtataacttcgagttgcaagtctccaagatctaagctatttgctgaacataggcatgaatgtggaggtgcccactgggcagctgttttaccagctgatgtagttttagctggacgaataatagcacacagcatagtaaaaaggatgccgtctgggaagagctttgctttctctggcccaaatttggatctagttcaccattatgatcaacattctcctgccaacaagttggaatcacatatatatgcaattgtcctattgttatgcctccaaaatcattatagatcagaccttttgtggacagaagattctttatcacaggtatatatggcgtttatcttcagacattattgttctgatatacctggttaatgagtatgatctgaaattgatggcgatttcagctcaagattttttataaattttcacaatgctaattgttatcaaatgtcttggtccatactgttttggtggagataaccagtctccttggggattgccagtttcatgttccttagtaatcttaatctcatctctacaataccagtgtttgtcgaacttccttctgtatagtccctttgaacttccttctgtatagtcctctttacacacttttacttgttctgatacttagaaagccattttttaacatgcaagaatttgtatcattacatttaaaaaaggacacaataaaagctctttcacttgtaaattaggtgaacacatcaaaccaaacaaaataggcagaaaagcagaaccaacgaggattattgttatataatcaaatcttaaatgactaaatagcctctagatcaatagccatcctgcaatgcaagtctgcaactgtgtctaacatgttacctaaagcccactggttacactcatggtggtcagacaagaaatcagacaagcttggaactcaagcttcagtcagatatgcctaagctggttcttttgatatttcaaatcaaagtcaattcaattgctattgtctgtatgaggtcgatggacagaggcccagagcacacaataaatagaggtttttatgtagctgaaggtgcaaaaatgtgtagtgtggagcaggtcagggttgcacaagctctttatgtatctggtagcctgttcaatcactcatgtcagcccaatgtgcacgcatattttctttcacgtgcgttcgtgctgagaactactgaatttataaagtccgggagcccagttgaactgtcatatggtccacaggttggcgagatgcatatttcagagagacagaagtcacttcaagagaattactacttcagttgtcaatgttcaagttgttcagagctaaacctatcagaccttgttatgaattcattctgttgtccacaaagcaactgccttggtgccatatcggaatcaacttactacaggtccaaagagaatttcgtgaatgtttcccttggaggatcttatgtctgcaaactatcattgcccgatgtatcgaaggttgatatggatatggagaatgtcgccaaatctctcttgcaaaatagtggtgtcagtctgaacatagatcatggatgttgcatgagttgtagatcctgtattgatctgtcgtctgctctggctacatcacacagggaagaatctaccatcgataggttgaagaaacatacattcctagacaagactctcatcacagaggcattacaatctctaaaacaactcaagaagttgaggcacccatatagcaaggctctcgcgcaggccgaagacacaatcgcagaggcctttgcgaaggtcggagaccaagaactagcacgaaagcactgtgaagcatcaattcagatcctcgagaagctgtaccacccaaaacacatcatcattgctcacgagcttattaagcttgtttcgattctgctgtccctgggagatggggcaagcgccgcagccacattcgctcaagcagaggcaatattctctctttactacggatctcatgtggagaaggttttgacatacatgggtgccctgaagaaagctgtcattgacgtgtagcgtgctgacaatcctcacgcgggaatggccaacacggttctgcagaatcatctcaccttttgcgcttcttcgaggagttaatgtaggggaaaacccaaaaaatatttacaaagcagtgtggtattgcttgtagtttagtttgttctagaaaacacaaactagctcaaccaaacttcctggctaatgagtttggtggatgttctgagtgcctatgttaatgacttgtttcataaatttttttcgtatatactcgttgccttacaaactcggtcggtagaggaaagatcgctcccacggtattatattaagaagaagctcaattgaagcctcaaccaagaaaggtcatgaaagctgtcttcctgcaacatgagggtccgtc

SEQ ID NO: 36658 - DNA, 2257 bp, Zea Mays
gactgcccagcgccccagttcctggctggccggctggctgtggcctgtggctgtgcctggtctcctcttcctcggtggtggcggtggcggtggacggtggtgctgctggtggtgttgcgctgcttgttcggttgttcctcactttcacttcctttttcctccacggctcccgtcacctaagcagcagctgcagcagcatatcccccgcacaccactcgcttcttcgccatcacccggtggctagctcttgcagcagctcatctcatctctacctctggctggcagtttatttctctcctccctatcagcataagctcagctcagctcagctcagcccagctccctgctgatctgcggcatttgacctgcctcccgtgcttgaaagcttgattggttcgttctgtgcgcggtggtggcccggggcaaataactccccttggtgcctggttggctcgttgccaccctccccgcggcagaagcggcctataggatgagagggacgggggaggaacccaacaaaaccggccgcgacactgtcctgaccgtggaagacacgcacacagagctccagctctgcactgcactggccgacggggaaacggtggagctcgcgcggtgttccattcatggattgggatctcaagatgccggtctcctgggacctgcccgacctggagcacgacgccatgccgccgccgccgcccgtctccgcggcttccaccgcggcggcgtcgggcattgccgccgcagctgccgcgccttcctccgcgacggcgccgagccgggcggagtgctccgtcgacctcaagctcggcgggctaggcgagttcggggcggcggacggcacggccacgaaggagccggcggctgcaaccgcagctccgtccgccagcccgatgaagcgcccgcgcttggggcccggcggcgccggcggggcgcagtgcccgtcgtgcgcggtggacggctgcaaggccgacctgagcaagtgccgcgactaccaccgccgccacaaggtctgcgaggcgcactccaagacgcccgtcgtcgtcgtcgccggccgcgagatgcgcttctgccagcagtgcagcaggtttcacttgctcctagagtttgatgaggccaagcgcagttgtagaaagaggcttgacgggcacaaccggcgccgcaggaagccgcagccagataccatgaactctgggagctttatgacaagtcaacaagggacaaggttctcgtcgttcccggctccaaggccggagccaagctggtctggagtcatcaaatccgaggacagctcatactacacacaccacccggtgctcagcaacaggccgcacgtcgccggcacctccacgtcgccggcctactccaaggaaggccggcgcttcccgttcctccaggacggcgaccaagtcagcttcagcgcatcaggcgccgggacgctcgaggtctccacggtgtgccagcccctcctcaagacgaccgccgccgtggccccgccgccgcccgagagcagcaagatgctcgcccccgtgctggactcggattgtgctctctctcttctgtcatcccccgccaactcttccagcgtcgacgtgagccggatggtccagcccgcggagcgcatccccatggcgcagcccctcgtccccggcctccagcaccaccagttcggcggctccccggtgccggactggttcgccggctccggcgccgtccctgccgcgggcaccggcgggttcgcctgcccccacagcgtggagagcgagcagttcaacacagtcctagtgccgagctccgacggcggccacgagatgaactaccacggcatattccacgtcggcggcgagggctcctccgacgggacgtccccttcgctcccgttctcgtggcagtagcttaccgttgaagcgggcagtgttatgatcggtcagctgtatagcggtggtcatcacaccagttccctcttctttccgtgtttatttattctctgctccctcacgcactcccccgtgtcacttgctagtttcttagttttgcatgcctgatgcatgtagcctgaaaaaactctatcaaattagtgccagatttcctagttcccgtttgtttcattttattttgagaattggaatcttactaatgatttcctagttcccgtttgtttcattttattttgagaattggaatcttattaatgtaataggctattttttagaatgtgacattccaccactttacaaagttattgtataagcct

SEQ ID NO: 36659 - DNA, 4697 bp, Zea Mays
cacccaaccaaaacagcacaaaaacaacgggaggagaggagagggaggcagcagctgcctgaaccagccatttctctctcttgtctagtacttcctgccactgctagtagcacagtactacctctctctctcatcagtcaaatcaatcagagtcggaatcgagttgtgtagttggaaacgaaaaagaaacaacaagacaagcatctgctgcctcgtctcctcgggctccggccggcgacccgccctcgcccgtcgcccccgccgaggaagcatcgcatcgtacagcagcagtacatgcgacctagagagagagaaagagatagtccagaggaagcaaggaaggagtacgtcgtcgacgtcgatctattcctcctcctcctcctcctccgatccgtgaatccaaagtccagaagcagttaatggtcgagaggggccacaacctccagccgttgcagttcttgcgttgagttggattgggttgccaagccccgccaaataaaacaaaagggcttcctgtaatcctgcgctgcaccgatggtgatagcgtcgggagccgttgacaggggccacctgtccccgattgctcccctgtcagagtcgccgtcgtcctcatcattcttctcccaggatctcgtccccactgagaggcaagttggattctggaaatcgtcagagtcaatggtcgatcacaaagggagcaagcctattttcacttctccactcgataaggcccatcccataggctcaagtcctgcaggtggtctggaacatcaacgaggtcaagccttcaaggggaagctgggcatgcttaaccttggtaatttggtggaccaacaagaaaatgctcctggcataccttcgatttcttggggtgatgtcctcagtacctccaggtccagtcttggcttgtctacaggagggacggcttttgttgaaccacccagtgctgatcaacatgtgcaagactatggagactgcttttcatccagctccttcactgaagtcttcggtagaaaatcagcaagattgatggcaagtggcgtttatggccaatcagctggtgcaaatgattccggttatgacggagatgaacctctagggtccatgaaagaaatggaagctcaaactattggtgatctccttcctgatgacgatgacctgatgtcgggaattattgatggctttgaatacaccggcttgtctaaccaggatgatgccgatgaagatatattctacactggaggaggtttggagctagagcatgatgattccaacaacgtcgacaaatttcgtgatgtgtccttcaagattcaactttctgagaagcactctatcgataaacaccattccagagctcttattgtaaaaaatattaatccaggcatcgagggttctgatttaagggctctgtttcagcaatatggggacgtacagacattcgacacatcctgcaagagccatggaattgttacagtgtcttactatgacattagagctgcacaggacgcagtgagagcagtccataacaaacctctggggctgatgaaacttgatgttcaattttcccttcctaaggaaaatgttccaaacaaagatcccaacaatggaacactggtggtatctcttattgactcttccatctccagccatgatcttctccaaaaatttagtgtttatggcgatgtcaaggagatttacaagtctcctacaagctgcaataagaaatttgtagaattctatgatatcagagcagcacaagaagcactgaatgacctcaacaagggtgaaatatcatgctcacaaatcaaagttgagcatagcttttctggaggagcaggatcttgcttcgcagagcaatattcaggagaacagaagcaaaatgccgtagctcaccaacttaagaactctccacctgggaccattgggaagttagatactaagagttgggacagcagcactgttcataatttatattctccagttagaccgcaacacgataaatcacaacatggcttctctgtgaatcctcctcagaagttgtcatcgcctatcagaattgaatctacacagcagcatagtaatcaaactgcttttggtgaacatagtggatctcttggtcatggcaactttggaggtgggctgcaagccttccacccgcactcactgccagagtgtcacaatggtatttgcaatggctataactccatgacattaaatgcaaggaattctaacttcagatttactgaaggaatagactacaataatcacaaagttgaccacagtgaccttcatggtcattcctctgatcaaaatgaagcaattagagttgctggaattggaagttgcccccttcatggacatcactatacctggagtaactcaaatggttttcctcaaagcccctctgctccaatgatgtggcctaactttcagcaaccagtgcatatgcattgctaccctgctatgcctcctcacatccggcgcagtgctgcccatcctatggaccaacatcacttgggttcagctccaaacagtgttggtggttttgcaaatgcacactcttttcatccaggatcccttgaaagcgtagggtttcctggcagccctcagctgtatccatcagatctctctgtatttgcatctgccagaggaaattacagggagaccatgttctctgccataagtgccgggtttccatcaattcagcaaattcttcatgcgaccaacggaaggaatcctatgatgcacgtctccacctcatatgacgccactaatgatcgcataaggagccgcaggcatgatggaaatgctgcccagtctgaaaacaagaagcagtttgagctggaccttgaccgcatagctaagggtgaagactcgcgcaccacactgatgataaaaaacattcctaacaagtacaccagtaagctgcttttggctgtcattgatgagaatcaccgaggaacttatgatttcatctaccttccaattgattttaagaataaatgtaacgtgggatatgcattcatcaatatgacggatccacagcagatagttccattttacaagacattcaacggcaagaaatgggagaagttcaatagtgagaaagtggcatcacttgcgtacgccagaatccagggaaggaacgctttgattgctcatttccagaattctagcctgatgaatgaagagaaatggtgccgccctatgcttttccacaaagatggcccgaacgcaggagaccaggaaccattccctgtgggtaacaatgttcgttctcggtccgggaggaacagaccacttagcagtggttcggagactaccaaagaggcaagtccatcaacctctcctaactgaagagaagccggctcccgatattccaactcaggacaggcaggcggtatttgctcactaactggaggctgaagggcatgtaataaatcatccccagttttgctgcttctttttcttttggtcctcgtcagcaaggtgacctgacttgctgagtgtgactagctaacgagaattctgcactgcatgagcctgctgaagattcaccttaaagtaactatgccttggttttgccataccattgacgtcaacggctacaggtaatggagaagacctggagtggtagagggaggtgtgtttcaggcgggtgaaaattcaagttgtacagttgaactcaccaggattggaaaatggtcatcaattcaaatttgagttgtttttcttagggttcttcttgctatgtttgatctcgtttatgtgcgtgtcatgtgtccacggtgtgagcccaaatgtttgaatgccttgtctttgtgcaatttctctcaaacctcagattctggtgtgctggttcattccatgtcctcttttgtttttcaaattcaagatttattacatcataaacatgttacaaagatggggggtcatgttgccccgaacaatccaagtttcaaaacacatgctagatattacaggttggagaatgaagcccctagagaaaaggcatggatttggggtagttgcccgtcttgctttttttttgcaagaacatcagctatcttgtttctctctaggaacctgttgtgccaaaatcatggcgtaagccaacacctggctgccagttaacaaaattgcatctcgcagatcgagtgcagcagctaccttgaaattaaataggaattgcatcctggaagaaagaagcatggggaatacctgtagcaggtcggtctcccccaaaccaaaagaaatggctgcaacactgcgcacagcaaaggttccacacccaaaaaagagggcgcccagcacccactaccttcagcatgctctgccacggcttctggtcctcctcgctggactgtcatcagctcccgtggcattcacactgctccgagtcaccctgcggccgctgctcacagcagggctgccgttgccgtcatcatgcatatcaccactcttcctggtccgtttcataggagtgacgcacacatcaacctcttccactgcagcactgctcttcaccctcttgccaccagtctcagcatcagccttgtgcttcgtctgtttcgcagcagcatcttcatcagccgtgcgcttcttcggctgtttcgcagcagcatcttcaactaacacatccaccacttcagccgcgcccatctttgactttttatcatcttttgcaccctccattt

SEQ ID NO: 36660 - DNA, 2859 bp, Zea Mays
gctaaatctatactactccttaagatggtagtgtaggcgtccacatccgtatggtgcacggttctgccatcgtctcctctccgcgacgcacgcctccctctcctccgccccaccctcctccccacgccatcggcaccgccatcatcagatccggcccaagacgcctctgccccacgcgcccgagtcgtcgaggcacactcctgcccgcctccggcgtccacgcacatctccgcctcacctcggcgcccgagtcgtcgcacgcgttcgaggtggcgtccatcccggcaccggcctcacgcaccatctacagctcccaactctgctcctctcagttctccctctgcattccaccttctctcccttcctctccaagcaccgtcctcctcgcctagatccgtacaagctgcaaataacctctccggtggcaagacagatggagtcgatctccggcgaggatgctccgaagcacaacctgatcctgtccgcgctcgtctccaacctacagtgcatgctcgccgcccgccgcccgttcacggcagaggtcagcaccgccgccacagctagcgaggctgaggccttggctcaggaagcagaggcgtccgatgcccccacgggagatgggacgctggcgaggcccatcgtgctgctgacctgtgccggaggggaaccggtcggcgggtctcgcggcgctcgtcgacgccctcgttgccgccggccgctgcgatgtccacgtgtgtgcccccgaatcgtacatgctgtgacttagaaaaccaaaccacagcgggaccggtgctcggatagggtccaacggcgatgcaagcaaggagtggcatgcggccggaggggcgcagatcggctcctgcacgtgcagcgcagccgcgtgacagtgaagcagggaggccgcgataggcggcacagggagggtgcgacggaggcaaagtgcaagcacctggggacttcagaaagaaagagtacaagtctactactgcagaaagcaaggaggatgccaacagaagcagatttcatgtttggatcggataaaatcttaagcaaaatgggagaaggtttgggttttctgcaatctgtcgtctcctcttctgctgggtatctccgttattattctaatgaagagggctatgagttggattttcgtaggtacatttgagcgtgttttggaatgctgggaccgtgaaacacatgaatatgttgccataaaagttgttcgcagtatccacaagtactctgatgctacaatgattgagatagatgtgctcaatcgccttgtagaaaatgaaaaatatagatctctgtgagtatctcagagacctaattgcttaaagtataaccctattctatttttgacttgacagttcctcttcaatttgtcagctgtgctcaaatttagagatggcttgactatcgtaatcatatatgcatggatgcgttactttatgtttgcttgtatttaatatagaaggctcccttgccttcgttcgatcatgtggtatttgaaagtgatgtctctataaatgaagtaaggtagggcaatgcttatgttactgttgtcagttattagctttttaaaccatgcatctgtcaatgtgtcctgtttcaatagggtcttattataggacgtgatggcactgaattaggatgtttgttcttttgctacctttgttaaacaacatcagatcattcgtattgtatccttcctcggattgcttcttttgttctactacaaatatgcccaacatggcagggagaggtatgctcctaaatttcttattttgtgcattgtgaaatgattgttctaacaacatcaagtttgtgttcttcatataatctatctcagattgctctgtgttttgcaggtctcgaggtcaagcctggacccactgtcaagtgtgtgcttggacatgactttatcctgcactttccactgctgcacttggggaatcaaagaaaagtgaaagtaccatgtcaaagttgatgaccagaagcttgctattggaaccctctctattgaaaaatacccctagatagaaattgatttggttttcaataaagagtgtgagttgtcacacacatagaaaactacctgtgtatttttctttggttacaaggttgagcaaccaatcgaggaagatgaataatggatcttgattctgaagatgaagagaaggagctaaacattccagtaatcaaggaaaatggcaaaggtgatgggaaggcagttgctgcagcttcaaaatcaagtcttgggcttgaaaaaaagcaaggatgagtatgagtctgatgattctgatgagggagaaggtgaaaccggagaatgaggagatgtggttgttcatggacgacagcatcaagaaacctgcaacatgcaacctgattttaagaaatctgccacctgcaacatgactgggcagtggtatctctgagatataatgtggacaacggcaaagaatactatgcatacacaacaaaagagtcctacaacctgattttaagtccatttgtagcaaaccatcttggaagccattaactcgttgaatttgaagctgatgtgcagttttatttttatgtcagttttactgatgcagttagttcctaagaagatccatggcaacttgtttcacgctgatgcttgagaagttgagagggatggaaatgacactcacaataaaaatttgattttctttcttgtgatcgtcgatcacaataaacacagtggcacaatataccgtgtaattgtcctttcctggtagaacatgaaatgttgaacttcctcttgtgatatataaagcctatgtatcctacataatatttaacatcttacggaaatttatttgtgctgtccca

SEQ ID NO: 36661 - DNA, 3088 bp, Zea Mays
tctcttcgcttctcctgcctgcggttgtgcggcctgcctccggtaaggagtcagccaagaacgcgatgcgaccggccttctccgcctccaagccgtcgccgtccgggagggagaagggcaggaggaagggcgcctccgcggccgaacagctgctcaccggccaggccgtccccctccgcacccgcctccacgacgctctcgccctcggcctcaccaagtctgatggccacggtgctaaaaaatggcagtctactgatgctggagtacagtctcacgtgctcaaatcggtgggtgcatttgtcggttgtctttcaaatgaactgctcagacttcctcctataaaggagtcaatttcagatatacttgtagcactggaaggtattcttaagacagagaacgtttcagttctgatccaagcagctgacgtgagctcgaagtttttctctactttaggaaattctgttcgccaatactcagttttggagatggtttcgtgcctctcatgccatttgtctgcaaatcagctacgtattgctttaccatgtgcaagtgcattgacttgtatattgaacaaccaagttacagcgagagcttcgactcaggcagaaatttgggaggctctggacaagaccaatgcagttgcgagtgttatttcaactctacagaattacaccgaagatgtccatccactgaactatctgacagagatgatatctctgctaagaagtatactgtggatttggccttcctcgagataccatgtatggagcaatcacaacttgatggccaaactagcacattactgtcttactgctgaaacaacagtttcagctaaaattcttaagctatatgctgctttaggtacatctgtgcctgtgctttatgtggcaatggagcaatggtccttcttaagaatgaagagctgatcattaagactggtaaccttatgggaaaatctcatcctactgttactaggattgaagcattgaggctctgccaggtttttctgagatcttcaaggggctgcaattggttgatgactgcacatggtcagcctattgttcaaggcataaccaatgccatgtctgaaataaatgagaagacattagtaagagagggatgtcggactgcattactggcgcttcgttattctgggaatcatcatagatgcttctggtttaatgctattgataaaatactttataagattctttgtgggagctgcaactcttcatctcatgcacatcagactttgtgccatggggagctgttcaatatagattccaaagatattatggatatacatccctatgtatgggatatactcggatatctagcagtacattgcgacaatgagcatttttcggtagggacatgtcagaataatttcttgcagggactgatatcatgtgcttgctcgctagcaacagatttaactctgaaaaaaagtcccctcaaattgtctaaggaggagcaggaaccggctttgagggcagttcttatgatgcttctctctcctagccaattcattttctctgagaaagttagatgcggggattgtgtgccatgaatgcagagatcattacaacgaaggtttggttggagtccttaaacaagccttgtgtcagaacatgagcccagggcccaagtcttatattgcacatatactgaatggcgaatctctaagtgctcatgcggctatcctatcagcaagatgtcctaaattattaccatctgaaaaaacttttgtccgtgatgggtcagtaacttatgaatggggcagaaggtcatgctatcatgttcgaatgtctgatcgtgtagatagtcacgctctgaagaaaattttggagtatgcatacactgggttggtcactgtagatgatgccactgttaagcctgtaaaaacacttgcaaagtattgccatttgagatcgctgcacttgatgcttcagaaagagcaacctagatggcactcatgtcccatatatgatcttactacagcactcgaaccagctaaacattcgttctcggacatcattttggaggcccaatcaaatgacaaaatggagtgtcaccatggttcgtgccagttatcgactcctcatattcatagccataaggtcattctgagcgtgagctgcgaatacctccgtgctttgttccagtctgggatgcatgagaggtacgccttctgtttcctggcatctgaagcagggtgtcgcacgcattatctttgttgcttatctataaggacacgtcgtgaatgtttaaaacaaccgataagagccatgtgtgcagctttgcggagactatcagagttccggtcggatgggaagcactgagaaaactagttcagtggttctactcaggcgagctgcctagagttccacctgactgccgatggaaggctacgagtacagaagagaagctatctatcctgaaatcgtacgcggagctgtcgtccctggcggacttctggttcgtggacgggatgaaggaagagagccttcaagtgttgacctcgtgcctgaattcctccagcacggacgcctccctcgccttcatcggcttcgcggcgaacttgggccagtgggagctggtggaggccgccatcagcagcgtggcgcatctgtaccccaggctgcgagactccggtcggttggagcagctcgatgaggacgtgctcaacatgctgcggacagagcatgtcaggtatttgcagcaccgcagtgcaagtaaatgaatccttaatgtcatggagggttttttttccccgtccactggtggtcgcatagcggtcctgttgtcatgttgtggtggtgtatgcacagctgttgcgttaaaaaaaaactgtacagccacttccgttgaagcttatggcgtcatgaacggggctcatctccgttgaaacaggaccgtgatggttaaaaccgttaatgatacttgcgttagtaccggtgctagtttcttgcctaagagggatcgtgcatgtgtgttagaaaaattataagatgttgttgggtacttgttctcaaatgcttcgaattaagaacaagacaacataaaatgttaaatgttaatgcccttc

SEQ ID NO: 36662 - DNA, 2361 bp, Zea Mays
ggcttcacggctcggctggctgcacgccggagccccggcgccagatctcgccaagtgccagggccgccgcaggcccctctttgcctgcgcgagtctcagaatcccgagagggaaaaagaaaagaaaagatgatgacttcctctgcctgttactacctgtgccgctccctcgtccgggctcctccgctcaagtcgaggagtgcagtgcgctgtccaagcgccgccccgccaggagccagcggtgccacctccacctccaagcttgtcctagaggtgaaagaacggctagcaagggagcacccaggcctccccacgggcaggaacgggagggacgatgacgacatggtcctctggttcctaaaggaccgcaagttctccgtcgatgaagccgtctccaagctcaccaaggcgatcaaatggcgttaggactttggtgttgcagagttatcagaggaatcagtgaaaatcctgtaccaaactggcaaggcatatgtacatgattccttggacatttatggccgaccagtgctaattgtagtggcagccaaacattttccttcgacacaggatccagttgaaaaccagaagctatgtgcctatttggttgagaaggcagtcaatagacttccgccaggagcagagaatatacttgggatctttgatctgcgaggctttcgggttgaaaatggtgatctccagttcctaaagtttttgatggacgttttttactattactacccgaagcggcttggccaagttctttttgtcgatgctccatttgtttttcaaccaatgtggcaggttgttaaacctctgttgaaatcatatgcctccctggtaagattttgtgataccgagactgtgaggaaggaatacttcaaagaagaaactgtgcctcctgatttccgcgattaggtgacatgattatttcttcagtaattgcaagtggtctcggaaacatggcctttaatttattgagaatcgattggcacccagggggactggcgccttcccatacctttggattaacctctcaaaagttgctcagacggcagcaaatgattggagagtccagtaaaaaatgacccagtacttgtataactagtgcgaagtagaatgctgagtttaggctgctgtcttgagtgctcctataccatatttttctggttttggatgaagctatatggatcaaattcatctctgttgaacaattgccaattacataacttgtgtttgcccaattccatggtgtagtaccataacttctcagtgcagtgcagacaacacatggattccatttttttattaaagtaccatctgctacaaatatgaatcatggctttgtttgtagacttcataaagaaacacacagattaatcaaaccagtcttcgaagagtctgctatggataggaacgttccaaagcaaaataagatgcaagttgtattgcataaaaaccaggtacacatcaatcagctgcattctggaagactaaactgcaacacaactacatctgcaatcacagagaaatcaggtatacgaccaactgttatctgttgtaaatattttgtttttaggtcaacaacggagagggtcaagcgatccccacgtacagatgccagcatggtcttttacatggttccaagagttcgtaaattgagtgtagccttaaaaagatctgccttgtgccacttcaacactttaacccagatgtaataaaaaaacactttaacccagatgctgcattgtggcaaaggctcgagaatatgacaataacagttgttcaaaaactgttggtaggaacatttatagcagcaaaagaacaaaagggaatgcgtggtttcttatctgccttagatgagataagatttcggacatgtgtattcatgtttttgagtgatttggcactatgaatgcactagattgttggttgcttttttttgttaattgctcaggttgtatttctagtcactagtgttgtattgtttgtgcttgtgctaagatgatctcttttgcacttgtaataggtgctcattcaagtactctactgatcgaaaatggatggcgtctgtgatggttgattcttttgcacgtcttctacactggtacattgacggctgatggagatggatggtggtgtcgctgttttgtgttttgtttagcactctaggtgacacattgttatgggattgttacacagctgatatgttatgaacctgatatggagatctttttgcgtcctttgtttgggtgttactgttgtgccattcgtctcataagttatgccattttattacttgcttttggattgatatatattcgtctctgaagccttccttcaatacaaatacaagagtttttta

SEQ ID NO: 36663 - DNA, 2490 bp, Zea Mays
ccggctcaccgcaccttgtgtcagtcaccctcctcgagatgccgttcctgcctccacgtcgcagtccgccacagcgacctctattaaacggcaacaactcatgctgcccccgctgccacacccgccgcttatcatgcgctggcgaaggcgattgagcgagttcagcggctaatagattttcagttttatttccgggagaatgcggggtggcggcggggcttcctggctttcgtttcgcggcgtggtggtggaggaagaagaggcggtggtttcggcgccggaaaagccaatgcggcgggggcggcggaggtggggagcggaggtggacgacggctactcgccgagctccacgggcggcggcgggagcagctgctgcgattccttcggctgcgactcgcctttggccgggttcgtgcgcccagatggtgacccagacacagatctggagacagatgggttggccacttccacctccagtgcttctgcagcctttaccgagcggcaggacgacgaagcggaagaggcgctgtacggggtgaaggaagaggagtgggctcagatacaagaaccagccaagaatccggcattccgtgccaccccagaatgccacaaacagcggtaccggacggatgctgctgttcttttgcatggtaggaaggggtcgaaacagcggccggcctcacttgacctcggtagccctgggttccatggagccacgttttctccaagtttcgtgattggtggtgtggggttgatgaacaaaggacttggagcatcagtcatcaggtcagacgtgtttcatagtcctgggacgccgaactatccgcgccaccgtgcatcagtgttagggtgccataaagggtggagctctgagagagttccacatccttctaaaggaaataggcggtacccaggcagcagcatggcatttccttacagcaatgggaggacattgccctcgaaatgggaggatgcagagaggtggatcttcagtcccaattccagcgacgcgcttggaagaactacggttgctcatgctcggcgaccgaagtctaaaagtggccccctggggcctccaggaagacttggtggacagtattcatctgtttcttcagtgtcattgcttgataatgggagagctggacctattacagcaaattcaccttttgcggctggagtactaatgccggaacatgtttgtgaaggaaaaagtacaaatggaacctattcaagtagaccaattggtaacgaaatcaacattggaagaggagtcaaaatttgtccactgaatggtgggtctcatcctgttcgaacttccagagttcgccagcgattagattatgcagtcgaatcatctgtttcattgcctagcacgcaagaatctgtccaagacgagcaggttgaaatcacagaagattcagcttctactattgcttctataatttctagaaaagatgctgcaacccagaccagtccagagctaagtaggtcctcttcacccaacactagaccaacatttaatggttccttgtcaacagaacaagtgaaagagaaggggagctgtttgtcagatcttgatatcagggatgttcagatggatgatcgagtgactttgactaggtggtcaaagaaaaatgtaacacggtcgtctaacaagaattcaacaaacataatagagtggagcgaaaagacagtggaatcaaaatcttcgtcctggggctttgccaaagcgaagtgcatttctaagattgatagagaggacacagaaattactgcatgggagaatattgaaaaagcaaaagctgatgcagcaattcagaagttagtgattaagttagagaagaaaaggtcatcttcgcttgataagattttgaacaccctcaaatctgctcaaaggaaatcccaggtgatgcatgagcatgagcgtgatgcagtaacagcaaaccaagatggaaaaggctctaggaaggcaaaaaagagagcacaactcagcaagaatggccaaatcagttcactgagtggctgcttcacttgccatgctttctgatacatgtaattccaaaattgagaatcaggatccgacaaattccttcgcattccatgcaccaccttcatgttccccacatcaaaatctgggtgaagttcggagatccatcacatatcagtacataatatgatgatcccacagctggagattagacagagatctttcgaagatgctagctgcaggctccagctgctatgatagggacaatgccaaggggacaaataaaatgcagcacgaaggaaaggaggaacagtactgcgtacaccccatgtgcccgggtcgatgcctcctttatcattgtgctctgccttgtagctaggcactgtgaggctctgattgcaatcttgttgccaaagctgtatggatcatactaagagcaattccattgcacccaagggacagcaaaatcttgaggtcgggacggtgaggaggacgtgatgggg

SEQ ID NO: 36664 - DNA, 419 bp, Zea Mays
tccgcgcctcccccttccatccctcacctccttcgccatgccgcagccaccacctccggcggctggagcctgacctagatgcgatggacgacctcaatcccacgccgccagtggatttggagcgctggccctcactgtcgcggagcggtggcacaaggcggtggatatgcaaccgctcccccaatcctcgccggcatttagcgcccctccctcgctcatccacgcgcacgtagccgctgcgtcgtcgaccccgaccgccctcgcaagtccggtcgcgtcggtgctcatggaccggccatggtaggcgagatctgcggccatggtaggcgagatctgcggccccttccatggtaggcgagatctgcggccatggtaggcagcccccttccatatttgactgccatggcatgcactgcacc

SEQ ID NO: 36665 - DNA, 1322 bp, Zea Mays
gttccatcgtccgaacccaatgcctcgaaaagccttaaaccccgaccacagcctgtccgagtcacccgaccgttttccatcttcactcccaaccgtttcattcccacctaacttactttttccgatttcgactcgattcgtcattccaaacaggacaccgaatgcacgatcgatcccacaagccgcagccgccggaggctggcgagggcgccggcggcgggaacgtggatcgagtgctcttcaagaacctcgtcgagatggtgccgctcgtcgagtcgctcatggaccggagggtcaactcggcctactcgcgacgcacttcgctagtctacacgccggcgccgcccaagaaggcgagcgaattggaaagtgtcaaattgccacagagcgtatcggccaaaaagcggagagaccctggcgatgtatccaagaagagcacccctgattctaacggcgacaacggcttggttgtgccattgtctctatcgggtgctgaaaataagcccaaggatgatgttgctgggctgcgcgagcaggtcgattacctgcaaaagaaactgctcgagaaggaggaggcgctgaggtccgcggagagcctcgtgactgagatgaacgcggcatatgcaaccatcgatgaactccgacgcctggtgtctgacaaagaagctttgatcagatctaccaattctcagttgcatgatgcaaagattatgcttgcagacaagcaagcatctgtagagaaactggaatgggaggtaaagatgtcaaataaaaaggtcgaagatcttcaaggagatgtgtcaaatatgggattcgagataagctcgttgatggcatttttcgataaaatttcagagaatctttcagagtgaaattgacaagatcgaggtcgacaaaatagagcaggagaggattacctatggtgaagctctcgcggcagcgagagagaaccctgacgaggagcacttgaatatagctgccgaggcaaggtcaaggctgcaggtccttgtactatagtggtggcccccttctaattctagtgtatgtatgataatgttgaactgctgatgtaattttaccttgttggcttgagttgaggcgcttgtgaaatcgttccaggggtaatggaacgagcactgtatcttttttttttcctgaggtctgcattttttatcatgaagcttgagctatagttagattttttgtgacggttatcatctcaagatttaaacctatggttggaactgcttatgtaaattgttcttgagcctaaggtataggcaatagctttttaacagtgtataatggggtctgtttggtat

SEQ ID NO: 36666 - DNA, 2524 bp, Zea Mays
gctgtcaatcgcctccccactgcggcagatccgcaatccgctcctccaccaccgcgctcctcacccacgccagggacaagactgtctacctccacgcccgcctcaccaactccgcggccaccgccaccgccacgcccctcccccatggtcgtcgagtccgagtggtggaaccagcgacgcatgcgcgtcgagggcgacgtgaaataggtgctccaccgcgggcacaacgggcacagtggaggtggaacgagcaccatcgagttctggttccaccgaatccaccgctcgcacaccggatccatcgctcccacatgcccgcacaccggatccaccgctccctcccccgcgatggcctggttccaccgagacaactgcggggctagggtttggattcgtgggtggagcccaaggctagatccagcagggggagggaggtagaggaggggagggaactgctggtggtcggcagtgggcgaaggcgcgacaatccaggatatggattcctgagcgtcacccacccgcccatccacgtcgcgcggtgtagtcatcccctatccgcagccgcctcgctccctctcccacaacaaatccattctcctcctcccactcgacgaggatcgcgaggatgctggaggacgtcgtcgctgtcacgcttgacgttagggcctccgatgcttgacgttagggcctctcgcttgaagaggaacacaaacagagctcatgttttttattttgctctgcattatctactgcttctctgtgggggcgttatttacagtatgtggcctgtttgttgtgttgttcctgcggaagggcgggcgggccgaaggtgtttaagaaaatgttgttgtcaacatcaacctcctggaagggccagaacgcaggcagcgcctcaactcgtcaccccatcagcacggatgattatcacgagtacttcaagcgctcattttaggaagacatcgctgcgcaagtgcctcaaggagtggaatgtaccggtttttggttgatggtgtctggaggtgtgatgagacaaaaccctttgtacgtgatgaatatggactgatcagcaatgaagtgcttgtggaaaacaatgtactacccgttgtgcagccagagccttctatcagaggaactaatatggataaggatgcccctggagccatcatctcagaacccaagcatgcaaatagcagttatccgccatgtggtctctggaatattattacacaataccatatatgacgttgttcccctttctagcaagggtcttgctctggttcctttttgggatgaccgtcagggaaccataacaggcatgctcactgcatcagattttgttttaatcttgagaaagttgcagagaaacattcaagttattggcaacgaagagcccatttctgcttggaaagaagcaaagctacagttctatggtgggcctgatggtgctgtcatgcagagaacgccattaatccatacaggcaacattgatctcagggccaagaaagaagctcaactcggcatgcttcctgtttgaagcaagggcaacaaacttaccccaccagatctctgtcgccaaagcagggctagtgaataagctgtgtttcctcccggattgtcactgcttttatatttgtgcatttattttgagggaaacattttgcccaaaaaaggcctgcagtgcacgttttaaacaagtcatttgaaccaactcttatgctgaaaactgtatgtgatactgcagaaggcaacacactagcttgataggaaagttggttggcaagcataggtggactctggtgccttcatatatctatatatatattttaagttgacgatcttcgtgatgctgaaactgatgaagacctccgatgaaaaaagagacatgctgcacatgcacgagggtacttgcagatcgatgtcggctctatggacgaacactcgaccaagtcagatgaggagtatgagggcctagccatgcgcgacgtgatggctactggtccgacgatgagcagcaagctgtgagttaaagatgaactcacctgccctggagagtaacatccataggagtgaggcaaaatggctggtaccaccacaacatggacccgttcctgaagatgtccaaggaggtggtagccgacaccataatgtcttgtgtcattgtgtcaccggtcggcaacacactgcgctggtaccggcgggtgttgtgtttcttaggcgtctgcttctgtgctttgagttgtgctatagagtggttgtgccaactactgattttaaaagaaaaaggtgagctgagaatcattgttgaaaacaaacatgtaattgttcgttctcatcagttgtgccaactaccaagcatttcattgatcagaatttatcgttgctcatgagaaccaaaagtaagacacttctcaataacattggatgcaaatttctgctagcttatcttcactatcttttctcgtatcaatataacacacatttatacataatttttgtgttattatatgttttcgttgcaacgcac

SEQ ID NO: 36667 - DNA, 829 bp, Zea Mays
aaggcaagcggatttcattctagttctagcgctttgtcttgctggcggtcgtgctcgtgcacctagctaatggaccctgtgccattagccggttgggtctttgtggtagaggacttccgctttggcaggaggcccagcccgactagggttctgtccaccttccagagccctagctccggcgtctctagcgatccccaaaacccactccgccgcatttctgccgacttggccggattggtcgcttattgagatgcaactgcccttgctggccgatatggcgtccaagcttggcaagcttataaggcaaggcctatagttccaaggatgcggaaattctatgaaggtggctttcaacctacaatgaaccgaagggaagctgcattaatccttggtgtcagggaaactgccaacgcagagaaggtaaaagaggcgcacaagagggttatggtcgccaaccatccagatgctggtggaagtcattaccttgcgtcaaagattaatgaggcgaaggatgtgttgtcagggaaaacaaaaggaggtgggtcggccttctgattgtagaattaagaatgcactctctgctagaaggataattttgtgcctctaaatttagcattagaagatactgtagaccgcagtttagtcttggtattgcgaaaatttctgggcaaagcatattgggccttctgtgaagtagttatccagtgcttattatttattaatactctcagctgtgcctgcttctataaagatatacatgatgaaggttacatcacaacatgtttcttcacaactaagtctcatgtcgtgggatcttcattgctcttcg

SEQ ID NO: 36668 - DNA, 2109 bp, Zea Mays
gcagctcgtccgacgcgccgcagcgggcgctgataaacctccagttaaaccctagtatctccccgcgtcgccgcacacatcgcccgttcgcacgcgccgtccccctggaggatcgagccaccctcctcacctggaatggaggacggcctggaggagccgccgcccgcggggagcgcggccgccaacgccagctccacctccggcggcggcagcggcgggagcaaggggtccccgtgcgaggagtgtggggagcagccgtggaagtaccggtgccccgggtgcggccgcctcacctgcagcctcccctgcgtgcaggcccacaagcgccgtaccgcctgcacgggcaagcgcccacgcacggaccccgtcccgctcgcccgattcgacgacaaccagctcatatccgattacaacttgctggaggaggtgaagcaggcccacgattccgcgcacaggctcatcggcggcttcggccgcaactacgggggacggggatcaggcggcgcccagctgcccagatggctgttctacctcagcaaggcggcgcaccgccgtggtgtcaagctctgctttctccccaggggcatggccaggagagagcagaatcgatcgcaacacaattacaggaaggattgcatattctggacacttgagtggaaattcaattcaactgatgttgtcctaactgatcatggatgagcacacaaccttgctctctctattggaaaaacatcttattcctggcccttggaaagatcagcttacacaatatcggaacaccaaattacatgatctgaaactgttcattcaaaagtgtgccaagcaatcagagtcaccgtaccgcctactcaatatagaagagccattgcgcccacagctgaggggtatacttgttgtggagtacccaactatcaatgtatttcttccgtcagacaattgtgactttgaaatggagaaaatggtgaacagacttcctaaagatggaaaaggccctggcagcatgactgacgagccacctgtagagggcagcaagtttcatgaggaggaaatagaggaaggcgaactttcacctgaaactgagattatagatctcaaggaccatggaacttcaaatgcctgcaaaatttctccagcagatgttacaagtgaatcaaagatagttaacaatgtcgattcttctgtgctctcataccccggttgtcaagctcaagcattacatggtcagccgaaaggactgaatcaatatagcaagatatcaccaaatggtacctctgggcctgcagaaactaaatcccgcatggaagtctgtcctctggatatggagaagacaagggaaagcgggttgtcctcagagggacgcgttgtagatctgaaggggtatggaatttcatatcctgtcagcactgcagaggcaggaggtgcagctctatcgaagatagacaccaaggcaacatatcccttagtaccatcttccaccagcattgtagtatctgatggcgcgacgggtcctcagctggaacacagtcagcaaaacaaacggacgccaagctcgactcctgaagcgctgaaaaggaaatcttgcatgaaagtttatccgctggacattgacgagggattgttccccgaggtacccgacttggcctttgagcaagagatgttggatacctacccagagctcttcgagaacatggatgtcgatgacttcttaagctgcgattttgcaatggtgaacagggacgaaccagtagatgcaacgtctgggttaccgagggacgacttggaggaaggggagattccaacattgtgaaggaagaacgtgatgcttcacaggatgttgcactcgagcggaagagtctgtgtcgtgcttttctaggacatgtcatgcgacgtaatggtagaacactcacatgtacctagcttgtatagctgcaacttgaaactatgcagcctcttttattctttatcgttttctttagtctcgctgttgtgttatgtagctctgccagagcagcaagaaattttggggttctaattttgtaagagatgatggctgtttggggatatggatgtcgaggatttctcaagctgtgcaatgatgaattgcgatgg

SEQ ID NO: 36669 - DNA, 553 bp, Zea Mays
ccagaaactgctaatactgctgctgttcatcactctgaaaaatctgttttttggacagccacatacccggattcaaacgatgataacttttaatttataactccaaattgagcgcataaatactcgttggaaaggtaaaacaaagttctacaagatccccaaattgatccccattaattcttcacgaaaaaaccctaaaaactgctagaacttccgctgttcatccaccacgtaaaattctggacagccccctctatctaatcgcaaacgcaacatctaatcaattgaatcgcagcgcaaatgaacaagggatgaacaaaaaaatcaccttgggttctccccctttccttcctcccttcttccctccaccaaaacgattggagattcgcaccacgagacgatgatccgatcggcaaggattgacaccttgggaggaggggattgagggggggcggctagggtttggtggctgcaagaattgagagaggaggagatgggcaggggggcggcggccaaggggggaaggagaagtgggggggcggctgcacatggg

SEQ ID NO: 36670 - DNA, 1361 bp, Zea Mays
atcgcgactacgctcacctacccattccactccgccccaccactggtcaacgaatctttcctgcactgtcctgtccgccgccgctcaacctcatcggaactccactcctcctcacccccacagcaactcccacctcatggagaaagctgcgcacgttgccgccggcgcgacgcaagagcaggaatcgtctccgaacagtaacaagaatcatgttcaaccacaggcttgacgacgcagcgaggcatcatggctctgctgaagcgattcctgaaagacttgcggtggtcacaggaggaaacaaaggagttggcctagaagtatgccgccagcttgctctcaagggtgtgacagttatccttacagcaagggatgagaaacgaggaaaagatgctgccgagacccttcgccgtgaatgccaactcccaaatatcatattccatcagctcgatgtcagagatgatgatagtgccaccacattggcccggtatgtagaaagaagatatgggaagctcgacatcttggtgaacaatgcagctatttcaggaattgtagcagatgaggaaggcctgaaagctcttaacattgatgcagagacatggacatctggcagggcagctaatcttctgaaagaagtattccagaataccaatgatgaggcattcaactgtctgaataccaattactatggatgcaaacgggtaacagaagctcttcttccacttctgaagctatctacatcaggaggagcaaggattgtcaatgcctcctcacttgcgtcggagctgaagagaatgccaaatgagaagctgcgaaacgatttgagcaacattgacatctgggacgaggaccggatagaagcagtgctcgacacattcttggaggacctgaggagcgggcggctggaagaggctgggtggcccgtgatgctaccagcctacagcgtatcgaaaatggtcatcaatctgtacaccaggatcatggcaaggaggtatccggagatgcgcatcaactgtgtgcgacctggctttgtcaagacggacatcaactggaatctgggggtcctgacgcctgaacaaggtgcgagagggccagtcatgctagctctcctccccgatgatggaccaactgggtgctattttgatcagacagaaatggtgaacgtctggtgattgaatatttgtcgtctgctagtttattttagaactaaaccgctagaaataaaaaagagcggatggagtgttataactttcctgaattcatgatgacataaacacatacacatggtaaaacgttcttatgatcagttggtgtagtttccatatgtcactttgaatgatttgttgttctttgttggtgttgag

SEQ ID NO: 36671 - DNA, 1681 bp, Zea Mays
aatcacgaaaactgggttggagccgatggatcgtttctatcctcgttttcctccctctcctccagatccggtgctcctctccgccgcctccctcccgcagctcccatatttttccgtcgctcgcgcgcccgacgcctccctcccgcgctcccggagcttatgcgcgccaaatctcccgccagcatctccttctcccgcgcacgcctctggctttcgttccagaccaggctccggccagatgagaacgctccaccagtagctaggcttcattttcctttttaatggctcatttccatcccctgatctagcgctaaaatttagtccccaattcatctctaaggaaaatcgagtttcagatggatttgttagggaagggtggtgcgcaacaaaagaaatcaaagaagtcttctccaacctccagaaaatcaactgttgttccggccatggcatctgcaggcagtgcaggcgttgcagctccaagcacgggtggtcgaagtagttctcatccattttctgtggtttgggatgggatggcacttggaggctcattcgcgtctgaatcatctcccaccagctctgaatgaagtacatgattcaattgacattgacgccgatgacaccctagagcctgctagaactgacaaacgattgaattggtcacatgaagaagatgttagattggttagttcttggctacaaaattcactagacccggtcgatggaaatgataagaagtcagattattactggacagatgttactaatacgtacaacagcaccacgccaagtaaccgtaggagaaaccgtaaccaattgaaaattcgttgggaccgtgttaagaaacctttaagtgagtttcatggctgttgggtaaggaccactagagtgttccaaagtgggcagagtgatgaccaaaggacagataatgcattgcagctatatgcatctgaacataatggcaagcctttcttgctgcaacatatatggagagtagtacgacatgaaaggaagtgggctgcatatgtggacaaacttattaatgcaaaggacaaccgtgcaacaccaagtcctgttgtgaatgtagaagattcacctacaaagcgtcctactgggaagaaaaaggccaaagaagagcgctttggaaaacgaaaggcaccagaagctatttctgcaattggagagaaactagaaaaattcattgaagcaagcagcaaggttgagaagatggcacaagtgcaacaatgtttggctgacaagaagttagaagtagccaagattaatcacaaagcagcccaagaacaaacaaagtgtaaaatgatagacctttataaagatttattgtgtggttccacggctggtcttagtgaagaagctctagctgagagatcaaaagctttagagtgtatgagattgtctttatttgctccagataattaaggagcttgatcggaaggtttttatatgcacatggagaggctggatctgtgcatggagaccgaacctgggtgtgctaatgttcatgtcgatcaaaagttgttgtccatctcagatctttgctatctatatattaagagaagtttgctataattatatattactatgtattatggactacattatatttatcaacatggatactgttttactatggattaatatattttaatctatgtgttgctat

SEQ ID NO: 36672 - DNA, 488 bp, Zea Mays
acaagtagcagcatttcatgtgacggttgacaggtgtgccttttactgctgcagattcctcggctggcaggaaccaaacaatcactaatgcaagtggatctccagggccatgtgggggagtgctagacgaatggaatttgatagggatgcaaagattcttcgaaggaactttgtaattgatctgttaagttacgaggacaattcatgccgctatgctatccttgcaaacatacaataaagacttatcaatatcgcttaaaaggattagattaatgtacggttgtcgacatatttgcttattattaaaatttgtaagacatcacattttttaattgaggttgcatcaataaacaggttgatgtagaccaataaggtttgtgtgtggtttacatgttttaaatataaatatatgtgggcagctagcacatctaaggtgccgtttggttcatgtattggtaacgtaatggataactgataacgttaaatca

SEQ ID NO: 36673 - DNA, 2321 bp, Zea Mays
cacggactccgacactccgttcaacccccctgcctttttgctctcctgttcaccccttgtgcccgcgctctctcgtggcgacgacttgcgcgaccgccgccaacgccaggcacctaggtcttcgtcggtcctttcttcagagacgagcacccaacagttcaaatgtgagtttgagtgctaaatgtaaggcaaactgcagcaggattttgttgctgtgttatgtacatgcacttactgaagtgcccttaacgactgtctttatgcaatatgcttatggggctacaagattggttttgatggattatgacaagtctagaagaagtaactccaagaagaggacacattccaattctgatgacggaaagagaaaacggttaaacactaggcatgatgacacatctatgttctctgagccaattgaaaccatctacaggatattgtgcccggtaaaaaagataggcagtgtcttgggaagaggtggtgacattgttaaggcccttagagaggaaactaaagccaagataagggttgctgattccattcctggtgcagatgagagagtaattatcatcttcaattaccaaaatgagcctgaaccgactgatgaagcagctgaagaaaaaaatagtgatggcttagggaacttcaaatcccattgctttgcccaagatgcgttattgaagatacatgataagattgtgtctgatgaaattcatgatgaagtcgccaatgatgaaaagtctgaaagtgcagatgatgtgactgctcgaattttggttcaaggcaatcaagttggctgccttctaggaaaaggtggctccattatacagcaactacgaagtaatactggtgctggaatccgtgtcttgccatctgaaaaccttccccagtgtgcacttaaaagtgatgaactggtgcagatatctggagcaccttcccttgtaagaaaagctctatatgaaatatctactcgtctccatcagcatcctcgtaaggaaaatagacctcttgaagaaataatagatgcaagcacacaaaggaaacgtgaatctccaacactacaacatgaatattcaatgttgccgcacctgcatagtgatcatacacctccaatacccctgcttgatccatatagaagtggaccacaatatcctgttactgaaactgaagagttctctatcagaattctgtgtgcttctgagctcattggttcagttattgggaaaagtggggccaatgttaggcgtgtagagcagcagactggtgctcgcattaaagttcaagagatcgacaaagatgcttctggagaaaggctgatcattatttcatctaatgagataccagctgaaccaatatccccagcaattgaggcactcattttgctccatgataaagttagtgcaccctctgagaaacaccattcaagtacaaggcttgttgtaccatcaagcaaagttggctgtattattggggaaggtggaaaagtgattactgacatgagaagacgaactggggctgaaattcgagtttactcaaaggcagataaaccaaaatacttgtcttttgatgatgaacttgtgcaggctgctggacaaattcatggacgtgaggattacagagaaccgacaagtgctaccggaaggttcttgagcactattgaactaaggattccaaatagttctttggggtctatcgtcggtgctggtggggtcaatctagcagagatccgtcaggtttctggtgcaagactgaggctacatgaggctcatgctggttcttctgagtctgtggtggagatccagggcacactggaccaagcaaaagctgcccagagcctcctgcaaggctttattagtgcaaacagccggcagcaacagcagccctattcttctcgcatgccactttacccaagctggggatagcttctggtctcatggtcgtgtcagaggaaaacagagtcagcagggtttgtcatgtggctgtagatctcggactgcagattagctgtagcgatgatgttgttgaaggaggctgtttaacagtgcaagcaagataacttatacttatgccttaggacaagtaatattgttttcctctgatgaaatacttggtaacgatctgtctctgtatttttatatttgattctgaatgctttgaaccctagtgttacaaaagctgctattttgaggtcagactacggaggccgaataattctgttatctgcagaattgggcaaaaaagcacatcttgctgaggttcctatgtcttcacccatatcgtttcatattttgtccagaatattggaaaccctaactctagaa

SEQ ID NO: 36674 - DNA, 425 bp, Zea Mays
tatcgtcggtagtttattctattctaacttcaaggtaaaaacttttcttcgacttttcattgtttttgacgacgaaggtgtttgctgacgaagcttgcttctactcagagtatgctattaagcaaagctttgaggatgcaacaggaccttgaagacaaaaaacatgagatcataattgaaggtttagaaagcaaaataaaagatcaagcagctgttcttgaaaagaaagatttcgaacttcagacaatggaaggtttactggcagaagctgaagccaaaattgcaaagttagataaggagcttctctcaaaatcagaaagcttcgaacaagaaaaatagagatttgatacgaagtttgaggctgaggtcgaaaaaagttcaaatttgcaaaaatcattgaaagaacttcaagataaatgtctaga

SEQ ID NO: 36675 - DNA, 2452 bp, Zea Mays
ccattttcgagcgcagaagcgagagagatccggagcagccgcagtcccaccgacctcgccgccggtcgccctccatctcctcgccgctgcctctcgtgacgacgagtccctggaggggctgcagcaggagcttgacaactgcaagaatgaccaggaagtcgcaaacattctagccagtggcatcaaactgcgcgagtacacaaaaggcgtcgagaataacatacgccaaatcgagctggattctatccaggattacattaaggaaagtgaaaatctagtttctctgcatgatcaaatttgtgattgtgacaatattttgttacaaatggaaacagttctgactggattccagacagaaattggttccataagttcagagataaaggtccttcaggagaaatctatggacatgggattaaagctgaaaaatcgctgcagaatctaaattgtcaaaatttgtcgaggatataatagtacctccaagaatgattgacataattgttgatggagaggtcaatgatgaatacatgaaaacacttgagactctaagcaaaaaaatcaaattcatcgatgctgaccccatggttaaatcatccaaggctctaaaagatgttcaacctgaggttgagagactacgacagaaagccgtctcaaagattttcgagtttgtcatccaaaagttctatgccttgagaaaaccaaagactaatattcagattctacagcagagtgttcttcttaaatacaagtacacgataaatttccttaaggaacatgctaaggagatatatgcagaagttcgtacggcgtatattgacaccatgaataaggtgctaagtgcacatttccgggcttacatacaagcattggagaaactacagatggacatagcaacttccactgatttgcttggtgttgaaaccagaagcacaggcttcattttctccattggaaaagaacctctgaaaacccgtccttcagtgtttgctctgggtgaacgaataaacattttgaaggaaatcgaccagccagcattgatacctcatatagctgaagcgaagtcacagaaatactcgtatgaagttcttttcagaagcttgcagaaacttcttattgatactgccacttcagaatacctgtttactgatgatttctttggcgaagaatccatattccatgatatatttgcaggaccgattcaagttgttgatgaacatttcaatactgtactcctgaactgttatgatgcaattggcataatgcttatgatcagaataattcatcagcaccagctcatcatgtttaagcggcgaatcccatgtttggactcttacctagacaaagttaatatgtcactctggcctcgcttcaagatggtgttcgacttgcatttgaacagcttgcgaaatgcaaatattaaaacactttgggaggatgatgtccatccacactatgttacaaggagatatgctgaatttacagcttctctagttcatctcaatgttgagcatggggacggtcagcttgatctaaatttggagcgattgcggatggccattgaggatttgcttgttaagttggccaagatgttttccaaaccgaagctacaaactgtctttctgataaacaactatgatttaacaatttccattttgaaggaagctggaactgagggtgggaaagcacaacaacacttcgaggaggttcttaagagcaacatcgcaatatatgtggaagagttgctcctggagcagttcagtagtttgatcagattcgtcaaatctcgtccagcggatgagacggctgcaaattccgagaaagccagcattgccgaagttgagccactggtaaaggatttcgcgagccggtataaggccgcgatcgagctgatgcactatgatgtgatcacatctttcagcaactttctttgcgggatggagatcttgagagcgacgctcgcacagctcctgctatactacaccaggctctccgagtgtgtcaagagaatcaacggcggctctgctctcaacaaggaccttgtctccatatcctccatcctgttcgaaatcaagaagtattctaggacgttttagttgtttcacccccttccatgtacactaggacggctagctgaggggtagctgtgtatccttactttgtaactggtatgtgcgactgcaggggaaacaagggcattttgtcgtggtttgtatcttcgtctgtgttacccgacttgacccctgcccctttccagcacagaactatgatctctaggctgtctccacagttatcctattctatcttctgtcctatcatctattttaaacttcattttgtaaacagtatcgattatagtgcaaatctacaattttatacgatccgctgtggataaccatatgctgcatactaatgaatgcgtaccaaacgcttgccttaatgttatttttatgac

SEQ ID NO: 36676 - DNA, 3950 bp, Zea Mays
cgcccactacctcccaatcccaagtcccaactcgctccccattcgcctccctcccacccggctcctgtcctcttcccctccccaaccagcctccctcaaattcgccgatccccaaatcccgctcccctacaccacggtagctgagaagacggccggcgaagatgatgttcacggagggcctcgacgagtcggcgatcagctggatcaagcagggcatggactccccagcctcagccccagcccccgcacccccacggtccccgctgtcggagcgcccgccgctgggacaggtggcggcggcgccgaggagccccgcgctgcacgccaggccgtgcggggccggcgcaggcgtcggtttcttctcccccaagggcctcccgcaagtgcgggtgaacgggacgcaccactcgggcctgctcggccgccactccgtgctcctctcggtcgcggactccgatgagtgggaggacgagagcgtcgcatcgtggggcatgcccgaggactgctacggcggcggcaacttctccgagaccggcgacgaggcgtgctccagcgactccagactcatgcggagggccatggaccgctgcggcggagggtgggatgaggaggtcacgtcgcagctgagcaggaagggcggcggcggcgggatcgtgcgggggcagtccaaggagttcctgcgggtggaagtgcgaggtgcgggagcgttcgatgccgggaagtgctccggttccggggcacaacatccagtggactccatctcgcagggacgctactttgaggagcaggtattggggactcctagtgcccctccaattgcaggggtcgaggaggatgttatgtttcatgcagttggtaaggacatcagagactgtgatagaaattcattgatttaacttgtcctggaaatggtgttttccttggcattcatatggtattgcaaacagaaagggctgaaatggatggagggcttgagaggaatggagtatcatcagtagcagatatactggcccaagatgttcatgagcttcatacgagctcaattgttcatgaagatggcgttgagaataacttattagctcagataccgagcttcactattaaaatacagaacttcttgcttcatccaaaacacaatagtcaagttgatggtaaacaaatgtatgataaggatggaaattgtactataaagggaaggaaacttgttaaacagattgagattgaagtaaaaaagatacgggttgtacctcaaagaccaaagcttcgagcaacatcatcctttagaaatctctacatgcaagctggcagtgagtatgtcagacagatttctaagattctgaagagccaggttacgatgttgacatccacatcatctacatctttgccggaagaaatgttcacatgcactctagaactgcaaagttcttgcaaaggtcataagagagattcaatttctccacaatatttgaagccagggactggtgaatctcaactcttttatctagagagccagggggatgttattcttgttgaagtacaagacaacaatagggttgtcataggccgtgcaaaaattcaagtttcatcattgactgatactcaacaggatgaaatcatcaggtggtggcctctatatcttgatgatcaagattgtgtcggaaaagttcagcttggtatgaatttatccatgtcttccaataactatgggtccgaaaagatgctgcaaggtggccctgcagtggataccatcatatatgacatggttctggaagcggcaatgagggctcaaaatttcaacagcaaaatgcttcatatcaatggtccatggatttggctgttggacgagttttctgattactatggaatatctgatgcatatagaaaattgaggtacttgtcttacatcatgaacgtggcaataccaaccaaggattgtttggaacttatatatgaacttatcgttccagtcacaaaagcacgagaagatagaactttaacaagacaagagcgaagtattttgatagactgtgaagatcggattaagagtctccttgcagctctgtttgaaaattacaaatcactggatgaatattctccaactggcttgtcagatttatttggccccataacagattctgctgcaccagctttggcacctgctgttcagatattcagtgtactgcatgacattctctccaaagaagcacaagacatacttaggaactatttgcagattgctgctgcgaaaaggtgcaggaggcatatgatcgagacagatgaattcttatcaagcaataacgacagtcttcttacggaccctatgactatatctgctgcatatcttaaaatgaagacattgtgcattaacatgagtcgtgaaattcaagctgacattaagattcacaaccagaatatacttccaagttccatagatctgccaaacatagcagcatccctatatagtaccgaactctgcaagcggctgaaaggttttctttcttcaagtcccccatcaagaccagtacaacatgttgctgaactgataaccgcaacttctgagtttgagagagatcttgaatcttggcaagtgagacctgttcatggcggcgtaatttcgagacagctctttcatgactacatcatggtgtggattgaagacactcgattgcagttacttgataattgcaaagctgagaagatatcatgccctgccgtgtcaacagtctcgccatttgttgagcaaatgtatgagcaaataaaagagagcataaatgagtatggagtggttatcaatagatggcctcaatatctgatgagtttagagagtgctgttgctgatgttgagagagaaattatgaaggcactggagaagcaatacatggatattctaatgcccctaagagatggcataccagaaaaaattgagaagcaggtccagagattaacaagaagacaatctatagctccctatgttgtgccaaatcagttaggagcattcatgaacacagtaaaaaggatgctagatgtgttacactgccgagtcgaagacattctcaagtcatgggcagcgtaccttactatatcatgtgggaacactgtttttggagagcaaatgaactccatcacagtcatgctgaagaagaagtacaagaaatacctgcaagcgatagtggacaagcttgtcagcaacacacaagctaatcggaatacgagactcaagcgaattcttgaagaaacaagagaggctgatggtgaaagtgatatacgagataggatgcaggctgtccgcctccagctctcggattcaattcacaatctgcatgaggtcttctccagcagaatatttgttgctatttgccgaggtttctgggatcggttaggccagattgtgttgagatttcttgagagcagaaaggagaacaggatttggtaccgaggatctgactatgctctagggatccttgacgatgtctttgcatcggagatgcaaaagctgctgggcagcgctctgcaggacaaggacctggatccaccgcagtcagtgattgacgcccgctccatcctctgctagggcgtgtggcaacagttttctctacagattgcttcagcaaaaggccggcgttggtttagtttttgttttatatatattccttggtgtgcagaatatgtacagatggagacaaccgattattcctgttcatagtgttttgctgaattgttcaaataaatagtggttaaaaaaactgtagcccgtaaacaggttagagaacacaatctgtacttgattgtgtactttctacctcagttcttgccttccccatctaattccatccaaatattgtaccctgaattgagtgaaccttgatacaactgattcttgttggctcatatgtgttcaagcctgcaatttggagaacatcttttccccaatttacctcacctgtgccatg

SEQ ID NO: 36677 - DNA, 2645 bp, Zea Mays
tgggtatatagttatatacacattacaggctgcagtgcagacagggcttgctggcgcctagtgtgtgtttgtgcgtcttctgccttctgaaggcacgcacgcaccattctgccctcctgctctctccccctcctccttcccactcctgtctctccccgtcctcctctgcttgagccttgagccattcagcagttccagtcagtttcattcattcgcaaggtcggtgtctggagagaagaagagaaatggcggcgctagagaggagaggaggccaccacactgctgctttcatcagagcagcgaaggcctccagtcctcctcctcctccagcgaggcagaggcagaggcagaggcgctccaagagcggtgccggtttggacgacgacgacgacgacagagatgccagggccgcgccgcgttctccgcagaaggcgtccagacagaccaagctgcaagagcagaaacgcgaggccgagacggaagttcagcggcgcaggaggaggagcgaggcacacaactccctgaggaaagagattcagcagctggagacgcgcctcagggatcagcaggtggtgcgcggcgcactggagaaagcgctggggcctgagcctgagcctgagcccgacgacgacggcgctggtccacgtccactcactctccagaacgagagcccagcgctaaagctgataagggaggttgcgacactggagctggagatcaagcacttggagcactacctgctggcactctaccggaaagcattcgagcagcagcaagcacccaccaccaccaccgcgctgccgccttcagacgatcgccgggacgcggcgcgcaagctgtcggtgagctcacggcccgacgacgagacgcccagggcgagggcccccgtgatcaggggaggcggcggcaacgggaggaggaacggcggcacggccgacgactgctcgccgtcgtcgacgtgcccccggaggacggccgcggactcggacccggccggcctccggagccagtcggcgctgtcgttccgaggcgcgtggtcgtcgtcgtcgtcgacgtcgtccaggatatcgcccacggaggacagcctcgcgcgggcgctgcggtcctgccactcccagcccttctccttcctggagcaaggcgagacgacggcgccgtcaggaggagtggtgagcctggcggactacctcggcacgagcgtggcggaccacatcccggagacccccagcaacctgtcggaggagatggtgcgttgcatggccggggtgtactgcaggctggccgacccgccgctgctggcgcgccaccgcccgtcggcgtcgtcggcgtcggcgtcgctgtcctcggcggcgagcgcggtctccccaacacagtgcctcggcggcggcgacaacaacacgtggagcccgaccagcagcagcagctaccactgcggcaggagagacgccgcccggctagtcatcaacccgttccgcgtcgagggggtcaaggagttgttcagcgggccctacagcgccatggtcgaggtgccggcgatctcccgcgaccgccccaggctcagggaggccgaggacctgctccagacgtacaagctgattctctaccggctggagacggtggatctgaggcggatgacgggcggggagaagctcgcgttctggatcaacgtccacaacgcgctggtcatgcatgcgtacctcaagtatggagtcccgcagcagaaccagctgaagacgacgacatcactgcttgtcaaggcggagtgcaagatcgcggggcgcgccatcaacgcggcggccatccaggggctggttctcgggtgcacggcgcactgctcctccgggcattggctgcgggctttgctgcgctacccgaggacgacgacgaaggcgagccggcgggcgagcagagccgggggcgaggagtggcgagccttcgccgtccgccagccggagccccttctgcgttttgcgctctgctccgggagccactccgatcccgcggtacgggtgtacttcccgaagcggctggcgcagcagctggaggcggcgcgggaggagtacgtccgggccacggcgggggtgcggaaggacgaccgccgggtgctgctgcccaggctgctggacgcctacgcccgggacgccggcctcaccgcggaccgcctcctcgacgccgtgcagcggtgcctcccggagacgctgcggacggcggtgcagcgatgccgccgccgcggagacgggcccggtgccgcgaaggcagtcgtcgagtgggtgccccaccggcggagcttccggtacctgttggccagggacctcgccttcccgcacctcagcctcagctagctataagctgcacgtacgtcgtgaagatgattcctcgtacggtgactagttgaaagattggtagttgtggtggggtgtggatgacttgatagattttggttctagattaatgataatgatgatgattgcacatggtccattaggcacgggcattcttcatcttaatttgcgtgtgtgtgtgctgtaaacagatgacacatcgagcttagcttgtagatatagcaacaaatgaaagagataaactaagtttgtattattgcattgtacaccacaaaagtaatttcacgagatgatcaaatggct

SEQ ID NO: 36678 - DNA, 753 bp, Zea Mays
gacgtctccccttgtttctttacccttctgcctcatctaatttcttcctactcgctccctccgcgtcgtccttctcccggcgccggagcaaagcccaccgacgtccgctaagtcatggcaccatcgccgtcgggagcagcgactttggttcgtcagtgtccctgctcccctgcgcgctttgtcccagtgttgcgtggtggggaaggagaaaagtggtggggaaggagaaaaggtaccggtggaagatggcgctgccgcaacgacgaagtggggagcagttagccatggagtgggatgcgcagaggcggaggaaactcccactgataaaggtaaagagaaagcttcctcttcaatctcctccaaagaggttcaaacaaggatcatccatattcaaagattccacagaccaaaaagaccaagaatgatttatgcaaccacacgaagctaactgagattcaaccattaaatacattgcaccacctttgttattgatcctacccttttgtaactaaatataatgctcgcaagtataaacaacccttcctatgtagtactaaacaccaagatcagtttatgtgatgatggaccagttttcctatgtggtactaaacactaggatcagtttatgtgatgtaggatcagtttccctatgtggtactaaacacctgtatcagattatgtgatgtaggatcagtttatgtggcgcagctcatatctattttgacatgaaaactatgtcatataacccggcgt

SEQ ID NO: 36679 - DNA, 1690 bp, Zea Mays
tgttcacagagcaattttgaatttcaatccctccaatctgtgattcaaagcctcagcaatagcaaacacgttgatgggagttctgaatgccgcaccagtcatactgaatcatgtccacattctgaaaatacagcagatactaattcctcaggtaaagaaacgtccagggatagatcatcagctgctagtttcacagaggaagcaagcaacagtcagaaatctcagaaagtgcagcagtgtgatactgattcaattcaagttatcaatccatcaccagacgagtcatatccccaggcccaagttgaaaaggtcggtcccaaagatggcttgctttggggttctagaaaacaaagagtaatgagagctagaaggacacttctgaaagctggtgatagtagtggggatggtgagcctacatctacagcatgcatacagggggagggtttgtccaaaggctgcatgaagaacttcaaaactcaaaacttagaatcagttgttgtgaagaagggtgtgaaaactccaaaggtagaatctgatgtgatgaataaggatttgaaaaccctaaatgtaggatctggtataatgaagaagggcttgaaagctcccaaaacagaatctgatatgatgaagaagggcgtgagaacttctaaagcagagtctgatggtatgaagaaggggatgaaaataccgaaagtagaacctgatgttatggactggaaaactcccaaagcaggatctgatgttacgaagaagggcttgagatctccaaaggcagaatgttgccagcctgtgattgagagcgttaaactaaagctggcagagattttgaatactatatcaactcaagatgactgcaaaatgttgcaacaccaacttgatacccagaggaaaagagctagatataagaagatgattcgccggcatatggacttccgaatgcttcactctaagatcaagagtggcgcaatctctggcaccaaggagcttttgagagatatacttattttcatcaataatgtaataaccttctatccgaagactacattagagcacatggctgcggttgagcttcgtgactttgcactctggggatgcaagggcaagcaaggtttcttcaagggatgctgctgccaaggaaggggatggcaagagaccttgcagtgatgagctggctaatcaaaagactacaaagagaaatgagccagccaagaagaggggtgtgggtcggcctccaaagagtgggcagaggattgctggggcacaggaaaatagccccatcaaaggcaggaaaagtagcgctggggcacaggtagatagccccagcaaaggcaggaagaggagtgtggaagcacatgatgatagctccagcaaagggggcaagaggagccggcggtgaagctaccatcagctcaatgccggtgaaactgtgtacagcttaaccatatatcataggctgttcccttccggtttgtttacctgacaaaaaaaagttattgtcccagtattcaaactgatgtaacaggaagggttagttgtttctgatgttgttttgtaaggagtaaggacaattagaagggaaccctcatttttatattgagattatccgagttaggctatacatatctgaccatgtaatgcttatagtagtttaagttgttataccatgtgaactgatgcttgaacaccgaag

SEQ ID NO: 36680 - DNA, 2377 bp, Zea Mays
caagcatgtccgaacaacatttctgggtgcactttgacgccccttgatctctgtgatgtaacaaacgagataacactgccgaaccatcagggttctgttggtccttctactccttcaaatctgaattccaggttaccagggtctcctgctatggttttgggcaacaattcaccgttcccttcaacattgagtagtcctagggatgctcagaaatatggtgttcccagacctatctctttacagggtgatgagcaaccaaagattcagtataatcagatggtcaatgacagaaatcttcatgaacctggagtttctgctcctggaactactccttccggggttgattgtggtccaggtgccctcatgatgccatctgcccctgctatgggaacagtggcaggactaaatcgaggtatgcctggtgccaagccaggctttccaaggattagttcaccagtaatgttaaatgctgttccatctggaaatctgtttcccaacagtgggcaaggtgtgctcaacacagtaaatgtccatcctggagccatatctggtcctggcaattcaatcttgaggccacatgatcctatgcaaacatttcgtcctggtcagggtatggaagagcataggcagatgtcggagtttgacatgccggtttcacagggaagcggccaagccactatccagtttagcagcatgaattcatctttctcgagtccacctgttcagcaaccccaacggccacatcagatgtcacaatcgttacacatgtttgggaatccacaccattctcagatccagggaactagttcaagctcacaacagcaggcatatgctgtgcacttggctaaagaaagacaaatgcaacagcatatggcacctcaacagcatagtgatctttctggagcaagtgcagtacccaatgtgcagagtaatactcaaacattgcagcagggccaaacctcatctgccaattcagccccttgttcaaaatcacagcatcagcgacagcaagcggcacaaaatctgccggatagctcttcatctcccaaccaacctgccacttttacacaacagaagcagaagaaacaacaggaacaacagcagtctagacaaaatgagccacaaaggaaccgtggcagtcaacaagctaagcttatgaagagtttaggacgaggaaacatgatggcccagactcctccaattgactgcacaccaaccaatgctgcttctactccatcaaaaaaccatgtgtctgaaaaactggtgcaacatggccaaggacatttccctgccaatacaacaccagtaccgtcaatgcctcaacctaggctagtcacttcgttgcctcagtcaccaacgaaggtggcagacattggtaaccaaggtttaaaaaagggtggttctttgagtcaggccatgttagctttgcaacaacctccacatggttctaaatcgacattgaccactcagctgcagcagcggcaggtcaatccgccacagaacaacaatgggagagcagtggtgcaacagaaccgccaaatgaactctgactgtaggacagacttgcacgtcggtcaggtccgtcacaatcagatggttccaacatccatgccacagagtgcagattcgtgtagccctgtactgtcatctgtaaaccagcagaagcgtgagccatcgctcaatcagacttcagttacctcgccgtctaacctgcttaggtctcctaaagatacttcttttgggtagccaagacatgctacaaaggcaagttttcaggtggcttccctatacaggctcatggtgttggtgaccagtggaaccaacatggcagagagcaattgcagtctcagcatcagcagagacaaccggttgttcaaggcagtgcatatgctccttcaaattctgggcctggctgatcattaattatttcaggtttgtaggtttgagatagcgagctttctttccattgtaaagttactgtgcaggattcgtttttcttattcaagtgacagtttgacaaagttcattaagagccagagtcggatgagggactgtatggctgcatggatgcatggaccaggatggcccatgagaccaggccaggcgaagccatattttttagggtcctttgtttcattggggccctagattagcctgatttacccgtttgatctatggatttacctcccgtatcgaggtcgagatgcacattagtttccatgagtgtcttgatcggcttgacatccttcatcccaaacttgatgagtatgtcttgaatgtatttcgtttgactgatgaaagtgcccttttgaagttgctttacttgaaatcctaagaaatacttcaactcctctatcatagacatctcgaatttttg

SEQ ID NO: 36681 - DNA, 2483 bp, Zea Mays
cgtacaaattctcagtatactcaaagtattggacgcccagcccagcccaccagaagaggacaaaccagattcgattcctcctcctgtcctccatctccccaattcgcacggccatcggaccatggattccggcgtgcctgcctctgcgcctgcccctcccaaacacaagacatgccggaagtgcaaggcgagctatgacccctcggccaacacgcgcctctcctgcaggttccacccttccttcttcgtctgccgccgccacgacgaccagaagaggtactacgagctccgcgacggcgatcctccctacgccgccaagttctacgactgctgcggcgccgaggaccccgacgctccgggctgcaccactgacttgcaccgttcctacgacgacgcccaagactagcaaacctttgctgcttccacaggcctcatcttaatctcaagtctcatctaccgtttcgcttttgcatcccctccttatcctctctagtcagctatcaaattaaaccatctatgtacacttaaataaattttgcttcagatatgttacctactggagctttttttttcctttttttttgcaattgatcaaacatatctctcttcatctatacaccgtctgtttggttggcttgcctctcaggatgctttaagtatcatacgagtctgactccacatctgcacgtaggtaaccaaacacacacctcgcacacgtaaagcctggaaccaaacacatgaatactaaactggaacataaggcgccccctatctgaactcccaaaaaaagccagcaattcataaaagtttatgtcatacaaactttgattcagtaattctgattcattgtaataacatcgatcttgtttggaataaacatttcactgggatatagaatatccaaatgtaaatagtttctgtccatgcatatcccacacctgtttttataaaaaaaaaatcaggccgtcagtattctctttcagttcttcattcaaatgataattcagggacttcaagggaaggtggtgcatcacttttaacagcaagggcacgtggaccccagacctagaccctccaaaaacaactcaacaacaatgctgctcctcctcctcctgctcgtcgcctcctcctccctgtcccaggagggcgtcctcgccgacgtgccgccgtccaacaagctggtcttcatcctggcggggcagtccaacatggccggccgcggcggggtggtggcgaaccgctgggacggcgtggtgccgggcgactgcgcgccgtcccccgcggtgctgcgtctctcgcccgacctgcgctgggaggaggcgcgggagccgctgcacgccggcatcgacgccgccaaccacgccgtcggggtgggccccgggatggcgttcgccaacgcgctgctgcgctcgggccgcgcggggggcgccgtggtagggctcgtcccctgcgccgtgggaggcacgcggatggcagagtggggcaggggcaccgagctctacgccgagatgctgcgccgggccagggtcgccgtcgagacggggggccgcatcggtgcgctgttgtggtaccagggggagagtgacaccgtccgctggtccgacgccaccgagtacggccgccggatggggatgctcgtccgtgatctccgcgccgatcttggcatcccgcacctcctcgtcatccaggtcgggttagcatcgggcctaggacagtatactcaagtcgtgagagacgctcagaaagggatcaaacttcgcaacgtcagattcgttgatgcgatggggttgccattgcaagacggccatctgcatctaagcacccaagctcaagtccagcttgggcgtatgttggctcagtcctatctaaattatggtacatcccaactctagctagtacttgtgagatagaaattcctgccctgtttggacgattcattgagaacccattcttataattattgttgtatggaatcaacttgttactgctcgatgcaatatcttcatcacaactcagatccatcactgtcttggactttttttctttctctgtcttcctttattggttctttgataatgagcagaggcgacgtctgttaagccttttattctatgtccaatcatatttatttgcccttttttctttttgtggggtgataggacatgcacactctccaacccctaaaccatggtggctgcaaatcgttttggtattttgcttcatttttgtttgaaacggagcatgcaaatcgttcaggtgagcagaagaagaagaagaaacccaaatgagtttaacataggcatccaggacttattctgtcaatcaataagtctcattgtctgactagttgtaatgtaaaaggagaacacagagagtagtcgacagtcttgataagcatttgaaatttgcctaactttggagttggtcagaattcaatcagatagatatacatatggaatctcttttagaggggcattgctacc

SEQ ID NO: 36682 - DNA, 3008 bp, Zea Mays
gttgcgcactaggcagaacagagtggaaaatagaattaggcctaccctccgagagtcagatctgaggcgcgccacccgcgaccaccgcaccgcgtcgtcctcctcctcgctctagcgacgccttctggaagctttgggaggccgcgctacgctacgcgacgctacgctccggcgggcggtcgggatggggctgttcgaccggctgcccccgatggaccacatgcggtccgagaagatgtgcttcgtgcagctcatcatgcccgccgagagctcgcgcctcgccgtcacctacctcggcgagctcggcctactccagttcaaggacttgaatgaggataagagtcctttccagcgtatatttgtcaaccaggtaaagcgatgtgcagaaatgtcacgcaaactaaaatttttcagtgatcagatcaacagggcaggtttaagatcttctgttcgacctgcacttgaaccggatattgatctggaggagctagaggcaagattgggtgaacatgagcatgaactgcttgagatgaatacaaatagtgacaagctaaaacagacatacaatgagcttcttgaattcaagctggtcttgtcaaaggcaggtcacatccttgcttcttctcacagccatgcagcttcagctgagcatgagctagatgaaaacatatatgacaatggaatacatgagggaaatgcctatctgctcgaacaggtagagaaagctgtttttgtagttttcttttctggggaacaagcaaaagcaaagatactaaagatttgtgattcatttggagcaagttgctaccctgttcctgaggagatggtcaagcagagacaaattttcaatgaggtatcggctcgtctctctgacctggaagttactttggatgctggaatccagcacagaaacaaagctcttgagtcaataggatcacaattgtggaggtggacaatcatggttaaaaaggagaaagctgtatatgacacgctcaacatgttgaactttgatgtgacaaagaagtgccttgttggagaaggatggtgtcctatatttgctaaatctcagatcaaggattgtttgcagcgttccacaattcacagcaattcacaagttggtacaatatttcatgagatggacactattgaatcaccacctacatatttccgaactgataagtttaccaatgctttccaggaaattgttgatgcatatggcgttgcccgatatcaagaagctaatccggctgtatattctgttgtgacgttcccatttctttttgctgttatgtttggagattggggtcatggaatatgtctattactaggagctttggttcttatacttcgcgagaagagattttcctctcagaagcttggtagctttatggagttggcattcggcggacgatatgttattcttctgatggcaatattctcaatatactgtggccttatatacaatgagttcttctcagttccattccatatatttggcaaatctgcatatgaatgccgggacaaaagctgcagcgatgcacatacttttggtctcatcaaagtccgtgaaccctatccttttggggtggacccaagctggcgtggaagtcggtctgagctaccctttctaaattcattaaagatgaagatgtctatactaatgggtgttgcccagatgaacctggggattgtattaagttattttgatgcacgatatcatggaaatgctcttgacataaggtatcaattcataccacagatgattttcctcaatagcctttttggttacttagcactcctgattcttatcaagtggtgcacgggctctcaagctgatctttatcatgtgatgatatatatgttccttgatcctgctggagatcttggagaaaatcaactgttctggggccaaaaggaacttcagatattgttgttacttctggctttgatcgctgttccatggatgctcttcccaaaaccttttatcttgaagaaacttcataaggagagatttcaaggtcacacttatcgtttcctagggacatctgaaatggatccagattctgaacctgattccgcccgagcacgtcatgatgatttcaatttcagcgaagtttttgtgcatcaaatgatacattccattgagtttgtacttggtgcagtttcaaatactgcatcttatcttcgactttgggctctgagcttggcgcattcagagctgtcaacagttttctatgagaagttgctgttacttgcctgggggtatgacagtcttatcgtgaagtttgtggggcttatagttttttcttttgctactgccttcatattgctcatgatggaaacactgagtgccttcctgcatgcactgcgtctgcactgggttgagttcatgaacaagttctatcatggggatggttacaagttcaagccattttcatttgctctgctagcagatgacgaagattgatgcatgtgtagttcagcacgtaaacagattggttcatttcttacaaagttttggagcacaggtgtcaaatttcatgggcaagatgggcttttcctgatacacagcattttgtcagaccgctagactttttcctagcgcatgagtgcagttgtcgttgagattgccagccttgtggaaggagattttgtaagtttacagcaatattgtagagggcaagttcatcgtacagttcctccaacggagatgcagattatagttgctaacaaaaaaaaggatagaaatgtagacttgtccgcgtacttttgacttcaaatttatcagcatgactgccgcttaccacttatgaatgaaaaatatgtatttggccattcatacaaccgtcgctggaagaaagacatgcacgctattgtactgttttgttttacaaatcaaataaatagctctaatcgtgctaattctttttaaatgctgctctattgtctgatgagactaatattcttgttatcacagaccttttgtgcggtccgcgtgttaggttaag

SEQ ID NO: 36683 - DNA, 344 bp, Zea Mays
aaaaatgcttagccttgcttagatcttgtggatagaggttgtcctcggtctaacccgggagaggatggcttctacctgcaagaatattttcatttggagcaatagtgggatcttactgcaaagttccctgtggtgctctttcatcctaaggaacagacacaatcctaaggatggaaatacttaaattgagacttgggttaggaacaggtgatgttctacccaggttggttaaggattaacgcgtatgtaggcgtgctgaccgaggaccctttaactggtcacatgcctcgtcatgggtaagccttgcctcgggcagactaaggccagaataagataacacgaaa

SEQ ID NO: 36684 - DNA, 1971 bp, Zea Mays
agttgctggtgtgttttgaatcgaacagaacacagaaaaatgaagtccggcacaaactaggcccgtgcgcgccatgcgtgagttgctgaggcaaccaatcacgtagactgtgaatgaacgctcactacagagtacagacgcaccatacaatagctccacaaaactctgcagcccactgttgacacttgacagcgccgacagaatctcttcttttattttaatccttttattttaattcatcatctcctttaatttgccttcttcaacaagcgtcttttggacttccattattacgtaccgtttgatttacatattggtaacgtaatggataatctatcgacgaaaccaattgtatattatttgatgaaatcactctcttatcaaggaacgaattatttgctcatccggtctgaaagtatctgacatccaatccaaaaaagaaaaagaaataaaatgttgtcccatgctaggatgcaagttgcaacccaaataatagaactccaatcattgatactcagtctgatagctcatatgtgtcttacctctacgctctgtaagttgttttaggggtggaacatgaaacaggacatttctccccccaaaccgtcctcttatcccatgtagattggatgagattgaaatagattataaatgattttgacttggctaggatttaaacatactaaatctcacccaatccatatggattgggaggaaaacgaacaaaccctacaaagggcactaccccaagtgtcttttaaacatcttgtttgattttaaacatacaaatgtaatatcctgcattgtttttaaatgttatctggatttaaataaaatgaaatggctttgctaacttttcactaaagcttctaactatgaaataattttaaaagcacaatatctgattcacacttgtttccgttcactattaggtgtgtttgattctcctcactaaagtttagtcaatgtcaaatcaggcatttgaatgacgattacaaatattaaatatagcctaatcataaaactaaatatatagatacaaggttaaatgatgagataaatttgttaaccatagttaattcatgattagtaaatatttaccaattaggcttaatagattcattttacagtttagttcttatctatataattagttttgtaattagaatatatttaatatttctatctagcatcaaaacatctaatgtgtcgtggactaaaatttagtggagtatccaaacaccacctcaggatttaacgcttggcgttgcattacaattacacaactaatgaaccctgaggatttcttttaatatacatacatatatattttgcagagcgtggcagacacgaaaaagcctcctgagatgatatccggcaacatgacaggaggtatgtgaaaacacttggggggatgtctcctagctcttccatcgctggatgttcatgcatgtttccgtgcagtgttgtgcgtgtactctgcgctcttcgtcaggttcgcgtggatggtgcgacctcggaactatttcctcatggtaacccacagctgcaacgagtgcgttcagctctaccagctgtcgcgctgggctagggcgcaggggttctttgagaagaaagaagaggagaggcccaagagcgaagattgaccgacggcccggccctaaaccatacaatactacaatgtgctcggttgtaccacaaaggcaatatttgatgcatgtattgtaacgtgaaaaaaagcctcggttatacatgttgtaggttcatctgcggatattgaactatgaatttccgagcataaagcatcaatttccactgccgtcgtttctcccacatttaaattatataaaaaactaaaattatacataaatgaggatttgaattatgactattgattctaaatcgttcctcccacattcaagttataaaaaaactaaaattagacataaatgatgatttgaattatgatta

SEQ ID NO: 36685 - DNA, 1546 bp, Zea Mays
cgccggggccagccggatctgctacggatctcgcctgccacgtgcgtagttctgcgatcgccacgtcgcgctcggctaggatccagtgggagaggaggcgatgcgaggcgaggaggcgggagcgatggaggccgccgactacgggaagctcttcgtcggcggcatctcatgggagacgagcgaggaccgcctccgcgagtacttcggccgcttcggcgaggtcaccgaggctgccatcatgcgggaccgcagcacggggcgtgcccgcgggttcgggttcgtggtcttcaccgacgcagcggtcgccgagcgcgtcaccatggagaaacatatgatcgacggacgaatggtggaagcaaagaaggctgttcccagagacgaccacagtattgtgagcaagagcaatggcagaagcacagggtcacctggaccgggacgcactaggaagatctttgttggaggcctgccctcgagcatcacggaggctgacttcaggaggtattttgagcagttcggtgtcataactgatgtggtcaagaaggctgttccaaaggagcagtctcctggacctgttgcacgctcacccgtgggagtggggcagaactatgctgcgaacagggttcatagcttcctcaatggcttcaaccagggttacaatccaatccccatgggaggttacggcatgagggtggatggaaggtatggcttcctttcaggtgcacgaaatgggttctcttcttttggcccagggtatgggatgggtatgaatgttgaaggtgggatgagcggaacatttggtgcaacctctggtttcatcagcaactccaacgggaggcaaatgggttcgtacttcaatgcaagttcgaacagattgggtagccctattgggtaccttggtcttaatgatgttcctgggtcaatgttgggttccatgtctaggaatgtttggggtaatgggagtctaaactatccgagcaatcctgcaaacatgagtgcttttgcttcaccaggaaatgggggccaagtcagtcttacaggtgacaattggggaggtcttccttctgctcatgggataggcaacatttcaggccttggatcagggaaccttggtcgtggagctggagataataactttggtttgccttctggcagctatggaagaagcaactcaactggtacaattggtgagcctttttctgcagcaggcaatacatatgatgtaaacaatgcagatacatatgggagcagctctgtttatggtggcacagtctggaggttcacatcatctgaggttgacatgcattcttttggtcatgatattggaaatgttggtccgacaatcaaatgagacatgtcagcaagtcacatgggcaactaccctgttaacaacaatcagccaagcagaggtaattcaattttgacgtgggaccttggccgccagcaatctacaacagttgctggaaccaccgagcttgccttctacagcgggtggtttctcactgcacatcggcttgtgtctgtgtgattagccccctcttgattttgg

SEQ ID NO: 36686 - DNA, 2868 bp, Zea Mays
tcactctcactctccctttctctcgtggagacgactgggcgaccgccggcgccgacctacaccaggtgcccaggccttcgtcgggaccatcgccggcgacgaacacccaccagctggatctgatccaattacagtcagaaatgtcttcagttgggagaagcaatggcaccagggcggcgaatggtgcagctgccatcagtacttccacgacggaagcaggctcagccgacgccagatttcactcccaactactacatcaggacagggtacatacactacacggctcgttgttccctgggcggatgcaatcggacttgtgctttagctgcagcttttgccttacacgctttagatacgtgcacgacaggatcggtaccggaatttttagtaggccttgacgacctagattggcaatttggcccagcctttgtttactcagtacgaattgtactgccctgcagtcgttactcgttacaccttgaaactgggcatctttaccagcaataatttggcttctgaagtactatatatatatgctccgttgcttctatcagataacttgttcagttggattttgcttttgctagttgtaatgcacacgttttgcactcctcacatttttttccagtgccagagcacggttttgcttttgcaataccattcctccagagcatatatgtactaataggttcttgattttacccctcgatacactcacccatttaagttgaagtggggggcaaaatagcttttactcctggataatccttgctttatgatattttccccttttgaatacctttggatttgagaaacactaacatttcgtatgttcttttgcatgattgccttttatgcttattgtcatataattgttctccccataatgatggtaaaaaactaaaaatatatatttttttgcatagcaagtatagaactatagataacttgtcctttgaaatctctttgtcacgtgcttcctttttatttctgaggtgacaactaagttatttgcttggactaacatgtgcttctactataaacagcaaagtagatgggctggctgcttttcaggcttatcatgtttcggatcgcagaagggcgggaaaagaattgttcctgcagcacgcacttctgatgggaatggatcaaatactcgtggaaatggtctccagtctggtgccaattcaaaccaaaatctgcctatgaatttatctcttctagctccaccatcatcaccagcatccttctcaaactctgcgcttccttcgactgctcaatcaccgaattgctttctgtctgtatctgcaaactctcctggtggtccaacgtccaatatgttcgctgttgggccatatgctaatgaacctcaacttgtctcaccacctgtcttctcaacttacacaactgagccatccactgcaccgttgaccccaccacctgagctggctcatgcaactacaccttcttctccagatgttccatatgctagatttctttcttcttctatgggtatcaaaactgccagcaaggatcacaacatgcctttcctatcaacaacctattctggtggttcaggactccagacatcttatccactttaccctgaaagcccctgtagcagcctcatctcaccggcttcagtaactccgaggactggtctatcttcacctatacctgagcaagaggttcctcctgcccattggaagacctctaggtctgcctgcgacacgccatatttcagggcttcgcccattcccgagcaagaaaccactgcacaatggaagacctctagatctgcttgtgacacaccgtatgccaggacctcaccaaccaatatatttgggctggattcatctacaccgagaaactatatgctagacaacaatttctttcggccagcggcatctgctcaattctacctggaccaggctcagcagacattttcacataatggcggaagggtcagtgtatccagggagaagcaaggtgccgatgaaattgaagcttacagggcttcatttggatttagtgcggatgaaattgtccaatctcagtcttatgtgggaataccggatgcagttgatgaatcattcagtatatcaccatttggaaacaatactccagctactgagatctgcccattcagtgatctgcctaatgaggtggataaatcatgtgcctacgcgaaagatgacacaagcccaaagaaatcagcaaaccagctctccactgattctccaaacaaagttctgcgtttggacgtgttcaaaggaacaaaaggaggtcatcagtctgaggacgagtgtatcaggaaagatggtcatcttttcagaaagacagcagatgaaatatccctaaaacccatagaagtaagaaagaaatcgcttcctggccattcttgctcggatgcagagatcgagtacaggaggacacggagtttaagggatgccaacggcgttctatcacggcgcagtgcattggcaagacagctgcactaatatggtactagtatgcagggtgatttcatagttcatgtagcctagtgtgcattggatccgagctgtcattagagtaatctgtagggcaaagagtagcctctaccgtatatgaggatcatattgccagattgtgctctagatatgtgattatgagcctgtactctgtttgaactccaagatcctctttgtaggcacactccaatcgtatgcaggagctgtgagatggaatagcgttggtacattacaggagttcgtgtttcggtcttcctcttcctgatgatgtaacttgtgtttgaatcttgcagaatgctggtttggaatctttgtgcctttttcttcgcgtatgtcagcaagacagcaacttgtg

SEQ ID NO: 36687 - DNA, 201 bp, Zea Mays
tagggtttccccaagaaaatatgcaagagatgggggtagaacatctccttgatcctctcttcctcttcaatccatcttgctcctcctcttctcgatccttgctgcgtggggggagatctagagggaggaggaagtagtggagggtggctgcaaggggaagggggaggggcggccaagggtggggaaaagggggggttggcg

SEQ ID NO: 36688 - DNA, 823 bp, Zea Mays
cgcagtagcaggcggtgccgcccccaatgggggctgactgggcgtgggagatgtgggccgtgaagcacgtcggcccctccgggaagccggtccaggctgcgctgctgctcaactacgccccctccgggccatctcggctccttcccgtcgtagtagagcaagagagaagacaactttcagcttttgatatgcaaccattcctggactttgtcaagaggggcaatctgcagactgaattcttttctgttgggccgacctatgtgtgaacttaattttgtttatatgacatgtcaaattgattgccattgttgtggccagcaatttgtgacagaaaattatgatttgtacatttggtcacgtcaatccatgagaactggttttgtgcctgttgcattaatagcacaaagtcaggaggtgaaggagtaatagctatgcagattggagcttacttgatagtctctatgtatgtactttttcttcaactttcaattcatggaaattggttgccatattttttaacatattgctatttaattcataccagtttcttaatttataagtatgatggttctcttgcttcagcttcacaagcaatggtggctgctgatcggtttgcaattcagattaaccggacgagtcactaatttctagtatagtttcatgagtaatgttgacccacaatttgttcgtgtttgggatcatagtgctagaacgcagtagatgaccatatgtaacttgtagtgttactattttcatgggtccgtagttgtgctaatgtaatagccaatattgactaatactaatgtttctagtgtgaggctga

SEQ ID NO: 36689 - DNA, 1994 bp, Zea Mays
tttatctcaatcccgtttgcgaggaatctccacaacttggagcctctcacccttacacttgaaattcacaaagaacacggagcaagggagggattagcaacgcacacaagacacacaaatcagaatgtcaatacgcacacaagtcgcaactagagctcgcaacacaactcaatgagttcacaactccactagagctctatatgctatcacaatgaaacgaatgcgcggaatcgatgtcttggtgcttaagaatgttgtaggaatgcttggtgtactcctccatgcgcctaggggtcccttttatagccccaaggcagctaggagccgttgagagcaatcaaggaaggctgatcttgccttctgtcgactggcacaccggacagtccggtgcacaccggacactgtccggtgcccgatttccttccaaatatggcacagtcgaccgttggcagcctgagagccgttggcgcaccggacatgtccggtgcacaccggacagtccggtgcccccttctagccgttggctcggccacgtgccccgcgcagattgcgcggccgaccgttggccctgccgaccgttggctcatcggacagtccggtgcacactggacagtccggtgaattatagtcgtacgtcgacgatgaattcccgagagcgacgagttcgcctgtgaacggcccaccggacagtccggtgcaccaccggacagtccggtgaattatagccgtacaccgccgtcgaagtcccgagagcaaccttttccctcgagccagcctggcataccggacactgtccggtgcaccaccggacagtccggtgcacccagactgagcagactttggctgctcgagccatctcttctccaacttgattttttctgtttccagcacttagacacaatacattagtccataaaacaatgtactaagtctgagaaacatacctttatccttgatctgtactttgtccacctttttacaattaggcacttgtgttggacactaaatcaccaaaatacttagaaatggcccaagggcacatttccctttcaatctccccctttttggtgatttatgccaacacaacataaagcaagtaggacaagtacaaaatcacttcaaataagaactcaatttattttgattcaaatttgacatatatggatcactcaatgccaccacttggtttgtttttgcaaatcaaactcaaattcctatctctaagtcaaatctccttgtagagacataaagagaggttttccaaagaaatttgatcaaggatttcaaaaactcccccctttttcccataatcaacacttctccccacaagaggccaacttttgacataagagataataaaaagagttttgacacccaaaagctctaatctactattttcaaaattttgacacccaaaagctctaatctactattttcaaaatttctcacccaaaagctctaatctactattttcaaaatttctcaagtggtagctgatccatctattgctttggcctttattttctccccctttggcatcaagcaccaaaacgggatcaatcttggccctttaaccccattgcctcaccaaaatcttcaaataagaacgcaaaggcaataagagtacatgagatgaacttggaataagttaccatctcatcggagtgcagtggaagtctttcatggtccaagtccaccttttccctttcaaacctcctttgagactaaaacaagcaaactcaagcatatggttagtcttaaagggtcaagttgtaacacaactccccctaaatatgtgcatcacttgcacaaggacttgtgaggtccgggaagtgtttgtacaacttgagcaccatagtaaacaacaaaatgcataaggaacatgatcaaaggcataaacacatgtatgctacaattaaatccaagttccgcgaatctaagatattgagctcactatgcagcctgcaaaaggtcttctcatctagaggcttggt

SEQ ID NO: 36690 - DNA, 856 bp, Zea Mays
gattttcacgtgctggcgcgcccctgtgccggcctggctgcccgcgcccgccgctcgccccgcgtgacgtgagtgaccggagttggccatggccgggcacgccgcggaggccgacgtggatggactgggtgcgaccgaggggacgacatcgacggatgagattgagacgcagcgacgtcggccacgagggcgcgcgtcctgagcaacccctgctcgtgtggtggccagaggagtgcgacgtgccgcccacagcgtgttcgacagattgctttcatgaattacggtgaacgctcagaaaactgcgccacaatgctaaggcaggaccatttttctggtttggagcctcggaagaatctctgttgttacaactcttttttctcaacgaccgctgctagtccacttcttgtagagactggacctgaactagctacgaagagtccaggccatcatgccatgtgtataggtgatttggtggtagtggcaccatcggcgattggtggcagctgttggttcttgatggagacgactggtatagctagcagctaggtgtttagttattcagttcttcgaaggtgtatgttcatgttcaggcctcgaagacaaaactagcaagatggtgcttctaccttgtggacttttacagaacaatactacgagtcaaatttcctttttttggatgaaacttgcaagatcaacggagaggtgtatggacacttgtttggcgagtcatccagatatgtaatatctttatcatattatttgatttttcccccggggggataagcgtgcaattcattttctcttttcacagtgtggtagtgttaaaaaaaaacatgcatgccttggttacaaagag

SEQ ID NO: 36691 - DNA, 1827 bp, Zea Mays
tcgcagggctcctagaaaagagaaagtagacgaccaaaagaaactggagaaaaagagaggagctcaaaagcaagctatcgccattgaagatgtgagaagagaagtgagaatattgagttctctgacaggccacagtaatttagtgcagttctacgatgctttcgaggatgaagataacgtgtatatagttatggaattatgtaaaggaggtgaactgctggacaggatattggctagaggtggaaagtactctgaagaggatgcgaaggtcgttatggtacaaattttgagtgttgtatcattttgccatcttcaaggtgttgttcaccgtgatctgaaaccagagaatttccttttctcttcaaaggatgaaaactctcccttgaaggtcatagattttggcttgtctgactttgtgaagccagatgaaagactaaacgacattgttggaagcgcatactatgttgctccagaggtcctccacagatcttatgccaccgaggcagatatgtggagcattggagtaattgcctacatcttgctctgtgggagtaggcctttctgggcgcgcacggagtcgggaatcttccgagctgtcttgaaggcggaaccgagttttgatgaggccccatggcccactctcacggctgaagctaaagattttgtaaaaaggcttcttaacaaggattaccgcaagagaatgacggctgcacaagctctcagtcatccatggatccgtaattctcaacaagtgaaggttcctttggatatgataatctataagctaatgagagcgtacatcagctcgtcttcgctgcggaagtctgctttgagggccctagccaagacgctgacgacggaccaactcttttatgtgagggagcagtttgaattgctgggcccgaacaagaatggttacatctcattgcaaaatctgaaatcggctctagcgaagaactccacggatgcaatgaaggactccagggttgtcgattttgttaacaccgtgtgcgctcttcagtacaggaaactggatttcgaagagttcgccgcttccgccatcagcgtctaccagatggaagccctggagacctgggagcagcacgcgaggcgcgcgtacgagctgttcgacaaggaaggaaaccggcccattgtgatcgaggaacttgcgtcggagctcggacttggcccgtcagtgcctctccacgttgtcctccaagactgggtcagacacgccgacgggaagctgagcttcctggggttcatcaagctcttgcacggggtctcgtcgcgctcgatcccaaaggcctagcattgtacaccatccatccatcgtcgttgttgttgtagttgtactgaagtaaagctgttgtgtagacgagtgtacagatgaggatagggaaaagaaatgaacatgatggaagactggaagggccgtaagatttgcggctgctgtttgtcaatgccaaattgccattgcctgcagctgcagtagctgtgtctggctctcctttgtccgcgccatcagagaacaggagcgtcgcagcgtgctggtggacttgcttgcttgctcgtggtgtgtacgagtacggtgccgtggatgcagcggtgtcgccaccgcgcgtggttcgggagggggcacggcgctggtcccggaccgacgtgcgtatggcggaggcggagcaggtccgatcaagatcagacgccgggtccggccggtggggtgggggcactgacagccagagcggcaggaggaggaccacacggccgggcacccaacctctccccgtgctagagaaaagagtcgaactaccccctagatagaaa

SEQ ID NO: 36692 - DNA, 1389 bp, Zea Mays
tctgccgccgcgggtctggttgcccacctcaactccgaggaacgaggactccaccatgctcgctctagagacaccgccttcctgtcctccgctcaccgtgcttgtcctcggatccacgactgccgccccgctccccccaaataccactgatgcagggatccaagcccctgccatctattcagccgccccgacgtccacaggggataccaactgatgggccaccaaccatgttgttccacgctctgggctgctgctggaagctaatcaatcgcttggttagaccatcgcagattagcggtgggattcccaggttcaataatctcgtttcgggccatgccctcgatgtcattatctggcttgaggtttgtcgtggagaagcaaagggatgtttacatgtgctctattctaagtcttagggtctgggattaattgggtacgattcgttctagaggatgatgcgagtaagtgcttaagtgccctgctaattttttcagctacctctttcgaatttgttgtctacctgtttgttaggcaagcatggagtattcgcttggttctactcaagaagggaatcaaggaattcaggactttatgcactgattgtaatagtccaacgaaagagcggatccacatgttaaaaatctcagcaagtgttcctttctgacagagtttcaacttatgtgttactaatgtagaagggatcccaattacttgctgcattgggtgatcgaacagtcatagtatggagtttaggaaacaggaaatgcattggtctcttgtttgggcatactgggagcgtgagagagaacaagaacttgactggaacatcaagataagcaagtgtaaatacccaccttgaaattggtagttttaattcaaacacatgccttttgtatgttatgttcttgcctccttggtattataacatgcttgcattaaatgatttattgaaggtaaattctggaagtattgtgattcccataaaacgtgtccttacagatcatgtattaagggtgtggacggttatgttgcctttttcacaaacttcaatttatgatcaattgcaagcaagatgtggtctagctgttggaatgcggatcacgaaggtggtgtcttcactcttcagcatgttccagtgtcgtgtgttccagatcgggttgctatcgggagtctgttggtttgcatggaatcaatcaggtttagcttggattcatgaataattggtttgtgtcgtccggctgttcgagctacgtcatcatgattagaatctacatttttccctacgcttgtatttaaaatggagtttacaaagataatcgttagaatggaatcgaaggctcattttttgttctatctgataatagccgaacgaatgaaatgcaatttaaa

SEQ ID NO: 36693 - DNA, 4527 bp, Zea Mays
cgactcccacccggcaggcacagccgcacaggaacccacccggcctctccaccgctgcacctgcagtcctgcacccatttaaatttaaacatttaaaaaaaaaacccaccccacgaaattcgcagaccaccttaattcccattacatcaattattttctcttcccgacccagtccgccgctgcctgcttccttccttccttctctctcctccctctcctccagcgacagagacagggaaggaggcggaggaggaggccgcgtggctgcggaggcgggcagccgcggcccgtgcgattcgcggcgcctctctcgccgtatctgcggtggcgcgggcgggttggcggccggccagcgagatcggctgttgtttttggtggtatttttttttctttccccacggcggtttttgggagttggagcgtggattgaagacggctgacggccggaggggtttggggggtccagttgaggccgtcggggcggagatcccgcggggagctgcggttccgccgcggcccgtgagttggattccgggcgcagcgccgcgccgacgatggcgtcggtggaggtgcgcaagtccagggccctgcgggcgcgcagcgggcccagcaagctgcagccggcgcggtcgatgccgctcgactacaggtactcggccggggcgtcgccggcgaacggcgccggcggcgggccggacgcgaacggcgtcgggcggcgggcggctgcggcggaggcggagaacggaggggaggtggtggtgcggttggaggggggcgatgcggactccccgtacagctccacggcggtcacagcggcggaggaggaggaagtgggggagagaggtggaggaggagacgaggtggattcagcggccacggcgacgccgaggcggttgtcgccgagggcagcagcgagccccacggaaggcgacgcccggtggggtgacaccagctcgtacggcgctaagaagaagcatagagttttttgtcagcttccgaatggcgattgggcattatgcacagtaattacaacctctggtgatgagtcggttgtaaaggtttctgaagggaaggtactgagattgaaaaccgagtgtctacaacctgcaaatcctgaaattcttgatggagtggatgatcttatgcagctaagttatctaagtgaaccatcagtactgtacaatctgcagtacagatactccaaggatatgatttatactaaagcaggtccagttttggtggctgtcaatcctttcaagaaagtttcactgtatggtaacgagtacatcgatgcatatagaaataaatcaatggatagtccacatgtttatgcaatagcagatgcagcactttgtgaaatgaaaagagatgaagtcaaccaatctataattataagtggtgagagtggagcaggaaaaacagaaaccgcaaaaattgctatgcagtacctggcttcccttggaggtggaagtggcattgaatacgaaattcttcagacaaatccaatactcgaggcttttggcaatgcaaagacattgagaaatgataactcaagtcgttttggaaagcttatagaaattcatttcagtaccactggaagaatatgtggtgccatgattcaaacatttttgcttgagaagtccagagttgtgcaatgtgcagttggtgagcgatcataccatatattttatcagctgtgcgctggtgcacctgcctctctaaaagagaagttgaatttgaaaaaggtggatggatacaaatatcttaagcagagctgttgctattcaattgcgggtgtggatgatgcccaaatgtttcgaactgtgacgcaagctatgaacattgttcatatcagcaaagaggaccaagagagtgtttttgcaatggtctctgctgttctttggctgggggatgtctcgttcacagtaattgacaatgaaaatcatgttgaaatcatagtagatgaagcttcgaaaacggtttcagaacttcttggctgcagtattgaagatctcaatttagctttatcaaagcgccacatgaaagttaataatgaaaacattgtccagaaacttacccttgctcaggcaactgacacaagagatgctctggccaaatcagtgtatgccagtttgtttgagtggcttgtagaacaaattaataagtctctctcagttggcaagcgtcgaactgggagatctatcagtattcttgatatctatggctttgaatcatttgataagaacagttttgaacagttctgcattaattatgctaatgaaaggttgcagcaacatttcaatcgtcatttgtttaagcttgagcaagaggaatatgtggaggatggcatcgactgggcaaaggttgacttcgaggataatcaggactgtttgagcctctttgagaaaaaaccactgggactattgtctctgctggatgaggaatctactttcccgaatgccacagatcttacttttgcaaacaagcttaagcaacatcttgactcgaattcttgcttcagaggagaaagaggcaaggcatttgctgtccgtcactatgcaggagaggtggcttatgatacttcgggttttctggagaagaatagagatttattgcacatggactcgattcagctccttgccaaatgcaaaacttctctgccaaaaatgtttgcatcgaagatgctagttcaatcagataattctatgtctgttccatatagatctagtgctgctgattctcaaaaactaagtgttgccatgaagttcaagggtcaactgttccaacttatgcaaagactggaaagtacaacgccacactttattcgttgcattaaaccaaacaatttacaacttcctgcaatttatgaacaaggacttgtgcttcaacaacttaaatgttgtggggttcttgaggttgtccggatttcaagatctgggtatccaacaagaatgactcaccagaagtttgctcggcggtatggttttcttcttgaggatgttgcatctcaagatccactcagtgtttcagttgcaattcttcatcagttcaacattttacctgagatgtatcaagttggctacacaaagttgttcttccgaactgattggcaaccttgaagatactcggaatcgtactctgcatggtattttaagggttcaaagctgtttcagggggcatcaagcccgtcatcatgcaagagaacgaacaagaggagttttgactcttcaatcattcattcgtggtgagaatgcacggcaaatttactcctctttgttgaggaaacatagagccgcagttgttttgcagagaaatgtgagatgttggcttgcaagaaggtatttcataaatgtccggaaggcctcagtgataatacagtctggtattcgtggcagtcttgttcgaagatgtaatggcaatattgatctaataaatgtgctaagagagtttgaatcaaaacaggaggcacatggtgaccaaattttgatcaaggcctcagtcctggctgagttacagaggcggatactaaaagccgaggccacagtacgtgaaaaggatgaagagaacgagatgcttcatcagcggcttcagcaatatgaaaaccgctggttagagtacgaacagaaaatgaaagctatggaggaaatgtggcagaagcaaatgcgttcgctgcaatcgagcctttccgtagcaaagaagagccttgttttggatgaaacgcctaggatgtcggactcatcagtggatcagagctgggaaagcaatgggaaccaccatgtcagcagcggttctcagctggtgccacacactggtggacgtgaaatgaacgctggcctcagcgtcatcagccgcctggcagaagaattcgagcagcggagccaggttttcgctgatgacgccaagttcctggtcgaggtcaagtctgggcaggcggacgccagcctaaacccagacatggagctccggaggttgaagcagaacttcgactcgtggaagaaagatttcagtggacggatgagggagacgaaggtgatcctgaacaagctcggcaatggcaacgagtcatcgcccaactctgtgaagcggaagtggtggggcaggctgaacacctccaagttttcgtgagtttattatgtattgattggtaatttgtagatgtaaccggtattttacacgccggtgtggttctagcttcctagagtttctactctacgggtgctgtgaaagtccagtgtgttggactggatttgtattccacggagggcgagttgtatagttctcccacaatggcttccttttgaggggtcaaggaccactgaattgtgatgtaattacttgctgaagtagctgtcgaaggggggagattgtgagtgcttaatattccactatccttgtgctttactttctgcctgttgtagattcatagatttaaatgttggtatggtgtgacataatctatcatccgatgactcgtagcatgtttggtttgagaaataagatagtttattatttctcacttattttttg

SEQ ID NO: 36694 - DNA, 754 bp, Zea Mays
cgcggatgtgggccacgcggccggcagcccatcaaggcatcagctatcaatccagtattccagatttccagcgctgcttccttttctccgccgtgctctccccagtcccctccgcctccggtcaccattaacctagccgcaactctcctcggtgcggcggtgcccgcctgcccggagctcggacaccggagcgacctcaagtgttccacaggcgtcacgggacacgacgctcaccgctcgctatcgctggcggactacggacggctggagctggattgctgactgctgtggagaattcggactttgaagcctcaagtctgaaccatatgtgaagtctgaactgtatttttctcgtggatttgtgatgcaatgcaatggcacttggcggctgtcactggcaggcagcagcagcaccgcagcaggcttaatgccttacagccttgcacttttgtatcttttgtcgtcgtcgagtactcagtacattagtgtagtagtaggtagtacctgtcggctgtattggttcttgaattctcgctcctctgcataagcatgtttggagcaaagatgagggcagagttagcaaatatgcttgttatgtatgaagtagcataaatcaggctatagacactagagaagaggctggtattttattttatttccttatatcttgtatatcaaattcctattcttttgtgtttgtaaatcaacgatcaatggacatttccatgaacatgtattaaattgagttgtatat

SEQ ID NO: 36695 - DNA, 1341 bp, Zea Mays
aatgagcgcacccaccactcgccagacaacgccggcagcagcagtctgcagatcgagcacagccgcgcgcggcttgccaccgtacaaacaagcacgagcactccgctagctgctccgccgcgcaacaacaatggcgtccccgcgcggccatcgtcatcgccgggccaacgtgccgccgccgcccaaggtgccggcggtgatcgtgttcggggactcgacggtggacacgggcaacaacaacgcgatcggcaccgtgctgaagagcaacttcgcgccgtacgggcgcgacatggccggcggggcccggcccacggggcggttctgcaacgggcgcctgccgcccgacttcgtctccgaggcgctgggcctgccgccgctggtcccggcctacctcgacccggcctacggcatccaggacttcgcccgcggcgtctgcttcgcctccgccggcaccggactcgacaacaagaccgccggcgtgctgtcggtgatcccgctgtggaaggaggtggagcacttcagggagtacaagcggcggctgcggcggcacgtggggcgcggcagggcgcggggcatcgtctccgacgcgctctacgtggtgagcatcggcaccaacgacttcctggagaactacttcctgctggtgacggggcggttcgcggagctcacggtgggcgagtacgaggacttcctggtggcgcaggcggagcggttcctgggcgagatccaccggctgggcgcgcgccgggtcaccttcgccgggctcagccccatgggctgcctgccgctggagcgcacgctcaacgcgctccgcggcggctgcgtcgacgagtacaaccaggtggcccgcgactacaacgccaagctgctcgccatgctccgccgcctccaggcggcgcgcccggggctcagggtagcttacgtcgacgtgtaccagaacatgctcgacctcatcaccaacccttccacgctggggctggagaacgtggaggagggctgctgcgcgacggggaaggtggagatgtcttacctgtgcaacgacaagagcccccacacgtgcgccgacgccgacaagtacttcttctgggactccttccaccccacccagaaggtgaaccagttcttcgccaagaagacgctggacctgtgctacgagcagctcctgtgatgctggacgctgcttgctattgctactaatcaatcaatcgcggtgtatagcatagcattcgattgtcttccatgtactgtatctgtatgtagcatggttgttctgcctgttccgaatcccgatgcgtcgattcttttggatttaaatgatcagatcagagtggtttataattt

SEQ ID NO: 36696 - DNA, 2983 bp, Zea Mays
tttcgccgcgcaaccttcccatattaagcggcaacctccgctccgcctccccccccccaaaaggcagcagcaaaacccccattaaatccctctcctccccgatcgcaggccgatcgacggcggcgatggggcagagaatcgatatcaattggactgaggtgtttggcaagtcatcctcccccgaccgcgaggccgacgtctgcttcgcctccccctcgtcggcgtcggcagcaccgcggacgcgggcgcgggcgttgggcgccgcgaaggtgttaccgggcgacgagcggcggcgggggtccccagacagacaccaacggaagaggctcgggaagctgcgcatcgacgatgactggtccgtcggcgggcagcgccacaccgccgtgcatggggatgacggggcgcgccgaccacggacccgcggggccgccaaggctgcagatggtcgggtacaggatgctcattccgtttctaaggatgtgtatgatttcagtccagaagatgagcaggcggaacgtgtgggcaacagattctgttcgaggttaactcccattcaggaaaataaatactgccagttacctttgaataatctcaaaaggcaagggtgtgcggaaaaaaggaaacctatatcggtggacaagatgtactcagagtctgaccgaccaagttccacatcttcatctgcgaagaggactcatgccattgatccagaggtgtcagatcatgaaaaatgtcacaagactgaaagttcccatcccagtagattctctaagaggaggaaggaacaacttcagaattcatcttctgtgtaccctcgaaaggttcaagatgtggttctattggatgacgaagatatgcagcctgaggaagaagtaaactgtgacatgtctgacggacagaatggaccaaagatctactacccatcgagagataatcgggaatctgttgagctcagcagatctgatattaaatgtcttgatcctggagtatatttgtcatcaccagtgataaacttctacatccagtacattaaaaggaacagactgtctagtgaagattttagagacaaattttacatatttaacacatatttttatggaaagcttgaagaagcattgtgtcggcagggcgcactggagcttggtaatcatttgcattcctgcaaaagagagtatttcaggaccaatcatacttcatctggactccctagcgatgcatcccagtactaagatcttgaacacagttgagagataccttgaaaaagaatggtgccaattatcatcatgggaggattttaaaaataatatacataagcaaagcgttgaggttccacgacagaataatgagtatgactgtggcatcttcatgctttattatattgaacggtttataaaagaggctccagaaagattcacaattgataaacttgatatgtttaatcggagttggttcaaacctgaagaagcatctggtctaaggcggagaataagagagcttctgctggaagaatttgaaagtgccaagctggatgatgctttaccaggagcggatgcatctgagcgtgatgacagcataaatgatggagaattgaaaccagatgcatcttctgacagttcagaaatggtcgtagaggtggtaggagggttgggaggcactgacaagagcaatgaaggcatcaaggttgtagcatcagaagaggcaagtggagagtcaggagatgctggtaagagtaccgaaggtactgttgcagcatcagaagaaaagagtattgaaggcatcaatgttgcagaaccagaagatgcttgtgagagtataggaggcatctatgttgcagaatcagatgaagcaagtggggagtttggagagattggtaagaccaacaaaggcaccaaagttgcagtgtcagaaggagcaagtgtgtctggatacactgataagaatatggaagacatctctgactctgaggttgcagtattagacaaagctcccactagcagctacagacgtggagagaagaccacagcctgtgttctatcagaagcagcttcactttccgatagcgtcaaagatgaacaaggtatggtgaaaccagattctggcagctcaaaagctgagagagaaggagatttgattgtaattgcatcgccggaaagatcggaagggaatgatgagatcattggtagcatgccaattacagatgtagtttgtgacagctgcgacagcgacaccgagaccaaggtgaggatcgtaaaaattcacagaagaaaatttgtcccatcgtgtggttgcagcaattgacacaaggggccatgcaccgtgcaaaccttctggttgcgttctcacgaagatgcgaaattgtgacagattttggtaatgatattttgaggttcctgtggccgtataccaagcacatagatgaccaggccaggcggtgatctcagtaaaccgaataggtagcgggtcgatgcatggcctgcttccccctgatctcgggcactaggctcctggaaagcagttttgggtaggcagttcattggcttgggcccgggacttgtaaagtgtacaggcgattggacgttattacgtatgttatggtgtttacattagaagatctgtgactgtgaacacctgccacaatttgagataatatgcgcgtaaggtcttgcgttttcctttttgttctgccccagagctgccaaacatgcatccttgttcttctccagccttgatatgatggcatttcttttgaccttggagtagagttatcgtgtgaatgaaggaagctattacagtacagtgcaaatttgcaacggcatgatacatgtctagctctctagccttggtgttcgtggaagtgacatggatgacactggcatggcagcagcattcattcgtgtgagttcgcatgaacaacacattcttgttaggccccgtttggttaggggtaactaaagtttagtgactaaattttagtcacttttag

SEQ ID NO: 36697 - DNA, 1498 bp, Zea Mays
gggtgctctcgcctgggggctgattggctgaacaacgtccaccccgcacggccgcaccacgcttcatcataaatacgagttcacccgacgtgcgttcttcctgtctctcccccctctccgcgaccactacggccgccgacgccgccctacaccaggtgccgaggccttcgttggctcttggccggcgacgagcacctgccagactaggagcaaacctctcaccatgtcgtgggctgcaatagagaatgatcctggtgtttttacagaactgttgcagcagatgcaactgaagggtcttcaagttgatgaaatctattcacttgacctggatgctctcaatgatcttcagccaatatatgggctaatagtgctatacaaatggcgacctccagaaaaggatgagcgtcctgtcatcaaggatgcaattccaaaccttttctttgccaaccagataattaacaacgcgtgtgcaacccaagctatcctttcggttctgttgaactctcctggcatcaccctcagtgatgaacttaaaaagctgaaggaatttgcaaaggatttgccacccgagctcaaaggattggctatcgttaattgtgaaagcattcgcatgataaacaactcgttggcaaggtcagaggtctctgaggagcagaaacgacctagcaacggcgacgatgtttaccatttcataagctatgttccagtggatggtgtcctgtatgagcttgatgggctaaaggaaggaccaatatgcctggaaaaatgcccaggtggtgttggtgatgcagggtggcttaggctagcgcagcctgtcattaaagggcacattgatctgttctctcagaatgatgtaagatgcagtgtgatggcaatcttaaagaaccggaaggagatgtgcacggtggaactcaaagaactaaagaggaagagggagagcctcttgcaacagacgggctatccttctgcaattaggcacgtgccatctgttgagcagtcactagcggaggtgtcagctcagatagaggctgtgacggagaagatgataatggaggaagagaaggtgaagacgtggaagacggagaacttgagaaggaagcataattacgttcccttcctgttcaatttcctcaagattcttgaggagaagcagcaattgaatcccctgatagagaaggcaaaggcgaagcagaagtcgcactgccccagtcctaggtgaaagatgcaatgatgccatttcattcacatattagtaacgtaatgggtaatcaacaacattaaattatgtttgtttaagtaacgtaatgggtaatgcaatgattcgtagttgggtccttgttttcttgaccagtatttgaaccttatgtttatctctactagttttattaggtagtgcacaaatggctgccattacatgtttgaggtgaacgagtcttgacgagacgagtgcctcgtggactgtatgcagtcatactgatgtgtttgaacaccatccatg

SEQ ID NO: 36698 - DNA, 700 bp, Zea Mays
cggggacccaaccaattcaacattccgcgcgcgggcgcttgtgttgtgtgtcgtgtcgggcaggggtcgcagtcgcagcaggcactaggcaggcaggttataagacgcgcgcgcgcgcgcgccgctcggaacagaggaggactggatcaggagtcgagagggaagaagacagcccacaaagcagccggcgccgcgcggggactctccccgcccaatgagtagcgccgcttcgtccccgtgccaccggctccgccgcgtcgcgctgctgctgctcgttgccgcggtcctcgccggtggaaccgaggggaaggcgcacgactacggggacgcgctgcgcaagagcctgctctacttcgaggcgcagcgctcgggccgcctcccgcacagccagcgcgtcgcatggcgccaccactccggcctcaccgacgggctcgagcaaggggtggacttggtgggaggatactacgacgccggggaccacgtcaagttcggcctgcccatggcgttcaccgtcaccatgctgtcgtggagcctgatcgagtacggcggcgacgtcgcggacgccggcgagctcggccacgcgctcgaggccgtcaagtggggcaccgactacttcatcaaggcgcacaccaggcccgacgagctctgggctgaggtgggcgacggcgacacggaccactactgctggcagcggccggag

SEQ ID NO: 36699 - DNA, 3405 bp, Zea Mays
caaacctcaccggcggcggtcattgaccgcaactggttgccgtgtttacttcccccacgcgccacgtttccgcgcatcccgagactccgagagagtggctggcggaacggaacacaaatccaatctcgctacgtgaagttcgcctcgcggcctcgcctaccaccacccgtgcccgtgtcccgccgccggcggcgctggggatggcggggcccaaggcggctgaggacggctcggcggctccgctgctgcctgcgcaggcgggggaacggagctcaggaggcgtgggcggaggggccacgtccgcgcagacgctggggaacgtggttgtctccatcgtgggcaccggtgtgctcggcctcccctacgccttccgcgcggccggctgggtcgcgggctccatcggcgtcgccgccgccggctccgccacgctctactgcatgttgctactcgtcagtacgctcgcccgcccgcccatccctccttactgatcctcacactgcctgctgctcccgagcaggagtaggcgagtacagtagacgccggtcgcgttctctctcttccccaccattcgttctgctgtttgaccgggcctggcgtgctcttcgccaactttgtgctgcagcctgcagtgttcgctgtgctgttcccttccagatccgatcatccgaatggctcataaaattaaaaatcttctagatttgaagggccgagacagcagtacttgtggggatatatcctgttgtacgatcgtgcaatcaatcaatgtatatcattgattgtaaatcatgtagtgctaatgttttacatataacctcttgttttgtgtctcagtgcaaatacccccgtttatattatttgaagacaccataagatggacaatcaaaggcggagattgcttgattgcacgattgcaccaatacatataattgcacaagatatgtcttcatactggactactggtgtattccctccgaccccccaaaatatctttctagttaatcaatcttaacttttgtcaaatatataaaaaaatgtgttaatttattatgcataaggagcatcattagatgaataatgaaacacatttcagtaataaatttatttggagcttactccaaacctaggatgatactttttccttggtggagagggagtaagaaatttcccacctgttcttgtatcgtacagattattgagttgtggtttcccatgtccaaattttcaagaaacgaactgcaaaggacaaagtgtttctgcttgcattactctctcattcatcttccaataaaaaaactgtgagtccgtctttctgccatttgaagcacgactctcctaaatgtgctaagattctgccaaaagattagtcaatgaatcaaacttgattttgcaattgaccagcttcttgactccattttaaattcaaaatgcactggtttctttccgacttaaagaaaaaatcgtttaaagatagccaaatacaatagttcttagagcaactccaagtgattagataaaaagactagccaaatttactgatttagctactctctaaaatagattttaaagaaaaagtgtaggctaatccaacagactcgataaacctacggactgaatagagagtgaaaagcatgctatccaaaattggagagcgaagatggagaaatagagagtcactaaatttgaagagtcgtttatagagtctattggatacaatttttttttaatattagctaaatttacctttacaaaaccatatagctagtctcttggagttgctcttatattgtctgtttagattgtgcaagattttgattggatttagtgtaaggagtttgttgatgctgcttaacatttgacagcaatattatgattgtaacttatataaatcaactaaggtttggaactgctatgccaggtctttgtcaattatgaatagaataacattaattgctttctttttgggcaaacattttttctataaaaattaatccctctctgtttagtttactcggtgccattttgattttgaaggtggactgcagggataaactcaaagaggaagaaactgaagagtgctgtcatggtcactatacatatggggatttgggtgacaggtgcttcgggactataggccgatgcttgacagagaccctcgtccttgtttcgcagatagcgctctccttcatccgctcactgtcgtccctttctccgttcagtatatttgcagacgtgtgcaatgtccttgccatggcaatcgttatcaaagaggatcttcagctctttgaccaccccttttcaaacagaagcgcttttaatggactgtgggcagtaccattcaccttcggtgttgcagtcttctgtttcgaaggattcagcatgacccttgcactagaagcgtcgatggcagaccggagaaagttccgctcggtgctttcccaagcagttgccgccattatagccgtgtatgtctgttttggagtttgtgggtacttggcctatggcgaggccaccaaagacatcataacacttaatcttccgaacaattggtcgtctgctgcagttaaggttggcctatgcatcgcactggcattcaccttcccagtcatgatgcacccgatccatgagatcgtcgagacaaggttcagatccaacagatgctttcggaagctcagccacaacgatggcggcgcggagtggataggcttgcacgcaagccgcgtcctcgtggtggcggtcctcactgtggtggcgtccttcatccccttctttgggtccttcatctcgttcgtcgggagcaccatgtgcgcgcttctctcctttgtgctgccggctctcttccatctcagcattgtaggctcgtcaatacccttgtggaggcgggtgctggactacggcatccttctctttggtctggctttcgctggatatggtcttgtcactgctctctcctcgcattgaacaatggcccaaacagtcaaaaaagtgcagagatcaggatatcttgtgatgacaggagtcaaatggatgctaggagcaccatatatcagatagcacggctcggattagtgcgtgattgaactgatccgcttcaacccatatagccgcagtcatccatggaagatataccttagcggattggaatggtgatttcgagaaaccaagttgacattgttctatgcatgttacaaaaatctacagatgtcatgaactttaagagccatatcttaatcgcgtatgcatgttacacatctacatgtgtcacgtttcaaaaaaaaagtttatgttgactattcgatccgatccatcatgtatgtcacatttgaataacaaaaatccattaatgtgtatgtttgcagtgctcgcttaaagggtaactggaacgtgcctgtgtaatgccacggaaca

SEQ ID NO: 36700 - DNA, 973 bp, Zea Mays
ctcgtcagcattaagcaacgagtgctgtgtgtgactgagagagctgagaccagagtgcaggagagctagtttcgtcatcagtgcagttaagctgctcgtttccagtccagacaggtccagagtcttgccaggtagctagccaggaaagggtccggtagtacggtgatccattcatggcggcggaggtggccggaggaggagctgttggtgcgccgtcgtcgtccccgcggcgcgtggtggtggcggtggacgagagcgaggagagcatgcacgcgctctcctggtgcctctccaacgtcgtctcggcgggcaaggccgccgtggcgccacccccgtccgtggtgctcgtccacgctcggtccccgcgcccgctctactacccgaccatcgatggcaccgggtacgtgatgacccagcaggtggtggactgcatggagcagtacatggcctccgccgccgacaccgtcgtcaccaaggccaagaccatctgcaccgccttccccgacgtgagggtggagacgtgcgtggagaagggcgacccgcgcgacgtgatctgcggcgccgccgagaaggccggcgccgacatgctcgtcatgggcagccacggctacggcttcctgcagtgggcgctcatgggcagcgtcagcaaccactgcgtgcagaactgcaagtgccccgtcgtcgtcgtcaagaggcccgactctgcttgagagttgagacacgctagcgtgcagtggccgttgcttgattagcttgtgtacagttgtgtgttgctgatgagcatcgttatcgtgttgtacagtaccgtgtcatgtaatgaccgtctgcatatatctactagggttgtaaagtattgtcccccttgttctgtgcctctgttccgcccctccaacaaaggactctgaactctggtaataaaaaaaaggaaaaaaaaactccgtcgatctctgcccatctgagcagcgtctgcata

SEQ ID NO: 36701 - DNA, 183 bp, Zea Mays
aaaaatagggaacaccagcatttcaatcaacatataacgctgaatgataatatgtttttcctacggacaatattgagtgctgcaaacccagtggtttatacatcaaatgggattgtttctataatagcagatattgttaacatgttccagaaccacaaatgaatttattagtagaggctaaat

SEQ ID NO: 36702 - DNA, 4003 bp, Zea Mays
aattatgcaaagtcacttgtttagatcgtcaaaaatacaattttctcctccctctctcccccaatcctctcttctagccacggccgcatgctcgctcgcacgcgcccgcgccgccgttctacttccaagtacagctcgcctcggcttgccagcgccatcttttcttcctcccactccctcacctgaccggtctgattctgggtcgatgtcggtcaccatggtccgacccatggtcggaggagagcggagacctgcggtagcagcatggcgcggacacggggaacggagatcagtgaaggccttccgcggaagagtggcggggaagagaagcgacggggaagcgcactgccgcgctcacatggccgaccaaggtaggcatgtgcctgaagacatttgaattcatgaaccagatctcgaaaatgtagatttccaagcaaaaatgggcaaagcgcctctaatcgctctccccccacaataggcttgccatttgttgccatgcaaccaacgagcgtccagcaccaagcaaacgagagaaagaaagagtgggtgtgagcactgagcatggagctcgccttgggggccatggccagcttggcccccaagctgggcgacctgctcatggaggagtatgtcgtgcacaagggcctcaagcccgacatcgagtccctctccgatgagcttgtgatgatgaacgccgccctccttgacgcgtcccggattccacctgaccagctcactgcggtggaaaagctctgggcacgcaaggtccgggacctgtcgtatgacatggaggacgccattgacgatttcatcctgcgtgtggctggtggtgacaactcagccaccgactccaaactcttaaagaagatccttgtgaaggtcaaggacgtgatgtcaataaagaagctcaaggatcgacgccagatctccgacaaggtcaaagacatcaagaaactctccagtgagttggctgagcttcgtgccaagtacacagtaaggggtgcaggtgctgatcttgctgcgagcatcggcattgacccccgtgtcatcaatctgtacaagaaagagtcggatctcgttggcatccaggagtcaagggacaaagtcatcaggatgctgtctttagggaccaaatatgatgatgcgcatgcgtctcatcaggatctaaagatagtctctatagtcggggttggaggattagattctagtggaacttgatgccaagtataagcaagttgacatgaccagatgggatctagaacaatttggaaaagaactgcatgaattcttacagaacaagaggtacttgatcgttgttgatgacatatgggatgttggatcatgggaagcgatcagatatggcttgaagaacaataattgtggaagtagaataatcatgactactcggaattttgagcttgtcacgaaagtagaagaggtttatagattaaaacctctttctaatgaaaactctaagaaactattttacaaaagaatacaaagtcaggaaggagaaagtcttgatgatgaactgtccactgaaatcatagataaatgtggcggcataccattggctatcattgcaatagctagtttgttggttgaaagaccatgtgaggagtggtcaaaagtgtatcactcaatcagtcttgggaatggagacaatacaacaaagatattgtcctacagctactatgatcttccttcttatctcaagccatgtctactgcaactaagcatatttcctgaagactatcagtttgatacaaatgctgcaatatggatgtggataggtgagggtctagtccatcttgagaaagaggagggtagcctatttgtggttggagaaagatatttcaaggagcttgtgaatagaagcatgatccagccgatagaggacaaatatgatcggttggtagaagtattccgtattcacgacattgtatttgatcttatccgtaagttgttgaaagatgaagacttcattacccttttggacagcggtgggcaacattcacctcaagctagtttaagaagagagaagaaaacatgtgtgcctcgctctgactgcaagctacgtcggctggctgtccgaaatcaccatgtgcagcgcttccctgaagacatcatggacataccagaggcgttgaggtcacttaacattatatattgtaatattgcgattatgaccccacttcatagtttcagagtctgtcgtgtgctatgtatagaatacagctatgtaccgatcagcctaaagcatctagggaagttgttgcatctcaagtacctagagctatatggcacgcctgttgatgagctccctaaggaaattgggcatctgaggtctcttcagacactgttattagtcaatactggactagacgagctgccaccggctgtttgctcgcttacacggctgatgtgcctgatggctgaggggttcaaaaggttgccagctgacaagatggggaacctaacgtccctggaggagctacggctagagagcatagttggtcagagtgccacccaagccctagtggcagagcttggcaagctgacgaggttgagggtggtcaacatcaccttttcagaggagcttgaggagagcttgcaagaagcattggtgcaatctctgttcaatctgtggggacttcaggagctagcactttcttctaaatggtcgcagcagggaagcgctatgtggggagactgggagccaccaaggcagctcaggcgcctgattattaaaggtatcatcttctcacgacagcctcgatggatcaaccgctcttgcatggcacacctctgcttcttatctctggcggtgcacgctgttgaagcacaggacctagataacctagcgaggttgccagagctccggtacctcaagctagatggtgtcagctggcctccaaggtatgatactggcccggacgacttcaggaatctgaggttctgcgatgtgggtacaatgctcgtgtttcatatgggcgccatgccaaggcttgaagagctggtgtttggagtttgtgcaggatactggagttgggaacacaatggtgtgctgttggagcagtgcccaacaatggatgtgattgaagatcttgacttgggcctggataacctcctttcacttgagcaagtcacggtcgtagtcgactgttcaggcgctactgctgcaaaagtgcaggaggtggaggccgtggtcatgcgtgccatggaaaatcatgccaaccgtccaaccataaaaatggaacgacttcagcgacgcattgaaaaggaaggccgcttgctcgagttcaaggataaatctgatgctttcttcatcacattcctgcggttgcttcgacatcctctaaaatccgttatttcccacgactgtgcgggtgccagcatgtgcgaggtgcagaaagtggaaccagcttggagacatgcagccgaggttcatcctaaccatccaagtattgaactgatcagaaaaaacaacgacgaaattgcctcctcatctgaccatcccaacacagagctcaggaattgataactcggtatgtccaatccttccaaaccagccgcagctttcacgttgtctcatcccttcctacgggcttggagattttagatgctatatttatcgagtgatctagacgacatgattgagggtctatatatcgtgtgtttatgacttatgtattgtgaggttaaaatttatgagaggacatgtatgattcattatgtgtggtcaagattgcattgtgtgtaattgagatttgtatgtggatgtaaatgaataattgtgtgtttaagatttatgtattgtgtggttaaaatttatgagtgaacatatacgatcaattgtgtgtttgtgtgtggtcaatactatgtattgtgtatttgtgcgtgggcgtgaatgaacaatcacgtatagttaggaattatttattatgagcttttctgaaaccatggcagctgactctgctggtaatgaacccacagccgcaaa

SEQ ID NO: 36703 - DNA, 466 bp, Zea Mays
ggataaaccacttacaaccaggatcgcaagattaagtaaacacaaatcacacaccaacattttgcagcggaaaatcttattaccaaattttacaagttacaacaagtttacattgtatttatcgtagtgattacaaaagtggttcaaaggaataactttgagatgttataaattatttgtaagtttgaaatatatgctagctcaagtgaccatcctcaataagaagataaagatggggtatacttatataagaaggccgagcccaccgacacttaacaccatcaacaacagcacaaaactataacctgaaaaacaacagggaataaaaccttgagtatggaattactcagcaagacttacccgactaaagaaaagactctcaagggtatgcaggctagagggaatcaaggtatggcttatcaagaatcaaagactgttttgtagaagagcttatgtcggggaccat

SEQ ID NO: 36704 - DNA, 725 bp, Zea Mays
aatctgctatgcagagggcatgccaactaatgagaatggcatcatgttaacaaaaatgaatgagaaatcagtcatttctaatggaaaggctttcttgaaaaggtcacaagctcacacttgtttggctctatagcacttcttgcgaaaagtgggaatctttctctaactgaattaatgttagaatggagccgaacaagtttatgtttttatgcgacttcaagagttgacaaaggtttaagttctgagctccagaatcagaattggagagttctttctgtagctaatgaatgtagcatagaggttcctgtgttttaaatgttcaaaggcttcagcagttgcttctcaccttggctactctaataaaaaagggaactatgtgactcatctgttctggtgattggatatataatgaaaaatattctgtgaggaagacttcgcaaggagatgtggttctgtcacttatgtgactgttgccgtgtatggagacgaggacaagccagcgcttataatgtttacagagatgtggttctgtgactgttgtcgtgtactcaggctttatttcaacaggatttaaatatgagatgtagagtgattgatgtacatcacttcactaatcatgaaatctgtagaaggcgaaactactagccatatatgatatgcataatctgtgtggtaaacattatcaatatcacacaaattatttttaatgggttttgcattatcat

SEQ ID NO: 36705 - DNA, 1640 bp, Zea Mays
atcttaggtctgtttaggccagtgatattcacatacgaagcaatacatcctgtccagtttctccatgtcggagccccctgctaaaggcgaggtccccccaacacacaagtggcaaaatgtcaccctctcctatttcgagccccagaactacatcaggcacttccacacccctatctggtggtaatggtgcaattccttttaaccacctaaggtatgcaacttacagcagcgagggatttgggaccacatcaagaggcctagatgatcacttctccaactgtcataaagatctgaaccttgggcattttgctgaggcgcatcaagtctcacagggacctagggaaagggtagtatctgaagctgatattctgagccctcaatttagaaagaaacttggaaatgtatttgacttgcgggaaaggttgtccccttctgaacattttactcgtcgtgccttggtggatcatgtggagctaaatccttcaaaccctggactaaagcgtggtaaataactagagtataaaaggcagggttgcatttttttttgaagtttgttgaagtaactggtggtttttggctactatgaccattcaatggctgcaagtgtatcatagtatcagaaagattgataatttctttagaagctaatggttgccaatggatgggatctctgttgtcatcaacgcaattcaagtcaacaaagattctgcctattcctacatggctgagcaagtttccttagcttactaaactggcgtgctaacaagtgacacgtgtcaattgatgggactgactgaatcacggaatgacccaaagcagtaactctccatctgtatacccctcaccccaatatgtacagaaggaatctcaactaggaacctagaatttgcacaggaaaaaaaaacaggtgtgctagccatttggcaatcagtgccagtttatctgttgctccacagttacatatcccacccatggttgaggtggagctgcaaagtccgttggaattatcttgtagcagtttctcggcaagatgagtcgcttcattcactgtacgtcggtgccggctactctgaaacttacatactataagaatctggtcccttactaactgcatgtcgtccgaaccactgcatgaacttgtttgcactgctgctgggattacgaatgttgtaacaaagcacgggttttgctgcttgatggcggaagcaaaatgtagtacagattaggtgatatgcagtcaagtgtttacctgtctgggtgatggcattcgtcaggaaatttctgccctgggctgttaccttgcatcgggggcagttactggcatgccctcggctgctcacaagtttcaggccatggtccagccccccgctgggctggtccttgcggtttatggcgatctgttgtcgtgtgtccgaggtcgcgatcgctgccagggtcgtggtggtgtctgcctgtctggtcatggctggtgtggccttgccctcccgaggatgcacctcgccgagttgcgctcctcactcctaccttggatgctccggggctgggggaccagaccaatctcatatggtccttggtggtggtagctggaactgaaaggggcctctggctgcgcggtccgccacaagaaacaacaatctcag

SEQ ID NO: 36706 - DNA, 1284 bp, Zea Mays
ctcgtttgtactttctccctttgaggaaagagtttccccttttctgtgcttcaagttcttccttccagtgttgaagaagctgctggaagaacgaagagatgagctttctcttgaaggaaaaagagatgatcattgctgctggtatcgccagcatgggtaggggaaggattgagatcaagaggatcgagaacaacacgagccggcaggtcaccttctgcaagcgccgcaatgggctcctcaagaaggcgtatgagctctccgtcctctgcgacgctgaggtggccctcatcgtcttctctagccgtggtcgcctctacgagtatgccaacaacagtgtcaaggctactattgagaggtacaagaaggcacacaccgttggctcttcctctgggccaccgctcctagagcacaatgcccagcaattctaccagcaagaatcagcaaaactgcgcaaccagatccagatgctgcaaaacactaacaggcacttggttggtgattccgtgggaaacctgtcactcaaggagctgaagcagctggagagccgccttgagaaaggcatctctaagatcagggccaggaagagtgagctgctggctgcggagatcagttacatggccaaaagggagactgagcttcagaatgaccacatgaccctcaggaccaagattgaggagggagagcaacagctgcagcaggtgaccgtggcacggtcagttgcagcagcagcagcagctgccaccaacttggagctgaacccattcttagagatggataccaaatgcttcttcactggcggccccttcgcaacgctggacatgaagtgctttctccccggcagcttgcagcagatgctggaggcacagcagcgccagatgctcgccaccgagctgaacctcggctaccaactggcgccgcctggttctgacgctgccgacaataaccctcatcatcagttctaaactggatgcatgcacgagaagcttttcaagcgaactgtgaacgatggaagctggctgttgcctctagatgttcttggcttccatgacctagcttattatggtgtgtattgttgttgccttttgtgtgtgattctccttgctactctactgatggagaactaaacctaatcgattggacataatgatcaaatgctacagatcctgtgatgctgtgatcaggttaaggcaaaacatgtatactgattgcttaaatgggtttacgagtgacgacaatgctatttgttgcttctattactgctcaactctctcttgcttccggttt

SEQ ID NO: 36707 - DNA, 493 bp, Zea Mays
acatagagaatcctccggtcgcgtactgatttatttccttcggcgccaaatcttctcggatttttggcgtgaacacaagtgggaggcgtcacgtaggagccagcatcggggcaaggcgacggatcgataacaagcaccaaagagggataggcgacgttgttgtagactcggaaaggggacgaacgacgatgtcgatgtgtcggcaccacgattcccgatcgacgaagacgatggtatgacgacttatcggagctgaggcgaacgcgatctaggtaccatagcagcacgccgataagtccatgacaacaccacgaggtagacgcgacaacgcacggcccaacggacaaaggagtgcgacggctggcgagctgactgaggaagtcggcgccgagctgttgctgctccaccgatggagaggacccaaaaaaatgacgaggaaagagaggaagctctagccgagcgctggccgagcgctccagcagcaaggagaaac

SEQ ID NO: 36708 - DNA, 254 bp, Zea Mays
ccaggttgtccacattgcaaccactgctcaggagaagacgaagccgtggaaggagacttctaggagttccaagactacgacgagttctaggtgtgggttggcggcaaacccccaatcagctgcctgtgaatgccctatctttactgtgtttcgcttagcactttgatttatccgttaagttgatgactatgtggatgtctctaactctgtgatgtaataagttaatactcttttatgttattattcgagcactg

SEQ ID NO: 36709 - DNA, 1395 bp, Zea Mays
caaatatttaagaacgtagatactattatttataaagagaattttaaaataaaaaagaagcagagaataaattagggagctgtttgagaccggctgacagccacaacagcagctcgtgacccattagtaggggagctgctggagcacacgcacggccacgccccgatatcgccatggctatcctcgccgttgcctctccactcaaaaccctaaaccctagccccggggaccacagccgctgccgcctctcctcttccctcctccaccttccgctaccagtgccacgatggcgccgcctccggtgctccgctcagtacagtgaggcggcggcgcagcccacgtcgacaacgacggcgcgtccagcggacataccctggagcaaggagctctgcaactcggtgcggctcattgggactgtaggcaccgacgtagagctgcggcagctgcccagcggctccgccgttgcgaggggtcgcctcgccgtatggaagtcagccaccgagactacatgggtaactctacaattctgggacgatcttgctattgtggcctctgagcatgttaagaagggtgaccggatatttgtttctggacggcttgtgtcagatactgttgatgaggggcctgagaagcggcatgtttactacaagcttgcagttcaacagttgaatttcatcgagtcccagccagttcgattatatgaaccagaggcaagccaggatgccctagaagaacccaaggtatccagacttcaagcataagcagactggcgaagcactatgggttgacgggaggaacaaccccaactgggttatatctcagctggcggttttggactcgagaatgagttcgctgcaagacaatgagaggaaaccagtctcctatatgtatgctgacgagttcatgacattggacggcaaccgatagtcgttatggaggagggaagcttcgctcgtgccgattggctggctgttatggcgagcgagatcatgctgtcgacctgtcttagtagctagctcatgcttgctgtctcagttttgttgagcggctctggagggttgcgtgttatgagcgtcgtccgtagtatggtttgtgacataaggtagctatgatgagcctagaacaaacataaacaaagtgcgggggaaacccttgcttttagtgactccattagtagtgctatgtggtttgtgacatggtttttaactatgatgttacgccgaatggtaatatattgaagaacgtgccgtggccctacacaacttagttattatttagactagatggagcacttaccaatgttggacttgttaaatctgggttttctgaatgtaaatgatactagtaattgtggttaagattaatctatggtaggcctggaataccaggactagg

SEQ ID NO: 36710 - DNA, 1224 bp, Zea Mays
cagcaacctccttattcttcgtcgtcaattcacgtcgcgttcgcgaccttctcgtcgaccccgacgatttatcttccaattgcgcgctagttgcgttgaactcggaagctacctgtcacgctcgatcctggaggtctttgtctcgtcatcgtttcagcgaattccaaggtggttttaggtaagttgattcgctactccttttattttgttttaataaatggattgatagatatgtaggtcgcgacaatttttattaatttagcatatatatattgtgatgttcgatttagataaataggtaaatcaagtaattaagatacatagtttaaagagttaataaaaaactaggaaaaaatagattttctagtgtaacatgtaatttggttaatgaatatagtcgatgccctgctgtgatatccatggtgcttaatgcttgattttaagtgtttcatcctttttagtgtagattatctaaattatactcgtatactcgtgctcatacatgtgcatcgtgcatctcatgaggtacgttaattaatcgagcgatgcggaagacaagccaagtcgaccccaagcgcggactactccgcatggtggtgttgatggacgaacccacctaatcaagtgttaggacaaggatgatcgtcaagtggacgtcgtctaacaaacactaacgtagtgtttattccaggcaatccccggtgaagagcctgtggagctttgccacttttgtgcaaaggtggttcccaagcaggaggaagaaccgaaaatagaagcgtgttgctgtggatggtgctaagtgccagtgggctcggccttcttataagtctcagtaactcttctatacttcttattgaggatggtcacttaagctagcatatatttcaaacttataaataatttataatatttcaaagtatatttctttgaatcacctttgtaatcactccaatcttgtacactgtaaacttgatgtaacttgtaaaatttggtaataagatttccgctgcaaaaatgttggtgtgtgatttgtgtttacttaatcttgcgatcttggttgttagtggttcatccgaggtccttggggcactcggacagatcctgttaagttatttggtgcacatgcatagccgtctgaggtctttgagacaaggacaggtgcatgtgggcccaataacttgggaggttctgccacagctggtaccggagcaggattaagtatat

SEQ ID NO: 36711 - DNA, 746 bp, Zea Mays
aatgttcttgcttgtcatggtaaaattgagctagactgctttcctgcttgtacctattattgaactatttttctaaactattactgaactgctttcctgaactattttcctagcaaggccaaaaacacttagaactactttcctgcttttaatttgcaccaaccaaaaggataggttctattttgtcaccgaagaaactgttctatgtccaaagccttgagaagactgtccaggatgattttcagaagctttcttccctgtaccttcaagtcagcacaatcagtcaggcccttaactctatgacgcggtctcgaaacctcgcaggctcgtagctggtcatttgtgtaccgtcctaggttcttgctgacctttgccttcttggtggcgcagctgctgagtgatctgagtctagtcccataccttactgtcgtatgtggtctttcctcatctcctcacattttgtggtgtttgcattaaccttaatctgtttttgtgatcttggggatttcgggttttagattggcgattggtcagtggtgtgctgtgtgcatggtgcatttgagctctctatgcatcagattgagcttttatatacaagtcatgatttgtgttttaggcttaaccctatgggataaagctaacgaagaatcactgctaaaatatgtttccattattgattgtagcatgattgtgtttaagaaatatgttcaaacttttgtgtcttcattatcaaatattttctcata

SEQ ID NO: 36712 - DNA, 2121 bp, Zea Mays
cagacagtcagactgctagacaccacagcgtgctcagacagtcagaacggatcgagcgttcatggagattggtggtcagacggagagcggtgccaatggaggcggcggcggcgggttccgggcggcgaggtgctgggagctgctccgctgggcggcgggcgtgctccggggcaaggccgtcgggctcgccggcaggctgggcaggatcgcgagggacgagccccggcgggtggcgcactcggtcaaggtcggcctggcgctcacgctggtgtccgtgctctactacgtcaggcctctgttcaacagctggggggcctccaccatgtgggccgtgctcaccgtcgtcgtcgtcatggagtacaccgtcggtggcacgctgtgcaaaggcctgaacagagcgtcggggacgctggtcgccggcttcatcgccgtcggggctcacaaggtggcctacatgtgtggggacaaggcagagcccgtactgctcgccatcttcgtcttcttactgtgtacgtacctgctggccgaccatttttaccgcaccgcacgcatgcatatgcaatgctgtgttgcatgcacttcttgcagcgtcggcggcgacgttctcgcggttcatcccggaggtgaaggcgcggtacgactacggcgtgaccatcttcatcctcaccttcagcctggtggccgtgtcgagctaccgcgtcgacgagctcatccgcctcgcgcaccgccgcttctccaccatcgccgtcggcgtcgccacctgcctctgcaccaccatcttcgtcttcccggtctgggccggtgagggcctccacaagctcgccatcgcaaacctcaacaagctggcggagttcttggaaggaatcgaatctgaatgcttcagagagaacgctacattcgagaatttggaagctaaaccctttctccaagtgtaccagagcgtcctcaactccaaggccactgaagactctttggtaagtgcctagtacttcactttgcaaacgatgcctacacctaaccttgtttctccagtctccctcttgagaaattaaatacttttagctttagatatatctagaattatcgagattttatgttgtataataactaacattagattaaattattgaacttgtttttttgtaataaattgatttaaatgtataaattagaaaatgtggccgacacaatctaaaatggtactgttgggcaccaaagctcctgaatccagaaaaaaaatatacatagaagtaaatgcgatccaatggcatgtgttcccaaaaccccccgcagtgcaacttcgccaagtgggagccatgccatggcaaattcaaattgcgacatccatggagccaataccagaagctcggcgctctttgtcgcgagtgcgcttcttcaatggaggctctctcctcctacgtcgtcaccctagcaagaaccgaggtaactgcagatcgatccatccatctacgtaacgtacttcgcgatcaatggattagattacatacaaagaaccatcctacttccctactagattctccctgctcactgcagtatcctgaagcgcatccggagctatgctcacagcaggttcgaacagcatgccgccagatgagcttgcactcggccaaggcgctccgagagctcacagcagcgatgcggacgatgacgactgtaccgtccccagccagcgtccacgtgtctgcagcgatcaaagcggcgaaaggcctcagagacgggttatcagagggtgcggatctggcgcgagcgatgcatgttgctgttatcgcatctcttctctctgagttggttaccaagaccaagcagatcactgagtccgttgatgtcctcgcgcgacttgcccgcttcagaaaccctgaaaccactcagactcacaagggtgtggctatcgatgtagtgagctgagagtgagaagcagacgatcttcggtgggacttcactagtgatactctgtatttgtatcagaagccttttgctgaatgggataaaacagcgagctagtatgaagtacaatactaactgtgcatacagcaagtgactgatcctttgatttgtggaatcaattatgatgctggattgcgacggtaaatgtcactgtct

SEQ ID NO: 36713 - DNA, 2214 bp, Zea Mays
tgatctagcccgtccgaaggaaccacttcacactactctccgcggctctgccgtccgttctcctctcgccgccgccggccgcgcctccaccctcgcggcactcgcatggcggcgccggctctccgtatcactgcgcggctgggacttgcacttgacggtgccaccgccgcgagacggcgcgaggcctcggcgcctgtggcggtgccggccgcgccgtggctgaagaaggcggcggtccggtgtcagcgagccgtcggtgccgctgttgccgagaagaaggatgcgccggtatcggttgcgcaggatagaagcggcgacgggggcgcggcgccggagctcaccgtcgtgatgaagttcggcgggtcgtcagtggcctcggccgagcggatgcgggaggtggcagacctcatcctcagcttccccgaggagcacccggtcgtcgtgctctcagcgatgggaaagaccaccaacaaactcctcatggctggggaaaaggcagtgggctgtggtgcgaccaacgtctcggagcttgatgagctctcctttgtaaaggaattgcatcttgggacgcttgatcagcttgggctagatagatcaattgtttgtggtttgttggatgaacttgaacaacttcttaagggaattgctatgatgaaagagctgactcttaggacacgagattatctagtttcatttggtgaatgcatgtctacaagaatatttgctgcacttttaaacaaaattggagtaaaagctcggcagtatgatgcatttgatcttggctttataactaccgatgatttcacaaatgcggatattctggaagcaacttatcctgctgttgcaaggaggctacatgtggaatggattaatgatcctgctatacctatagtcactggctttcttgggatggagatctggtgcaataactaccttgggcaggggtggtagtgacttgacagctacaaccattggcaaagccttgggattaagagaaatccaggtttggaaagatgttgatggtgttttaacatgtgacccaaatatccatcctaaggcaaaacctgtgccatacttgacatttgatgaggcagctgaacttgcctattttggagcgcaggttttgcatccacaatcaatgcggccagctagagaaggcgatgtacctgtgagggttaagaattcttataaccgtcgagcccctggtacccttatcactaaagcaagagatatgagtaagactgttttgactagcattgttttgaaatcaaatattacaatgcttgatatagtcagcacacgcatgcttggccagtacgggtttctagctaaggttttttcgatatttgaagacttgggcatctctgttgattgtgtggctaccagtgaagtcagcatatctttgacactggatccatcgaaactatggagttgtgaattggttcagcacaaaaatgaacttgatgatgtcattgaagagcttgagaagatagcagttgttcatctactgcagaacaggtcaataatatctttaattggaaatgtgcagaggtcgtctttgattcttgaaaaggctttcaatgttctacgaagaaacggtgtcaatgtccagatgatatcgcaaggggcgtccaaggtgaacatttccttggtggtccatgacagtgaggcaaaacagtgtgttcaagccctccactccgcgttctttgagaatggtttcttgttggaagctgatgagttggatgttctgcatgatggctttacatcgcattccaatggcacaatccacagccattagccgaggatttgatattcatctgtttggctactgtagtgccacttgtgatcaaatcctgatctttggtcgatatctaatgtttttatgaggctacgaaggattcggctttagagctactacccatcagaagtctaggaatttgttcagagccactacttaggattttggttagagattaatgatactgtttggttttctgtacaattgattgaaagtatatacttagttatcttggccaacctatcaaaccacggaggatgcaagcggatttgtccgtaaacctttaaggttagtttggaaacctcatttttgcaagggaaattagttcatttttttttgtgaaaataggaatcccaaaatggagtttctaaactagccataattgttacatgttactacataagccacaaaaaaaa

SEQ ID NO: 36714 - DNA, 1354 bp, Zea Mays
cgtgttgacatccgcccccttcccctcttcgactcacggcccacccactgcacgcgcaagcgagaggacggctccgcctccgtcccatggatggccgccggcgccacctcatggtgttcacggtcgcggtcactgctaggtggtggtccggcgtgctagatctcacgcctccagggcaggctccctcgcatgggtcgccgtttcctcatggtgttcacggtcgcgctcatcgctcgcagcgcggaggcgtcgatctgcatctatgatcaggagcccttctgcgaggtggacaatgcctcctcctctctggccaatacttctctgccagtcgcctgctcccaaggggaggggcgctggaatacgggcccgcagatggcgtcggctgtgcaggcggccatgatcgacgaagcctcctcagatctgtgctcatcgccaccagggtgataacctttgtatctcgatcctgctcagcatctcggtggtcgtgcggtgccagctggttcggtcggggcagcaggcgctcctggcacccgcctatccccgagggcgcgaccaaagggagtccacgacgaggaagcgacagggccgaaatcagatatgaatgccattggaggggtgcccaccggccggcgaggccccggctgcccgaccggccagccagtcggagtcgggccgggtggtctccgtcgcagggctatcaactttagatcttgaacatgggacccaaatcactggcctggagcacaatacgaagaaaactagcttatgattgcagatctcacccatgggttcaatgagtcaaaaaatcgaaattttcacggaagatgagatcgcaagtcgatgatgaggtatatgatgctttagccgtcaccttctttctatcttggaggatattgaaaatttgattcaaagtaagcctttcctgttggtgctgtttcgggacattgatcgttgcatggtcatgttcttctattgtagacttgcagttatcaaagctgggttggttttgaatgtcctgcactaggacatgttaatttttgaacatcgccaatcatgtttgtggtctggttgctttcactcttaattttaattttaaaaaacatagttggcttgtactgtccaaccttttttttggtcaagcgtactaaactactaatttgcttccaagagaatctgtagcggttgttcagttatctagcttgggaatagataaatatattcaagaaagtctatatagccaccagatgtctataaactacagagatgagactgtttaggatatagttttgaagaaaacatcgtatcattcatttttttcacaatgataataataaaaagattaccgtttgttttc

SEQ ID NO: 36715 - DNA, 946 bp, Zea Mays
taagcttgttgaccattttcagcatgtgtaaattggcggttagatttcgttcaagaaatagcatccaagacaaatagcgttgttggcgatctgaggcagctggtaggcagtctaggcttgggcgcacgcgagccagagagggagggctgggagcacgtcatctccaagagcagcgacgacgtctcctacaaggcctggtgcgacaagcccacgttttcggcgatgcgatgagggttttcggcgatccgtgcttgctagttgcgctctacgatcaggcggagggggtttgagatgtgaatattccactttttcattctagaacatcaaacctgagttgctctacgatcaggcggaggttgttttgtagttgccaattgcgtacatgcattgcaacagatctgggctctagaagctgctaacttggtagcagaaagattgaggcattgcatagcaaaccactggatcaaagagtttagtgaatggccacagtgcatgttcttgagttggcatcaaagttccttccatataataataacaaaatatttgacataatgaatctgttggaggatagacttcaacatgcaaatggagccattgttttggcaacaattaaagtttttctccattcccatgactgttgttcatcaacagcaagagaagaaggaagacaagtcagacaaaacagaagacgagaagaactgatgtatccatgttcatgcttccactgttgaaatgcatattcaacatagcttgctcagctcctatctgttgtttcaacgttgatttaaaagaagagctggtagttgtgggcttttgaacaatagctggaatgatctagctagctatatgtaaatgatctagttgtgaatgatattataactgtgatgcttttgtgaatatataattgtggtgcttttgtgtttatgtgatggatctatgactgtgg

SEQ ID NO: 36716 - DNA, 1253 bp, Zea Mays
caagctttttattaactctttaaattgtgtatattatatattaataaaacttcccatttttaacacctacagtcccgcaacactgagacctattgagacctcttttatcctacgacatcgaccaatttactaaaatgactcaggcaatctaataaatattagacctagtcagatcatttattaatccactcgcacgaataacaaatctgcttaccctgactaatttgacgagatagtcagaagcacggctacgggtttcggttgacgtcacgaggggccttcttttcttcggtaatcaactgctgaagatcttttcctcgtctgaataattttgacgaatcgaacttgagtcgcgcaggatgtccgagctttttgtcgcgcagtcggtgaatattactcggttagcttcgtcttcacttgactcttggaatttcttgatgacacgtaggacgacaacgagattaaacatgaagcgagctggcgaggacacgaatctagtgagggctctggcgatgacgaagttacgagcaagtgaggacgggttcaacagcttgacgaacacgaccacggttgtttgttgatgactgacgagctcacgacagaaacgataacgacgtggaatgacatactgaaatagggacgctgcaacatgggacgttttggcgagcagcaagcacgacgaggacacacaggcttgcgacccaggcaaactcggcacggaaacttaacgcgcgcagagaaacagcatggcacagtggagcacggaccaagcgccagcgagcaaggaaatttcgcgcgcgcagggaggaaacaccagagagacgtggctgctggcacgcacagaaaagatcgcgcgcgacgtagggacgacacaagaggacgcacgcgcaggggcgagctcaagggagacaagctgggtgcggccatggatgtgacggggaatacgcagggcaccggcacgaggaagcttgagctccaagcgagcagaggagctgggggtcgtgagctgcagcaggaaggggccggggcgagctcggccgggcagagggaaatcccacagcgagggagcacggcttgcaatggcgagtagaggatggaagccgcggggaagagagaagcagggagggcagctgggagtagggaatgcacggcggctggagattgaggataaggaaactgcgcgcggggaaggggataaagaagacacgtcggctgcatttttttttcacctgtgcttgagcggctatggatag

SEQ ID NO: 36717 - DNA, 565 bp, Zea Mays
cacagccgcccagcaacaccctactcgcctcctcgatcgggaaaccgcatacgccgcctcctctcccctttccaccgagctagaaacggctggcacaatagtctctgctattgatggcgctgaagacagccgctgacccttcttcccccccggcgacctctgatcttctcccttctctataaatcgcaagctacgccctccgtggtgccgttccccgccttcatgtgctcgccccacgcctccccttcctgttgcgcgcaaagaacacgccgccgacatctatcctcatcgacactggtgttctcggccaccttccaccgccagaggactgctctgaagacccacatcgatctccgtcgccggtatctagctctgcagcgccgcccgccgccaagccgagctcaacgccgttctttccctctcctattcgacgttgctgcgagaagctgatttcgtggtagaggacctgaactcgtttgaggaagacccacaataaatgtttgagcaaggtgaatcagaagactttgacaaagatgttgacgagtattgagtctagcaacgctcc

SEQ ID NO: 36718 - DNA, 2506 bp, Zea Mays
atcgcccgcatgtgcatctcgtccgccacgggccacagccggcctcactccgcaagtccgcgaccatgcggtgcaccctctccgcccctctccggcgctgtctctcctccaccggcgccgccgatcctagcctagtctcttcagctgagcatgcgtaccggctcctccgccgccaccactccgacccgcagaggctctccgccgcgctgtccgcgtcgggtctcgacgcctcctcgccgcacctcctcgacgccgtcctccgccgctgtggcgctgcctcctccctcgcgctgcacttcttccactggtgctccccgtcgctgccctcgccgctcccgtcctccctagcgctcctcgccaagtccttctcccgcgcctcctccgcgccgtccccgtccctactcgcgccgctcccctctcaactccttggcccctccctcctctgccccgtcctgcgccgcctcccgcaaccgcgcctcctgccgttcgcgctctcactactctccgcccgccccgaccacgaccagcccgccctctttctttccctcctcgagtccctctccaaggccggccacgtcctcaccgccgagcagcttgtcgaggagctccagccccggctcccgctttcgctccgccactatacggccttgctctacggatggtgccgtcagggcaagctcgacgaggccaagcacgtgctcgctcgcatgaaggctgcggatgttgcccttgacgtcgtcgtatttaacaccctgctcgctggcttcgtcgcggaagggagattcgaggacgcgttcgagctggcggggcagatggagcagcgtggctgtccaccgaacgcggtgtcgtacaccaccctgattcaggggcttggcgcgagggggagagttgatgaggccatgcgcgtgtttgtggaaatgcgaaggaaggggtgcgcgcccgatgctgtcacgtacggcaccctggttaacacgttttgcaaggctggcaagatatcccaggggtacgagttcttggatgctatgtcgagggatggcctgcgggtggacgctgccgtgtaccatggtttctttgtagcacacgagaagaaggagcagcttgaggagtgcttggagctgatggagaggatgcgggagtgccggtgtccaccagatctcaagatatacaatgtggtgattcggttggcctgcaggcttggggagaccaagcaagccatgacattgtggaatgagatggaaagtgctgggctcagtcctgtggtcgatacatttgctatcgtggtgagtggccttgttgggcagggtttgctgattgaggcatgtagttattttaaagacatggttgggagggggctctttgtggtaccgcaatatggggtgctgaaggacctcctcaatgcgttggtcagagatgagaaacttgagcttgcaaaggatgtttggaaatgtattgtgagcaaaggctgtgagctcaatgtgagtgcatggactatctggattcatgcactgtttgcgaagaaacatgtcaaggaggcctgcctgtattgcttagacatgctagaggcaggactgatgccacagcctgacacatttgcaaagttgatgaaggggctgaagaagttgtacaaccgtcagattgctgctgagattactgagaaggttaggaagatggcggaggagagacatgttagctttaagatgtataagagacgtggggtgagggatcttgaagagaaactcaaggcaaagaggagaggacagaaaaagaggcatctgcggcagcctggtcatggtcagtctagtagggatgctggcaatttggatgcttctgatgaagtagaattttccggctaattgaaatagaattcattgggggcaatgcatctctgttcatttgaattgttttggggagtgatagacttactaaacaataaaggagtgctggtgatcatgccttgccatcataatattattcttatgctaaagatgtattgggtttcaggcaagagccaagtggtacatcgattacatgtgaagttgtgtgccaagagttactgaccatgaggaggccttgtttggctgtacctcaatccactccaatccacgtgtattggggtggattaaggggccgttcggttactgcagaatgaagtcctggaacaattcctatccgaattgtttctctcatttatataaattttgattagctggaataattcctggtgtattcctatgcaaacagggcctaagggtttgtctagctacactgcaatccatctcaatccacatgtggattggggtgaattgcaacgtaaccaaataagggccaaggtggaagcaatgtttcagattattatctttttttactcctgaaagcagtgggttttgaaacccgtttttttcttcgaaatgagggaaacagagataatcatgtatacgtaagtttggtgctggtgcaaccagttgggccaaaatttgtagctgatgaagcttcgttgttacttttc

SEQ ID NO: 36719 - DNA, 543 bp, Zea Mays
ttgtgcgattttagacgaatggctgtcgacggagaacaatggagtggacgaactgattagacgccatcttggagggggattgacgcttcaaggtccccaagatcgcagtcgtaagctgatgggtagtcctttgctagacgatgataataggcccgctaattcagcagagacggacatttttattcatgctgtggaacgtgtcttgcctaatttgccaaaaagttgcatagacaaaatcaagagactaatgggctgagctagcaagtacgtgatagcgacctgcaatggcacctatggacccggtaattttttggttttgtttcgccaggaatcgataccagacctgtgtattctgtgattaggcaccatctcatgtagtactaagcgcttcagtttatggcaagcttttctgcattccgaatgctaccgggtatgtagttgtaactaggacataaggcgccctatcgggtgccgagacaatgcagagttgattgcatagttcatgattgtcatttataatcctaagaatcagttgaaagtatc

SEQ ID NO: 36720 - DNA, 4451 bp, Zea Mays
aaaaggcttaaggaaaaaaaaccattttccggaggagaaaaaacccccgagaagaagaattcctctcgctcgaggggtgggaaagaagcggaaggggagacgagtcgagaggaagccctcgcctccggcacacgccatggtggagactcgccggagctccgccgccgccgccgggaagcgcacgtctccatcgccatcctcttcgtccgtacctcccccgaagcgctccaaggcggagtcctcggggtcaccgacggcgtccgcgcccggcagggccgaggaggattctgtggcgggagcggcacccgcgaggagcgccggctcggtcgatgacgcggcagcggtcgcacagaaagatcaaggagtcgataagccgtcttccgccgctgcagagagttcaaagcggaggaaggagcaggagcaacagcaacccgcagtgccatgggcgaagctgctctcggagtgctcacagactcctcactatcccatcagtgtggatcagatttctgttggtcaaagcaaaaactgtaatttgtggctgaaagaccaacctgttagcaaagtgctttgcaagctgcggcgccttgagcaaggaggtccatgtgagttagaagttatagggaagaagggtatggtccaattaaatggaaggtccgtaagtccaggcacaaaagttccccttacaggaggggatgaagtcatattcagttcatgcggcaagcatacttatatttttctttatcctttgaatgacaaagttcctaaaacggtgctatcatctgctgttagccttctagaagctcctgttgctagtgtaaagcgtatccgtacagataagagaacaggagacacttcagctgttgctggtacagagatgatgacatctacatctaatcagaaggatgtagcagcagtacctcccgcgtcagctggagagaacagccaaagagtagtgcggccattggcatcatctgcttctgataaattgaaagggcgtgctgtgagccctgaaaaggaatttgcgaatggggaaaatgctaatgaggttaattctaacatcgaagactctccaatggttgttgctgcagcccccatatctcctgatgctgctgcgaacgatacctgtcaacaaaatggctttgtctctgattctcatctcggtgcggaaatcggtaagactgcaacctataagataaggccagttctgaggatgattacaggatcaactatatccgagttcgatttgactggtgatgatctttttaaagctcttgaagatcagagggatcacatcatcagggagcttaacgcttcaaccaacgtgcctccaagtagatgccaagcctttaaggatgggatgaaacaaggaattatcaatccaagtgatattgatgtcacctttgagaattttccttattatctcagtgagaatacaaagaatgtgctcttgtcatctgcgttcatacacttaaaaaagaaggagttcatcaagcaatttgttgagatctcatcaataaaccagcgaattttgttatctggtccagcaggcaccttcaaaggatccagaattccagaaagatgttgggaaggctgataaatcaggggataaggcagctgccgagaagtttgcaatatatcagaagcatcgttcttcgttggcagacactgttcacttcaggaggccagctgcaccaacttctagtgtgaatgctgatattgtaggaacatccactctgcattctgcatctctaccaaaacaggaatcgtcaacagctacatccaagagttatacttttagagaaggtgatagggtgcgttatgtgggtccagctcaaccatgctcgttgtcacaaaggggaccaagttatggttatcgaggtagagtgatgcttgcttttgaagataatggatcctcaaaaattggagtccggtttgacaagcagatccctgatggtaatgatcttggtggtttgtgcgaggaagatcatggcttcttctgctctgctgaattactgcgcccagacttttctgctggtgaagaagttgagaggctagctatgaccgagttaatagaggtcatttcagaagagaacaaatctggacctctgatagtgttacttaaggatgtcgagaaatcattcacgggggttacagagtcactatcatctttgaggagcaaacttgaatcgcttccacctggtgttcttattataggatcccacacccagatggacagccgcaaagagaaggcacatcctggaggttttcttttcacgaagtttgccagtagtagccagactctttttgaccttttcccggatagctttggtagcaggttgcatgaaagaagcaaagaaagtccgaaaacaatgaaacatctaaataaacttttcccaaacaaaattttgatccagcttccacaggatgaagctctacttacagattggaagcagcagttggatcgtgatgttgaaacccttaaagccaaatcaaatattggtagcattcgcatgtttctgagccgcaatggaattgaatgcaatgatcttgaagaattattcatcaaagaccaatcattgagtaatgaaaatgtggacaagattgttgggtacgcagtaagttatcaccttaatcagaataaaattgaaacctctaaggatgccaaacttgtactcacaactgaaagccttaagcatgggctcaacatgctccaaagcatgcaaaatgataacaagagctccaaaaaatcactgaaggatgttgtcacagagaatgagtttgagaaaaggcttttggcagatgttatacctccaaatgacattggagttacctttgatgatattggagccttggagaatgtaaaggacacgttaaaggagctggtgatgctccctttgcaaagacctgagttgttctgcaaagggcagttaacaaagccttgcaaggggatattgcttttcggacctcctggcactggaaaaactatgcttgccaaagcagtagcaactgaagcaggcgctaatttcatcaatatatcaatgtcgagcattacatcgaagtggtttggtgaaggggagaagtatgtaaaggctgttttctcactagcaagtaaaatagcacccagtgttatatttattgatgaggtcgatagtatgctaggaaggagagaaaatccaggggagcatgaagcgatgcgcaagatgaagaatgaatttatggtaaattgggatgggttgcgcactaaagataaggagcgtgtgcttgttcttggtgctacaaataggccttttgacctcgacgaggctgtgattaggaggttcccccgcaggttaatggtaaacttgcccgatgcatcaaatagggagaaaattctaaaagtaattttggcaaaagaagagctgggatctgatgttgatatggactcgcttgccaatatgactgatggttattcaggaagcgacctgaagaatctgtgtgtgaccgcggcgcattaccccatccgagaaattctggagaaggaaaagaaggagaagaatttggctaaaacagaaggtaggccggagcctgcattatatggaagcgaggacatccgccctcttagcatagatgacttcaaatctgcccatgagcaggtttgtgcgagcgtttcgtccgactcggcgaacatgaacgagctccttcaatggaacgacctgtacggcgaaggcgggtcaaggaagaagaaagcgctgagctacttcatgtgatggggtgagagcatagaatccagaaggatcacagccgtggcataagatcagaaggaacacagagcggccatagtaccacacccactatggccctaaatccagtcaagttttcgctccttccccctccctcagtagccgccgccgccccgccgccgcctggtgtaattagaactgtgtacggagtcgagttggtttgccagctgtttcaaggttacagagttgagatttggaattacaatggcgccattgccctcctccaacccccccccccccccccccccccccccgttttcttcctcccataagttgcggtcactgtccttcttggactctctggcctttgttcttgtaaatgcgaaatgaagggatgtgaaataagaacatcttcgtcctgttgttgacagtatggtacacatatttaatttttgtacttgaccggcgatgataaattggatcggtgccaacataagaattatggaaaggtgcctttcctgcccgccgaaatctgtgtgtatgtcgagtgggctgggtattgtgaggtgaaattttatgcgtctcctgtcgtcttgtggttgcgaaatgcgtgggagcaaacgtccggcataatgaactttcgtcatttcttatggctgcgaaatgcatgggttcggtatgtatgaattttctctgtcataatgaacttggattctgataacggtgcattgc

SEQ ID NO: 36721 - DNA, 3041 bp, Zea Mays
cgaagctaatcgaaggaagaggagctgtggaccgcgtgcatactcgtcaatcacctccggaccccacctgcagtgacaatacatgctccactaaacgccacgccaagccgcctccacttgagctgacagctgagcagcgttcaaacttcaaacaatcaaacgagaggggaaaaccctagacgagccccccttgcaacggtcagatccattcctatatagtattcctccgccgccaacctcctgagcatcccatatctgtgtgtgctcaattcgccatccacaaaatcactgcacccgatcatcgtatcaggaggagaaggtaagagacgtgagggagatggaggcggcgacggccatggatttccacacgctctcgcgccgggagctccaggcgctgtgcaagcgcaacggcgtccgcgccaacatgaccaacgccgccatggccgaggcgctgcagggcctaacctcggtcgacggggtcgacgagatcggcacgactctctgtctgccgacggcgacgccaggaaggtcggcgatgaagtcggcggcgaagatggtggccgtcgaggagcagcagcacggtagcccgctcccccgcggccgccgcgtatcggtaaaatcaccagaggccatccggatggaggttggaggagaggacgagatgaaggagaacgtgaagactcccggcgtggtgctgcgcagcactcgccgcggtattcgggccacacccgcgcctcttcctactccggttccggcgtccagtgcgcgcgcaacagcgaggaggactgccgttcgtaggacgggcgaggtggcgccgaccccagccacccggaggagggcggcctctcgcaaagccgcgggggcagtggaggtggaccgccccgccgaagatgtatccgaggacaagacatcgaagatgacgagagctttggatcaggaagccgaggtggtggcggtcgcatcaaaagaggagaaggggcagcaagacgaaccgagagctgctctctcggatgtgaaatgtgatgacccaaagggggaggagaaggtgcagcaagaggaaccaaaagccgtggtcttggatgtgaaatgtgatggcccagagcaggaggaagttgtccagtttttggaaggggacaacaaagtggaggaagtggaggagggtgaggaagggtctgcagctgttttgggtaagagctgcaatgatcctaaggtggaggaagtggtggttgtcatggaggaacagttcacagagccccatgaaggaattgtgaaagagcaggaacctatcagtgttgagagatctgcttcagtggaagtcatggatgattcaccaatcctaggtgtgattgagaagaaacaggatgcctcagttgaagattgtgaggacttggctgagttctcacctgcaagggagatgactgatgaggccattcctgttactgaagataaggaagtggccatcagtgaggagtctgttactgaagataatgaagtggcaatcagtgaggaggctgttactgaagataaggaagtggccatcagtgaggaggccatcgaggaagatggttttgctaacactgttgagactgatcctaccccaaaggagattcttctgactgaaggtgaaatcatactcattgaaggcaaagaaggtgctgctaatgagatgccacaggctggtgagaccagtgaagaagatgaggaagattaccttgctgaattgaaagaaggggctgctgatcaggtgctgcaggctgagctggcagacaatgaaacaagtaaagaagatgaagatgacctaagtgaaaagagagaagggactgctgctaagatgctgcagggtgaagaagatgaagatgccctaagtgaagagagagaagggactgctgctaagatgctgcagggtgaaccgacagacgatgagaccagtgaagaagacgatctcgatgaagatgagggatgggcttcagatgatgatgagaacactgaggaaattggctctactgacgagaccgatgaagatcctgatgagaccaatgaggagagttacacctctgatgcagtccaaatgatgcagggatctgggatagctgaagatgccaacgaagatgcctctactgaagatgatgatttcagtggcgacctaccaccagagtttgaaaatatcatgatattcagtggtgctgaaaccgagagtgacattgctcctccagtgctcgaggaaaacaaggatgctgttgtatctgcaacaaaaactgcaaagtccctggatgattctgccttaaaaacagggcaggaggaggagggtcctgaagaggttgacaacgttgtgaagtccctggatgaagaggtagaatcaaaggagatgcagaagcagcaaccacaggattataatagcatgagcctcaggaagcttaaagccacacacaagaaatatctcattgctgcaaaggaggaggtcaccgaagggaagaggcttcctctcgaggaggtggatgaaaacgcctgcatcgaccactgaacagaacaagcaggcgaaattttgtgtggatggcgtctgccacaaaaggattgaaacgcggagtgtgctctggttgtgaagtgataactaggctaccgcatgttcattttcaaaagttttcgtgtgtgatcgtgatcaggggtgaaaccatggtttcagccaacaaacttgcagttcctgttgcttctcccccttttttcctttatatatatattttgtatcggttacagaacatggtttatccagtgaagatgctaagtttcgcttaataatgtatatgaaggtcctggatacctcaaattttgttcatgttgaaccagtgcgaagttatagaaacgcttcaaagttcaaatagcatttagcatgttccatgtgctgctatttcagcactcattcccgtgctggcaatgcaaactgcaactggtcattagttagcattgactgaattttctagcctgttcgctttttatttcgaggaacctgctttgtatcgttgaagtatctctctaatatctgtgta

SEQ ID NO: 36722 - DNA, 3268 bp, Zea Mays
ctagctaaggaaactaagtatccctgatttgtagccacggttgtttcctgccccttttctccttatttgctgattgtctttccttaactgtccctgctggcattcggtcccttagcggcccttctccttgaatactggcgcccccacaaaggttctgtgctacttgggtccacttttccccagaaacctttctttattttggcaagatgaggtccctaagatgaaagcttacatcagtgatcctgaagacctaaagcaagatagcacataccaggaaaaatgggatgacatgataataaattttttggcagaatgtttggatgttgtgaatgatactgagtgggtcatttctttgggtgatgcatttgcacggcagtatgatctgtattctatatctgacggacacgctgctttgctgcacagatgcttgggaatgcttcttcagaaggttgatgataggatttatgtcagcgagaagattgattggatgtgtagacactcaagtatgtctattcctattaatcgccttggacttgctcaaggcatcgggctggttgcggcttctcatttagatacagtgttggagaaactgaagaacatactagatagtgcagagcaaagtgctttccagaggttcctctcatttttctcattcggcccaaaagtggaagatgttgatgacacatatgcagcattggcgttgatgtatggttatgccgcaagatatgctccatcaactgttattgaagccagaattaatgcacttgtggggagtaatatgcttggaaggttgcttcatgttcagcatcctactgcaaagcaagctgtgattactgcaatcgaccttttaggtcgagctgttattagtgctgctgaaatgggaatctcattcccactgaaacgaagagatcagttactggagtacgttttaactctaatgggtagggatcaaagtaatgatctcactgatttcaacactgagcttttgcacacacagagccttgctttaagtgcctgtactactcttgtctcgctagaaccaagattgccaatggaaacaagaaaccgtgtcatgaaggcaacattaggtttttttgctttgccaacagagccctcaagcattgttgagagtctcgtaacaaacctaattattctgttaggtgccatcctgcttacaagtggtgaagatggtcgaagtcgagcagagcagttgctgcatattcttaggcagcttgatccatatgtatcatcatctctggaacaccaaagaagaagaggatgtgttgctgtacaggaggtgttaataaagtttcgcaatctttgttctggtggattcggtgcattgggctcctatccaactttcacaatgaataaacaaatcgatcgagggactaggagcttgtcaagtttgccatctgcatttgtgttgcctagtcgagattctttaagcttgggagagaggacaatggcataccttcctcgttgtgctgatacagacacggaagttaggaaagttgcaattcagatcattgcacttttcttcgacatttcattgtcacttccaaagcagaaggcatatcctaatgatattgatctggaatcctcgtatagtgctttgtcctcccttgaggagttagtctctattgtcagaagggaggcatctgttgatcaaactgaactatttcagagggttgtatcctcagtgtgtattctattatcaaaggatgagctggtcgtcttgctacactcttgtacgttggcaacatgtgataagataaaacagtcagcagatgcttcaattcaagctattatcatgtttattatcagaagaggcaaggagctacgtgaagctgatgtctcgaggacaactcaatctttgctctcatctgctatttctcttactgacacacactcacgccaagaggttctgaatgctatatcatgcctagcagaaaacaccaatcacgttgtggtctttgatgaggttctatctgtggctggaaaagatatctgtacaaaagacataccaaggattcgtggaggctgggccatacaggatgttttttatgcattttcccagcacaaggagcttgcacttctattcctggagtacactttatctatacttcacaaagaacctgtcataataaacagttctgagaagggggagagtacctctgagtcattggctgatgactgtattctacaggcaactatgtttgctctcaattaactgctgtccaatgcttgttaaatgtccttaatttgtcagaacaagatgctgttggtccaatcttaataaatctcttagtaaggctgcgaaatcttcaggtctcaatgaatacgaaaatgaggtccaatgcgtttgcagcttatggtgctttaagtgcatatggtgttggtttgcagcgcactgcttttattgagcagatacatgctacccttccccgtctgatcctccatcttcacgatgatgacctaagtgttcgtcttgcctgtcggaacacattccagctccttgcgacattgatggaagtagagggcttgtctgtgctcctcagcaagcagtattttgcttctgatcgccgttctgactatgaggacttcattagagacttaacaagacaactttgtcggttgtctcccgccagagtcgacagctacctagaatcggctatccaggcattcgatgcaccttggccagtcataagagcaaacgcagtttgtttggtgagttgcatgctatcctttttggatgatcagcgattcattgctccttatttctcccaggtatttgctacgttggttggtagaatgagccaatcgccagacgcaattgttcgagcatcagcatcgtctgcgctgggcattctgatcaagagatctaacatgctgaggtcactggtttcacgatatgatcgagcagattcatcacgcaattcccagagcggtgattctaacaccaagacaccatcagagtttcaagaacaggcagaaggaaatccgaatgatggcgcaagtggagcggcaataaaggggactgaagccgatcactgatgtaaatttactcgtatatacgtatagtgttctagctatgcatgcttgtgtatatgctgtacttccctcgcaaataggaacaggagagcaaatttatgctgccatgtcaatagatcttcagtacacctgtaaagcaaccactcacagttagatgattatttattgaatcaaatattatttatatattgaattgaattttcttcgatgcagt

SEQ ID NO: 36723 - DNA, 766 bp, Zea Mays
tggctctccaagagagcaagttgttgattttgatgatgtagatgaagaaaaagttccaacagccgcaatatgcaccatggcgattggagatgtgcggccacaggaacaagatgaacaagatcaaccttcttcctcaacaatggtgcatcccccatctcaagatgatgcacaggaggcgtgtgatcaagggggagcacaagatgatcatgtaatggaggaagaagcgcaaccggcacctccaacccaagtttgagcgatgattcaaagggatcatcccgtcgaccagattttgggtgatattagcaagggagtaactactcgatctcgattagttaatttttgtgagcattactcttttgtctcttctattgagcctttcagggtagaagaggccttgctagatccggactgggtgttggccatgcaggaggagctcaataacttcaagaggaatgaagtttggacactggtgcctcgtctcaagcaaaatgttgtgggaaccaaatgggtgttccgcaacaaacaagacgagcatggggtggtgacaaggaacaaggctagacttgtggcaaaaggttatgcccaagtcgcaggtttggactttgaggagacttttgctcctgtggctaggctagagtccattcgcattttgctagcatatgtcactcaccattctttcaggttgttccaaatggatgtaaagagcgctttcctcaacgggccaatcaaggaggaggtgtatgtggagcaaccccctggcttcgag

SEQ ID NO: 36724 - DNA, 1957 bp, Zea Mays
gtcaagcagaagcagaagcgctgaagcagcgcgtttgcagactgcaaagacccctgtgaatttgtgatgtactgaggtgttgtccagccaacagtccttgctcccaagattcttccgtactcccccctccatcggaccatcctctaccatagatctcccgaactccgccgtaatcgggacgaatcccgcgcgtgctcttgctccctgtcgttctccgcggccggcgcgagctgccggtggttcgttgccgtcgacctcgtctggccgctcctctgccctgccagctgccggattcctgctgctggactggattgctgcgcgtggagtcgtgagtatagctccatctatcctgactgatacggatcgacctctcctctcgtgggtttttgggttttcatcagttctatcagaggagtgcttatggatgattgcatggctgtagctagctaggccctgctttcctgtttgtaaagatacatcatggcaccacgcagtagggctccatctagaaggcctctctggttcattgtcttggttgcctttgtctgtgtagtagccattggagcctatctttatactccacagcattacacagcctgttatctggtaccatcagaagcctgcaattctcggcctcctccagaacctgctagggtatacactgatgatgagattgctgctcgtgttatcatgagagacatcattcgggctcggccagtgcagtcaaagaacacaaaaattgctttcatgttcttaacacccagtttattgccatttgagaagctatgggaaaaattcttcatgggtcatgaagacagatacaccatatacgtgcatgcatcaagagatataccgagtcattcaagtccaatattcgctggcagggatattcgaagcgaaaaggtgatatggggcacgatttctatgcttgatgctgaaaagaggctcttggcccatgccctacaagatcctgaaaaccagcattttgtcttgctttctgagagttgtgtgccacttcataacttcgattatatatatagttatctcatggagacaaacgtcagttttgttgactgctttgatgatcctggtccacatggagcaggtagatattctgagcatatgctacctgaaattgtgaagaaagattggagaaagggtgcgcagtggtttacagtgaaacggcagcatgcgattcttattctcgcggacaccctttactatgggaagttcaagcgttactgtaagccaggaaacgaatggcataactgctattcagacgagcactacttgccaaccctctttaacatggttgatccgactggaatctcgaactggtcggtgacgcatgtcgactggtccgaagggaagtggcatcccaaagtctacagggctgcggacacaagcttcgatctgctcaaggacatcgcgcatgtcgcgcagaggaggccgtgcgtgtggaacggcatgaagcggccctgctacctgttcgcgcgcaagttctacccagaggcgctggacaacctgctgaacatattctcgaacttcaccatcatctgagcgagcggtggatcggggaggggtttccgtcctccctcttgagtgctgcggcatcagcggccgcccgccgtggtaactggtgaggccgtccggccgtctacttggtgacgggaatctagtagctgaaggaagcaggaacacggttaccggagcacgcagatctgggagatcgggattcagatgttgccacctgcttgctcatcctgccgcactcgtgtgatctcgctctagtagatcgctggtgtttttgcaggtgtagacattggctaggctggtgttggatgcacttctgttggtgttgatgaagaactgtgattaatttaataataatacgtacgtactaagttgtactcctccgtcccaaaatataactagttttagactaaccatacatcta

SEQ ID NO: 36725 - DNA, 2023 bp, Zea Mays
aactaattttagcggttaactactagttagctactgaagattccaaaaccaaccccccatccacgccgcgatgctccgccgccgccgggcaccgctcctcctggccgccgccgccgcgggcgccgcgctggctgccacctctccctccggcgaaaatggtcgaagcgtcgcctccgcgctccaccaaggcatcgctcgctcctcccgttccgtctacacgattggttttgtgatggcagattacaagtattcgctgaggggtctggatgctggatcggcggattaccgtgttaagctctccaaggttcatctgcggtcagcaaaaaaactacttaaactatgtgaagtgaatggagggttttatgtcaaagctggtcaatatgtatcttcactaagacaagtgccaaaggagtactcatcaactctctcctgcctgcaagaccaggcaactccatccaagtttcaagatattaaagcagtaatagagcagaactttggcaaggaattgtatgacatattcctggaatttgacgaacatccgattgctgctgcatcaattgctcaggttcatcgaggtcgattgcataacaatcaagatgtagctgtcaaggttcaatatcctggattggagcagcgaatgaagatagacattatgacaatgtcattcttgtcaaaaatggtctcttgggtttttcctgattataaatttgacagaatactaattgaatttgagaaatccatgacaatggagcttgattttacgcgggaggctaagaattctgagagaacagccagctgcttcaggaaaaatagtgttgttaaagtgccttatgtgttctggcaacttacaaccagggaggttttgacgatggagttttgttatggacacaaggttaacgacttggacttcctgcggaaaacagatattagccctacaaaggtagctaaggctttgattgaactctttggtgaaatgatatttgtacatggttttgttcacggtgatccacatcctggaaatatattagtttctcctgaaggccatgggaaattttcactagttctgttggatcatggaatttatagagaattggaccaaaagttcagattggactattgtcggctatggaaagcactgatattgttggattcaaacaaaattctggaattaggcgaacagtttggcgttggcaaatatgcgaagtactttcctgtaatattcacagggagaactatagaaagcaagtcagctcttggcacacaaatgtctggtgaagagcagaggcgtctgaaggaggacttaaactctcttgggatggatgatatatcttcatttatggaatccttgccaccggacttctatgtcatactacgaacagacggactattgaggtccattttagggaatcttggggcaccacgccatgttcggcttctcacttatgcaagatgtgctatacacggtcttgagaagcagcacaaaatggagtctgatgttcaattgtgttcaggtgcaatcagacgtatgttcttgaatgtcaaaacaaatgtcagctatctccgtctgagagtgattattgaaatagcggtattattagctaaagcaaatggtgccaagcagaaagtcgtgaacaaactcagacagatgttacaggagaccagtcaaggttttcaccgccgtatgtgatgcccagaagtcagcgacgtggtgaaattaaggctacgagaaaggtgggggaagttggaagtacgtcaggactccggagtagaatcataactgtgattgttctgtttcaacttgtaaattggaggttgtattgtgtcaaggagtccaatcataactgtgagtgctctgttgtaacttgtaaattctacttctacgtcgagtctgcgctcgagagtccaggtgttttttttttgttggaccaagtacgcatcccaaaataagtctacatcccaaaattcgaggagtcaaacaaatcttaatttgaagtttgcctaaatttataaaattggtattaac

SEQ ID NO: 36726 - DNA, 3276 bp, Zea Mays
cagggcctaggccaccgccagtctccatccctgccccgcgcggctgccccccggccgccgcccgcgcgcctgcatccttgccccggccgccgcccgcgcgcagcacgcgcgtccagtccaggcgtccagccccgccccgggctggccggcggcgccacgccgccaccccctcgccgtgcgcgtcgagcccagccaaccgcaacccgcacgcctccagcccctggccggccccggctggccggcgttcggctgcccctgccgcctgcaacccactcagccagcctcggctagttgccctgcagacttctcagtttctcttataacaggacccaatccccaagcctcaagatacagcagtgatggacattgagcgatgcaggatatggtggccacgccaggagctgcagttcaagcagaaacccttctcaccgaggctcatcctgtttggatggttcttcagcagtgctggttctatcgacatcgtcatctctgcagctgtgccccaagttcacatcctgcactcttttgccacactggacaccctccagaccatcatcctttcctcaaataaaaggatgccagtaagcctgcaagaatctgctgcatttaccattcttggggattgtgtccgacacccccctaaagagttagaaggatactgctttaataaattggagcagctgcccttggatgcaaactttgttcagaaagaacattttggcacgagaagaaacaatgtcatgattggatcagttgggaatggggatcagggtccaagttatgatcataggagatggggatgcgattgttgtgtgttggatggttttctggaagtttgcagaaagtctgcagtcaaagagggcagttgggtgcacttgtattggaagtttggagagaactttaagagcaacctgaatcaagttccagttcttcaccatttgtatcttgatggccaacagattgaaaacaatcgttgccatgtcatactgtatgaggttccgaccattggcagaaaccatttctcactgggtttggatgcaccccgtacgttgaatgtttctttcaaaaagccaaattggataaatgatctacaaaagcaaccatcatttcttgatttggattcaattgttttggcgcttaattgttcaaatgcagctagactgccggacactcaggaatgttctactacatgctcaggggcttatttcatctttgcatctgtatacgatgtcttagttcaagtaacatggcattgcgtggggatatttttggcttcatcatcaactattctctacatcatgattctaatgtcccggaaatgtttaagccatatgccccagtacttgatgctaaataaggttttcagacattcatggaacaacattcatcttcgcagctgtcaaattctctactggccaattgtcttccaagatgcttccttaagctccactgtgaatgttgaatatgcacacaaagctgcaattcggaagcatgctttgtggtcaagtatcattgtggatctcctgatgggttttgtccttggagcagcattcttattaaatacagagactatttgtatttggactattgctctcgtccaccacatgacagaagcaatcttgagatccggttgtgtgtggctgatgggtgttccagctggatttaagctgaatacagagttagcagagctcttaggcatgatttctcttaatgcagttcaaatttactctaccctttggtttttcgttggaggctacctgagacatataattcaaggcattgcagtctctggaattattttaggacttacagctccagtttcattctttattgacattatccagcttgctacgttgcatgttaccatccttcactggttaatctcatcgttatattcaagacaaattcagacagtagcatcattgtggcgtcttttcagagggcgcaaatggaatcctcttaggcagaggttagatagttatgactacacagttgaacagcacgtggttggttccctgttgtttacaccaatcctacttcttatacctacaacttctgtattctatgtattcttctctatcttgacaacaacggttatctgggtgtgtgtgatgctggaaattgtcattgctctaatccaatccactccttatgctgagttaactctatgggtgatgaggaggcacagatttcctgctggattatttttctttcatctgccatcaaatgggcatacttttgaagatgacgacctatcatcccattcagtcggatgttgcaatgaaacaagaaaggaggatctaatcgacaaactatcagaatcattagtttcagaacttcattgcagctatgcgacttttgttcaagtaatcagatcaaattacgagagagttttcaacaggactggttactccttttgcaaacaattggcatacgggatccttagcggtgaaagggtgccttcatcgcttcatctgcagacgtctccctcatttccctggatgaacatcggtattacggagtattggatgcactgctatgtttgtgtccttcagtgtgcaccaaagagagatacatgatgattgcatttgaacgaaccttggttcttttcggcggttttggtttcaaatagaggttttctatagtggtggttgattattctggaggcaagggaaggtcatctgtacactcatggagccttttccctcgtaacaatagcgatgcgagttttttaagtcagctgtaattttatagttatatgggatttgcacgattatggtgcttctacttgagtacttgacactcgtgtgctagctgtgttttcatgaaagaaactgaatatcagctagactgacgggtgagagaaaaggactcatgctccgctgcaaagatgaacctcattgttgcttcacgataatagcttcttctgcacgtggcaaatagctggcatgtagcaggatattttcttttcaaatatttggggtacctgaccttgcttacccaaaaagccgagtagatttagcttactatgcattggtgatatttttggcaatgaacacgaatcgagaagtcgtagcgttatagcgagctgggccaatgtaagtcagtgttgcacgggatattgtctacatcacatgcagatttttttttcccacgcgaacgatgcagtgaacatgcatttaggttaaactcttaggctcatttggaatgcaacaagtttatagagattgtatttgaattttacagcaatcagtttatttttcatatgaaaaacac

SEQ ID NO: 36727 - DNA, 5024 bp, Zea Mays
cgagggaggaatcggctgcgcgcggaggcggggaggaggtcgagctcgcctggtgctgcatgggggcatgaagcgcggcaccagggacgacgccctcatggggtcccagctcaaacgctcgaacgttgtccgatccgatccgtcggctcagccacagcatatgtctgtgcctggttcagcgtctgcggccgcaccgccgcctcaggctggcgctgctccgccggcgcagccgcagcagccgtccggtgcggcctttaccaaccagaagctgacgacaaatgatgcgctcgtctaccttaaggcagttaaggataagtttcaggacaaacgggagaagtacgaggagttcctcgaggtcatgcgcgacttcaagagcgagaggattgacaccaatggagtgattgtccgtgtcaaaacgctgttcaacgggtaccctgaactgatccttgggttcaacgccttcttgcctaagggctatgcgatcaagctacaagaagagaagaaacctgtcgattttgtggaagctatcaatttcgtgaacaagataaagaatcggtttcagcatgatgaacaagtttacaaggcattcttggacatcctcaacatgtaccgcaaggataataagtctatccaagatgtttaccatgaggttgctatgctgttcaaagaccataaagatttgcttgaagagttccagcacttcctgcctgatacttcagtggctccacaagcagtggcctcaaagggtggtttggttaagcgggaggacaggagctctttagtgcctcctgcaaataagatccttcacaatgataagagggacagagtttacctgtcacatgctgaccgtgattttagtgttgaccgtcctgatgtggagcatgatcgccagagaagacgtcttgataaagacaaagaacggaaggtggaaagggacagaagggattatgagagagaagacaaggatggtgaacatgacagcagagacctggagctaggacagcgtaagcgaaagcctttttcaaggaatatcgaggataatgtaggtgctgagacacaccaaggaggccccagtgagaatcatggaatccacagtgtatctgcttcatcatatgacgataaggatgcgctgaagagtgtatacacacatgagttccatttctgcgagaaggtgaaggaaaagctggagcatgaagcttaccaagagtttttgaaatgtctacacatctatagccaagagattatcacaagaagtgaactgaagaacttggttggtgaatgatatactccaacattatccagatcttatggaagggtttaacgaattcttggagcattgtgaaaatatagatggatttcttgccggtgtcttcaacaaaaggccaagcacgagggctgttaaaactgaggataaagaaaaggatagagatcgggacagggaggacaaggatagagatcgggaaaaggaaagagaaaaggaacgagaaaggctcgataaaggatcaacattcaattcaaaggaaggttctagtcacaaaccttctatgttctctggcaaagagaagtacaacctatccaaaccaatatcagagcttgatctctcaaactgtcaacgctgcactccgagttaccggcttctacctaaaaattatcccatgcccccagccagcaacaggactgatcttggagcttctgttctgaatgatcactgggtatcagtgacatcaggaagtgaagattattcatttaaacacatgcggaagaatcagtacgaggaaagcttatttagatgcgaggatgacaggtttgagttggatatgctgttggaatcagttaatgcagcgactaagcgtgttgaagagctgatagagaagatgcaggacaactcagtcaaacctgagagcccaatacgcatcgatgaacatttgactccgttgaacctgaggtgcattgagcgactgtacggtgatcatggtctggatgtgatggatgttctacgcaaaaatgctagtgttgcattgccagttattctaactaggctcaaacagaagcaggaggagtggtcaaggtgtcgatcagatttcaacaaagtttgggccgaaatatatgccaaaaattatcacaagtcacttgaccatcgtagtttctatttcaagcagcaagatacgaagaacctgagcacaaagtctctcctgacagagataaaagaaattaatgagaagaaaaggaaggaagatgatgtgctccttgccattgctgctggaaataggcggcctatagttcccaatatgtcattcgagtatatagactcggaaatccatgaagatctacataaaatcattaagtactcctgtgctgaagtctgcaactcttcagatcaattagataaagtgatgagagtatggacaacttttctggagccagttttgggtgttcagcaaaaacatgggtctgaggatcctgatctagttaagaccaagagccgaacaacaaaattgggtcttgcaaatgtgagagaaagcaataccatagctgggattgtctccaagcaaagcaatggcgatgaaagtgaacaaggtccgtcatctcgggctagattagcaaatggagttgcagcgggcactcaaaatggtttccatgatgcagatcgaattgcccgtaaaggtgaagaaccatcaaacgctatactaaatggaagagtgcatggtgctgtctctgcagatgaaacactttccctgatcacacaaaacattgcttctaccgagcgaccagcagaaaatgctgctgctgttaggactgagcaacataaggcgaacttggtacttacgccaggcatgaatgcttctagaagttctcatgatgcagttgaggtggctggtgaaggcaagactggcaatgaaacattgctttctgccgagggaggggagaggttgggaccatctttaaatggcaccagcgagggaattaaagggcgcctaaataatgatggttctgtgccccacacttcaaaagttgaaagagaagagggtgaattgtcgcctaacggagattttgaagaggaccattttgttcctttcgaagatggaacatctaaaggaaaggaagattctacaagcagaccattccatggtaggcctggggaagtggtaccctcttctgccgaggcagctggtgagaatgatgctgatgctgatgacgagggtgaggaaagtgctcagaggtctactgaggacagtgaaaatgcttcagaggcgggtgaagatgcatcgggtagtgaatctggtgatggtgaggaatgctctcgtgaagatcatgatgaggaagaagaggatatggatcacgatgatcaggatgcaaaagctgaaagtgagggtgaggcagaaggaacaactgaaacacatgatgtggaagggggaatatcactaccactttcagaacgctttctgtactcagttaaaccacttgccaagcatgtacctacagctttacatgatcgagagttctcacgtgtattttatggaaacgattcattttatgtgttgttcagactacatcagattttatatgagagactactttcagcaaaaactaattctttcactgctgaaaagaaatggaggaattctaaggatacaaaccctcctgatttatatgcaaagtttatgagcgcgctgtacaacttgcttgatggttcctctgacaacaccaaatttgaggatgactgccgagctattattgggactcaatcatatgtcctctttactttagataaactgatttataaagttgtgaagcagcttcaagctatagcaacagatgaaatggacaataagcttctgcaactatatttatatgaaaaatcaagatctcctgggaggttctttgacctagtttatcatgaaaatgcccgtgttctactccatgatgagagcatataccgatttgaatgttgctcgagtccgacaaggttgtctattcagctgatggaatatggtcacgaaaagccagaagtgactgcagtatcaattgaaccaaatttttcttcgtatctttttagcgagtacttgtgtagtacgccagacaagaaattatctgaaggcgtctaccttggaaggaataagcggaaatattcaaataatgatgaaccttcagattctttgaaggcaatggatggtatcaatgttgtgaatggtcttgaatgcaagatatcctgcaagacctcgaaagtttcatatgtccttgatactgaagatttcttgttccggcttcggaagagaaggaaaattttgcggggcgggaatgtgcccgaccgtttgcagatttcatcaatatctgctgcaaaagtgcagcgcttcaataggttcctatccaaaccataggatcatttggcatacaaatgtatcgaaacctgttgctggggtcccagctgcttggcttgaacaatgattccatcgacgtcgcggagtcccctttcggaataacagatgggaagacatagggtaaatacagcaaagcgaagcgagcatgtaggccacagtagtcagtctgttgttccgaaagatgtgtatatatgtattagcagcatgattgttctgattatctttttactgattttcgatggtaggtctattccatcaagtatttaactaatcatttgttgctgttggtataggtcttttgttcttttagccgtcgttttgcattgaagatatgtagccaaaattaaaaacctgtgtcgaacagttatgtagtcttggctccattaatcaaacggacaccgtaatttcttggagccttttggtgaggttgccagcaacctctcttgtgtatccaattcaattgaagtataggatgtgtgttacttcttgatgttgtgtaaggtggccgaaattagtggacgtgccatccactatttttactattagattagaacatatctataaaatctagagaatgtgtaaaccgtttagtcttgttcgccatattgattatcattttaatgtattggcatggatggatggaaa

SEQ ID NO: 36728 - DNA, 3660 bp, Zea Mays
ttgttagaaaagttctattttgcatagtttaattgagtgaacaaaacatgttgagcattaaagttgattcaagccaatactgcttctctgatctataatctaagaattgttcatccctgttttgtttgactttattcccactttggcccttagagttgattcggtgcacatgcttgcttgccattgccaggttgttagttgatcatgcgaatatggattaaacttgtggaatgactcgattaatctaatggttgtacctgttgttgttggcattcacatattatcttttaacaccggattggagcttcataaaatgttgtctgccatcaaaatttcacagcaaaagggtacttaaggtttgcttggtagcacgtgaattaaattgatgcctttggcgatggaaatttccattgacatccctagtcattagtacatttatgttgctgtcatggaaccatttgtagtttgttatgttcactgattgaaggatgatcattcgagatggctctttattatgattagaagggttaaaagtattttccttcattctgtatttctgttgctccaaagttagaccttgggatgggtcctgtgctcaattttctatgtacacacagtttacaaagtactactaaactaaatttatgaacaaaaaaaatactgtacgctgcaggttgtgaaggatctgattgcatctttcgatatagcgaactgtgtagatgaccaagggaacacggcgctgcatatagcagccttccgaggccatgtccaagtggtcgaggctctcatcaccgcatctccgtctcttatatcagcaacaaacgaagccggcgacacgttccttcacatggcactgactggcttcgggactcccgagttccaaaggcttgatcgccagacggagctcattaggcaattagcgagtggagcaatcgtggatatcagcagcagcactattatcaacgcgcagaatgacgacgggaagacagctcttcacttggccgtggtttgcaacctgcattcggacgtcgttaagctcctgatgagcgtgccttgtattgacctcaacatctgcgacaaggacggcatgactcctctggatctactcaggaagcagccacggacgacggcgtcagagatactgatcaaacaactgatcctggccggtgggttcacaagctcaagggaccacgagactaggtcggctatcgcttctcagctgaagatgcactccattgtaggaagcccggggacatcgttcaagataccagacggcgagatcttctttctccacgctgctggagtcgacgtgtcgggcggcatcggcgaaggaggagcagcagtaccgttttcctccgttattgctagggctgacgtcctgcatggacccaaactgaagaggctcaactctttccaagacgcggcgaagcatatcaaggtcctattcagatggcctcgccgcggatggaacaagtcaggcagcggcggccgaaagggtctggacgacgacgatgcctcgtctgtggactctgccaagacctggagccacgaggagaccccgacaccgctgaggcagaggtattccaggatcggctcgctgttcaacaagcggacctacgcagcaggcagggcttcacctagcgaagcagtgaagaagggtggagtggtacagccagctggttctactctactttcgacatctctgtcgtcgtcgtcggcgtccttggttgacagtcatggctagagcttcatggaatatgaactatgagaaggttcttgttgacatcttgcacgagcacaatcatgtgaagtaccggggccagaatggttgggcaccagaaggttggcgttctatgacacaaatgttcaatgagaagtgcccgttggctaagtttacaaaggcacagatccaggaaaaagaaaaggaacttaaggcaaactataaggtgctgaaggaagcccgcaagcaaagtggtgttggatggaatgaggccatgggtatgatcattgctgaaccaccaatatgggcaaatataattgtttaatccaaaggtcaagaaatttcagtcaaggccattccctttgtataatcagttgtcagcactctatgatggcagttgtgccaccggtgatctcaattttacatcaactcagcaacatacatcatcccgacaacaattacatattcaagctgaagttgaagctgaagctatgagctctttcaggattgatgatgacctcggggttaaccctgatttgaaccaaatctcttcaaatttgcatgggttgggatcttcaagtacccgtgttgagattggtggacatgaccgcaccccggcatcttcagaacagcgagcggagagtcatggaaggaagcgtaagcaaagtcagattgctggggttcttgaggaatatttggattacaaaaggcaacataatgataagttgcttgatgtggtaaatcagattgatcaacaagctgagggatgtaacaagaaggaagaatattgtattggaaagtgtgttcgtgtgttagagtcgatggaagatataactgaagaggagatggcagcggcaatgggtgtgtttaagtgcgaggagaacagagaaatatttctgaacagccagaggccacgtgtccgattgttgtggcttagaaacgagatccacaagcagatgtccaccaatctcaatattttcagatgtccaccaagcctttagtttcctgggaggcaatggatggagctctgcgacaataaatacaagatgttcaaaagaacgttattgttgtgttaacattttgggcataccaagtacttttttttgttatgagtctgtcaaacatatgttaaatttgtcactaatttcttatgagctatttctgtggtcaaagaaagttgtttatttaagtggcatgaatcaaaaaatcttaggagacttctgtttgattttgtttatttttaaaagaaagttgcttcagcgtacaaattttgaggggcatattgttgtttttgcgtacaaatttctgtttgattttgttgatttttattttttctattttacttgtgatttgatgatgatcacacttctagcagctgccgatgtgtggctccagagggcagcagggcagctgacccatggggcaccaaaggatgtcagggcagcgcagccccgctgggcaatgcccacccagggaattcgtatgacaggaatttgccccctccggtgctagctcccctgtgttttattggccccggtcaccaaaggatgtcttaggtgccgtggaagcccctgaacctgaactgtccgtcggcgtcgaggcggccccgcgcgtcggacatccactcgctcctgaggtcgatgagcctctggccggcgtcgttgacggtgccgtcggcgttgacgagcgcggcgtcctgcctccacatgtggccctgcatgaacccccagagcacgacgccctgcaccgccgggtgcgcgaacgcctcgcgcaggaccacctcgaggtcgtcggcgcggagcgcgtcgtcgggctcgcagacgtcgacctccgtgaaccagacgggcaggccggtggcggcgtagaccgtgtcgagcgcgtcgcagatgacctcgccgacggggtgggtgacgtggccctgcatcccgacgccgccgacc

SEQ ID NO: 36729 - DNA, 1911 bp, Zea Mays
ctcttcctcttcccaccttccctcctcccttctccaatcatccctttctggctttctcctcccccctgagaccccgagtcctgccggattccgagatcccggaggcagcttcccacgggctcctctcactacggtagctggatcaaaccatcgtgctctcgtctcgacagaaaccccggccgaaaacccagccggacccagccctgttcgccgcgcgcgcggtgcccaggccgtgccagatctgcgagatccgcgccgacaccgctacgactatcaccaggtggatgctctcgtgatctctcggaggccgcggggactgagcagcgtctcggcggcggcgtggcctgcatagccgtcggcgtgccgagatgcaacggaacggggtggtggaatgcagcgtgtgccgctcccgggtggtggtgccgagcccccggagcgtgtccagggcgtacgacaagcaccgcaacaagatgtcgtccaagttccgggcgctcaacgtcttcctcgtcgtcggcgactgcatccttgttggtctccagcccatcctagtgttcatgtcaaaggttgatgggaagtttcagttcagtcccatcagtgttaactttctgacggaggttatgaaagtcatctttgctgtcgtcatgctcataattcagtctagaaagcaaaaggttggagaaaagccacttttggcacgttcaaccttcatacaggcagcccgtaataatgtacttctagctgttcctgctcttctatatgcaatcaacaattacctaaaattcatcatgcagttgtacttcaatcctgcaactgtgaaaatgctaagtaacctaaagtgggaagctcttgctctattgcttattggaatcagcatcaatcaactccgaactgtacctgtgggcaacacagcatttggtcttcctgtcactgctattgcgtacatatatacattgatttttgtaactgttccttcagtggcttctgtctacaatgaatatgccttgaaaagtcaatatgacactagcatctatctccagaacttgtttctgtacggatatggagcaatattcaacttgcttggcattcttgggactgtcctattccaagggccagagagttttaatattcttcgaggccattcaagggccacaatatttctcatatgtaacaatgctgcacaaggcattctatcttcattcttctttaagtatgcagacacaattttgaagaaatattcgtcaactgttgccacaatatttactggcctagcttctgctgcatttttggggcattccttgaccattaattttctcctgggcatatcagtggtgtttatttcaatgcaccagttcttctctccgcttgcaaaagtcaaagatgacaaaccagctgactcaatagagttggaagatacacaaaatgaccgcccatctgaatcttcttttgtaaatatgactgctggtgccgctgatgatgcaagccatcggattggaactgatgagaggcagccgctattgcctatatgaacttgtttgttgaggtaggacagaagagaggggatagaagaagaggctcctttttgccgtgtgagcaacagatttgatgtagcattgttaggcgaataaacagctattgtacactgtagaggcaaaagaaacaaataaacgtggtttccattttctttaaattttttggggataccttgggagcggcagaaatcatacattttgatagacataattcaatagggatttctagatacgatacttgtcaaaaaaaaaagaattcatggagaaacaacggctgtgataatggtttttttaggaaccttttctttatacaattatactattgattaattgttatactattactacattgttacctgattctccaactgtgtccagtgtt

SEQ ID NO: 36730 - DNA, 1831 bp, Zea Mays
tgcatcctgtcttgctcttgcagacatcatccaaggtcgaagatatagtcaggtttgtaaacatttgaggaatatatggacaaccaccttccgtgcgatggatgacataaaggaaactgtgcgaactgccggtgacagtttgtgccgagccgtaagctcattgacaattaggctctgtgatatatcactaacttctacttctgaggcaaacgaaacgatgaacattgtgctgccatacttgctttctgagggcatactcagtaaagtatcaagtgttcaaaaagctgctattagtttggtcatgaagcttgctaagggtgctggtcctgcccttcgtcctcatctgccagaacttgttagttgtatgcttgaatgtttgtcaagtctggaagatcaaaggttgaattatgttgagatgcatgcagggaatgctggcatcaaaacagataagcttgaaactttgcgcatagctgttgctaaagattctccaatgtgggaaactcttgatatctgtataaaagttgttgacaagaattcacttgatctattggttcctcgcctggctcaaatgattagatcagctgttggcttaaatacaagggttggtgttgctagtttcataactctattggtgcagaaggtcatggttgacatcaaaccattcgcagcagtcttaatgaagttattgcatagtgcagttctggaggaaaggagttctgccgctaaaaaggccttcgcgtcctcttgtgctactgttttgaaatacgctagtcctccccaggctcagaagcttatcgaagatactacgtctctgcattcaggtgggaaaaacgatcagttgtctggtgcaattcttattaaagcctacttgagcaatgcatcggatattcttggtggatataatgcggtggttatccctgtaatttttgtgtcgagatttgatgatgataaagacaccagtgctttatatgaagaactttgggaggatattcctagtagtgaaagagtaaccctaacactatatttaccagaaattgtatctcttttatgtgatggcatgtcattgtcatcatgggctggtaaaagaaagtcagccaaggctataaagaagctatgtgatgttctaggagaacccctttcagcacactaccagaatattctcaaatcacttctgaaagaattgccaggtcgattttgggaggtgattacggcattcagagatccaggatttttcaatagtgtgtttccaatgctgttcgaggtttctaaccaatctgccatctcgaagacaaagggctctgctgaactagatgaaagtgaaggtgcttctgtttctctggataaagtgctcaattgtgcaacatcttgcatcagtgttgcttttccacaggatattatcaaccaaaagaagaatgttgtagaattaatattgaattctctcttgcctgaggagagttggcaagttaaactatcatccttcttgtgtatcaaggagttgtgcctcaaatttgacaattctggtgatagtaacacatggcctcaagacacagcttacttggttgaggagctatttcatttggtatcaccgaaattagtagactccataagattagtaaagattgctcaggttcacgttgctgcatcggagtgccttcttgatttgagcaaactgtacagagacttcccgctgtcgaacagaacagaggccaagttcgaggatgaactcacagagctctgcgagtctgaaaaaagcgaacaagcaaaggcgattctgaaggaatgcctggccattcttaaagctctccctggagtaaccatgacgacggattag

SEQ ID NO: 36731 - DNA, 2704 bp, Zea Mays
gttcgcgccggcgaccggcgggaggccaaaacaaggccggcaggccccgtcgccagcggatcctacggtcccatcccaatcgtaaatcgcgcgccgtcccgatcatcctgactcttctgtctctgcctcgtgcgctgtccgtgcccggtttttattgcgcttctattctggtctccaagccggtgacggtgaaccgatcaccacacaccaagccaaccccgcttctattccgcgtggacatatcgacaagacagccagcggcgagaagtcgacgccggcagtctggtgcaacacagcgatccagtaggtaggtcaaaccgaggcggcgacgaagtacgaacagagggcaggacgcagtcagcgcggcgcgcccaggccccgaggccgagcgatctggtgacggcacggcagcatggccgaggcgacgggccacggcggccgcgtcgtcgacctctcgggggccgagatccgcggggacctcgaggatcgcaacccgcccatcttcctccctcgccagcccgccgcgtccccgctcctcgccctcgacatcggagggactctgatcaagctggtgtacacggcgagccgcggcggaggggccgacgggacggacctgcgcttcgccaagttcgagaggcgacgcctacaggagtgcttcaacttcatccgggcggaggggctcctcgccagcaatgctggcggagaaggcgtgaccctgaaggctacaggtggtggagcatataaatttgctgacgatttcctggagaaactaggtgtttgtcttgacaagcttgatgaaatggatagtgtcgtttctggagcaaactttttgttgcagagtattcctggcgcagccttcacacacatgaatggactgaggaatccagtagatgtttccccaaataatttgtttccttaccttcttgtcaatattggctcaggagttagtatactgaagtataatgtaggttactggaaacagaaagtttgaaagggtaactgggacgcacattggtggtggtaccatgtttggtttagcaaaacttttaacaggctgtaagagctatgatgaattcttgcaattaagccagaaaggggacaactttgttcttgatttaattgtcaaggatatatgtggagagcttgtctgccagaagcaagggctttcaacatcaactcttgcttctagctttgggaaagttattacttctaagaagaagctgacagactacaagcctgaagaccttgcatccacattgttgagcgcctttacctataacattgcacaaattgctttccttgttgcatcacttttgggcctccgaagggttttcttcggtggatcatatatacgtggtcacaaaagcacgatggaaaatatttcttatgcaattgatttctggtcacagagccaaatgcaagcagtatttttgcgacatgaagggtatttgggagcacttggtgccctgatgagttatggggatccaagtggtgaaaatcttaccctcgaggagaaggagcctcatcacgaatcagcaccagttgatgggacatcagcggatgaagagagtgatagcaacatatttccttaccttcttgtaaatattggatcaggtgtcagcatgatagaggtaattggtaagggaaagtttgaaagaattataggatcccatctaggcggcggtactatccttggtcttgctaggcttttgactggttgttcaagttacgaagaattcctggagttgagccagaggggcaataatctgtctgtcgatttgactgtgggggacatatatggggaagaaggttatccgaagattggccttccagcatccactactgcggctagctttggaaaagtgaactcaagcaaactttctgagtataaagtagaggatcttgctgcagccttactgaattctttcacatacaacattggacagatagcctactttgtggctaatctttcaggcctgaagagaattttcttccgaggtgcttatgtctgtggtcatgagaagactatggacaagatttctcgttccctaaaatattggtccaaaggtgaagttcagacgacatttctatgccatgaagggttcttgggaacactaggtgcattttggagttatgagaacatggggatcgacagtttggcggcacatgaagtcatcagggaagtcttgcttggtgcaccatacacagggcaattcccatctttacctgtcactcaacaacaggagaatggagaacatggtactctcgaaggggaagtagaaagcttacgacatgacaatgccttgctgaaggctgaggttgagcgattacaaaaggagaatgcgttgctaagagctaagttggtaagatcaggcgagacttcaacattgtgatttgtaacacaataaaaagggcgagccgcagcttgttgtaaattttatctgtttagaaaatggctcaaaatgtaactcatataggaaaactgaattctggaaaagaaatgccaattagcattgttcatctagtgagccttgttgtataattatttatatattctttatacaagagcctatgtatttgctccgttcatgtaatcttgttcctgtaaatgttgtataaatagttaccaaaatccagtaagtatccggctttgtaattttgtcgaaatagtagtgtatgtttccaagttccctttggaaaaaaa

SEQ ID NO: 36732 - DNA, 2545 bp, Zea Mays
aaagaagagaaaaatgagttgaaactccaaagcacacacactcacacccttttagttctcaagatgcattcaatagcatcatgaccatgacacaacagaacctaaccactaggtgcaaggacactcaacagcgagatctctcacactcaagcatgccccaaagctgcacctcctcttcttctacaagtagtaaggcacccaccatgtttggggaacaccaacaaacacacagtgattctgatgtatccaaaagtccaagcccctaaaaatgagagaattgagaccttgctgtagcaaatcctttatgccttcactgacagatcagtagagcaccaccattcatcaaaggacacttttctaggagaaggtgataacacttggaagccagacacacccagtgagaaggcgacgttctagatgtgctaggccttgcttggcaatgctgtcagccgttcaacattgcttgtgctaccaatcagatgaagaaacagtactttccaagtgcccatgatttccaaatacattcccaaggccgaaattgaatcgatccttgcaagaaaccctcataggcagatttggccaagtgggtcccagagataaagatattcagcaagcaccctactgaaaccacaccctgaatatcctctccaagaaaggtcaccatcttgatgatacttgggtggcttatgctggaagtggagctggaaataggccgccccctatacttagctggcagcaattagcatccggcactccaggtggtcgtttcagtcattcttgccttctagttggtgacacattagtcttgtttggtggaatcacagatcagggacagcgtttgaatgatacatggactggtcaaatcatctgtgaagagcctcgaaggccacggatctcatggagattgctggaggtaggtcggcttgcaccacctccacgtggagctcatgcagcctgctgtgtggatgacaagtttattgtcattcatggtgggatagggctctatggaagccggcttggtgatacatggcttcttgatctctcaaatggccttcagtctggcagctggcaccaaataggcaacacatggcctttgcctcaacctcgttctggccactctttaacttggattggcagcacatgcatggtattatttggtggtagaggatcggaatttgaggttcttaatgatgtctggctgtttgatatcagtgatcaataccccaaatggaaggagctaaagtatggcttgtctagtgctcttggtgagcttccttttccacgggttgggcattcagcgatacttgtgttgggtggcaaggtccttgtgtatggcggggaggactcacaaaggcgacgaaaggatgacttttggatcttggatacaccagctctacttcaatacgagtcaggttccaagaaaatgaccagaaagatgtggaagaaactaagaattgatggtcagtgcccaaactaccgatccttccatggggcatgtgtagatgcttctggttgctgtgtgtatatttttggtggaatggttgatggccttgtacacccttcagaagccttgggcatgaggtttgatgggcatctgtatcaagtggagctcgtgctacatctttaggacgtgtttgttcccttgtatatccgagaaattccataggtttgatgtttagcgtctggtgtagtaccatgtcacccaggttttcaacattgtaaggatactccagatggtgcctaacggtcgtttgcgcatggatgcttgcgcacagctgtcgctgatctgtgaaaggaacagtgacccttgtaattttggcctgatgtgtctgcatatggccatatgggtttgaattgtcattcctttgtcagattcatatgttccaaagaatgtccgtcaataccatctggagcagatggttgttttgctacctgatgagccatcatatagtcatgggaagagagagaaagatattcttttccacaataatccaatgcgcgaggattgctcgggaccatatggagctgctattggatctttgcatcccagtcacaggttagctcaatgcaggagaggaccatgtcccattcaacccttgggttcacatgcacagaacctgttatttgtatttatctaatgatggtgcatgagtcatattggcatcaccaagcatcagaatttcttccaaagatgaatgctggtttgatctttggtccaccagcactcgatagtcatgtcttgcgcgcattaattctgcgataacaggaccgatgattgcttggattatttcagattatggaccatttgcagtatgattgctcgagagaaatctggagctcctgttcagatccactttgtgacagcaaggcatgcttcagcatgaagatccatgtatgatacctctgaaaggtttacttaggcctagactcagtttgtctctgattctgtacattcttgatagattatatttgctcaagatgttgtttcagtgcagcattcaactgcaaattttattgctggatgaatcgctatccactagtacat

SEQ ID NO: 36733 - DNA, 782 bp, Zea Mays
ccaccggcgagtccaccatcccattcccatccacccgctccttccaactcccaggcgttgctggctgctgctaccgaaactgctccgcctcccggccaatgcgcagttgcgctcgcgcagacgcgcacggacagcgccacatcggccttgattagcgaagtgttcccttgccctacctctccctcccctgttccgacgcggcggccggtgagcacctgcccggtcgctagcttctgccatggctcacgaagttggcgacaacggcggcgaactcccgccgcccgcgaagaagaagtcgcccgccgaggaggaggccgagaagaggaggaagaagcttacacctgggagcttgatgaagggcatcatacggtctgggagtggtgatgccacccctgcagagggcgatcaggttatacttcattgcactactcggacgatggatggtattattgtcaattctacaagaagggagcacggaggtaaaggaatcccactcagatttgttttagggaagagcaagatgatcctaggctttgctgaaggcttcccaacaatgctgaaggttcaaaatgcagcctaaaattcactacgctgaggttgattgtccagttgcagctccagatggcttcccgaaagatgatgaacttcaatttgagattgaaatgttggatttctttaaagccaaggttgtggcagaggatttgggggtggtaaagaagatagttgaagaaggcaagggatgggaaacacctagagagccatatgaaataacagcacggtaa

SEQ ID NO: 36734 - DNA, 2692 bp, Zea Mays
tccaaacctaccccgctcgctcaacccttcatcattccttgcttcctccagtccctgccctcctccctccatcgccccgttccatcccctttcccttccctttcacgagatccccatccggccatccccacctctgaccgcacctcccatgccgcactagttcacccgcccactccccacccaacacacgccgcccagcgagatccagagccgaccggtcgccggccctcgccctccgccccctccgcaggtgctcggcggaatgtcccaccgccagccggcgccaatgccggacaccctctcggacgccttcgccgccgcggtgctcctctcctccaccgacaagccggacacgctgcccccggggaggctctcgccagtctccccgctcccgcactcctcctccaagcacgggcaccagcaccctcaccccaccccgagctcctcctcgggctcctctggctccgtctcccggtccctactcgcgcccgcctccagcctcgcctcgcgccggagccactccggcgagatcccgctcccctccgacgcgcccccacgcgggaccgcgcgcccgggtcaccgccgcaccggctccggccccctcatcttcacatccggcgcgtgctccagctccgccacctcgccgctcaccaacgcgctccccgcgggcaacatctgcccctccggccgcctcgccaagccgctcccctcctcctgctccgccgctactccgccacccccgccccgcgcctcccgccacgacgtgctcggctccgggaccgccaactacggccacgggagcatcgtccgctcccgcgccgccaccgacgatgacgcggtcctcaggcgcgccatgtcggccgccgaccccgaggagctcaagagggccgggaacgaccagtacagaaagggctgcttcgaggaggccctcaggctctacgaccgcgccctcgccctctgccccgacaatgccgcgtgccggggcaaccgcgccgccgctctcattggcctccaccgccttggcgaggccgtcaaggagtgcgaggaggcgctccggattgatccatcctacggccgcgcgcaccaccgcctcgcgtccctgcatataaggctaggacacattgaggatgctctgaagcacctgtcacttgcaatcccacagcctgacctcctagagttgcacaaattgcaaacagtggagaagcactttgggagatgtctggatgcgcgaaaggctggtgactggaagagtgtgctaagagaaagtgatgctgctattgcggctggggctgactcctctgctctgctcttggctgctagagcagaagcccttttccgtctcaatttacttgatgaggctgatgttgcaatctctagtgcctccaaattgaattatacatcttcatgctccccagacaccaaattttgcgggtttattgccaacgcctacctcttttatgtacatgcccaagttgacatggcattaggaaggtttgaccatgcggtgtcctccatagataaggctagaataatagatccaggaaacactgaagtgataaccatgcataacaaagtgaaatctgtggccagagcacgatctctagggaacgagctcttcaattctggaaaattttcagaagcttgcgttgcttatggtgaagggctgaaacaacaccctgtgaataaagtcctgtactgtaatagggcagcttgtaggttcaaacttgaacagtgggagaagtcaattgaggactgtaatgaagctctcaagattcaacctaattataccaaggctttgctcaggcgggcagcatcttatggcaagatggagcgatgggcagaatctgtgaaggattatgagattctcagaaaagaacttccaagtgacacggaggttgctgaggcctatttccacgcacagattgctctcaagtcatctcgtggtgaggaggtatccaacatgaagtttggaggagaggttgaagcaattattggaatggaacaattccagttggctacatctttgtcaggtgtttcggtcatccatttcatggcagcttcaaatcagcagtgctgcaagatttctccatttgttaacacgctctgtaccagatacccatccgttaacttcctcaaggtcgatgtgaacgagagccctgctgttgcacgcgccgaaaacgtgaggacagttccaacattcaaaatctacaaaaacggcattagagtcaaagagatgatctgccccagccaacagctgctggaatattcagtgaggcattacgggatttaggccacgaagccgatgacttgatgttaccttccgcctccagcttctctggagcgagcacaggctttagccggagcagaaccagtcaagttcatcttgatgaggggtaagcatgagaatggaaaagcgaagagcaactcttccccagcattttcaaccccacagcccacccccattctccatttgttgattacatacctactcgatttattcatttaatctatctcgtccgtacatcattgttgcaaaatttctgtagaacccccaaaaaacatctcctgattcatgtgaagaatgactgtaaatttttacttccatgtttaccagacaactgaggaaaaaaggtatagattgcattttttttaaacgaacggacgcaaaactccaccatttttagttacgagt

SEQ ID NO: 36735 - DNA, 1807 bp, Zea Mays
cagcgatggagtccctcataaatccccaacccctagctttccgttctttcctcctccacgcgaatccgcatctccacactccaatcagcgctcctccgtccccgttctttcctcctcccttcagccatcgcagtcgcagcgcaggttcttggctggttgctggtgtcgacagcgaagtccgcaactccaatcctgcctgcgctcctcccttcctccgtcctcactaagcacccgcgcacgccgcctgcctgtcgattgagatctctttcacgcccctttctgccatcgcacaactgagctagtaacatccattttgctggtcaataagtcgtgggaggaagaagatggattatttgaaggtgcaggtggtagagtcatcatttgtagtgccgagcgagccgacgccaacgaaggcgctctggctctcttgcttggacatggttcagtccaacaaagcccacaccccaacgatccacttgtacagctccaacgatgctgcggcggctgattttttcgacctgggcagactcaagaaggctacggccaaagccttggtggccttctaccccctcgccggccgcctcgtcgacagcgacgatggtaggaaggagatcagctgcaacggcgaaggtgcactctttgttgtcgctcgcgcggatggtgatctcactatcgatgaagtcaagaaattcaagccatcgccagagttgaggaggctgtttattccactcatcgagccatcgtccatcataatggccatacagacatggtcggcgttctgcaagcatggtgacagtgctgccgtggagctcccgtgccacgaccgcaccctactccgcgcacggtccccgcccacagtccaccccgacgcgctctcgacattgcagcctcggctcgtcctcactgaacccgaggggcctcttgccatcgaaatcttcaccatttccagggaccatgtcgcctccctgaagcagctctgcggtggcacgagcaccttttgcgccgtcagcgctctcatctggcagtgcgcgtgcgttgcacgacggatcccaccggactctcaggtgcgcgtgatgttcccggccgacgtccgccgccggatgaggccgcccctcccgacccactacttcggcaacgcagtgatcaggctatacgccgctggcccggcaggggacattggcacggcggcgttggcatccgtcgctgcccgcatcaagggcgccgtcgagcggatggatgacgagctggtgcggtccgcgattgactactacgagatggccgagacgaacaagagacggactgggacaggcatcttaccacggacggacctgaatattaccagctggttgggtaggccacagcacgacgcagattttggctggggaaagccgcaatccatgtcgcgggcggagtctgtccgcggcggctctatgcacttgatgaacgacgacggtggtaccggcgacgtccgcgtgctcgtgtgcttggaggctgaaaatataaaggagctaggacggctgctttatgcaaagctctagcaagctgctagtgctatgctctaaaaataataatattaataataaggtttgttactatgcttaaggggaaccatactttttccctcgcgatttattattattatggcagtttcaataatgaaaaccatttgtaattcctgtgacaattaatttatgcgtccacgctagaaataaaaacttgtttgtaatactacagtttttttttgttatggcagtttcaataatgaaatccgtatgtaattcctgtgactattactttatgtctccgc

SEQ ID NO: 36736 - DNA, 554 bp, Zea Mays
catgatgttttcatggaagatggcgagaagctctccacccttatcatagttaactcttttgattaagtgattaaccaatttagtaacacatatttaatgttttagcttgtttggtttagatatggaggtccgtcagtaattttgtaattttttgtattatctttatctggaaactaagttgtatgtagtgacaggtaagaaatactgcggtggtttggacctcagttattggccagatgaaggtcggaggccattatcagatcctcgtccacctttgggctaatgctgataagaggacgagtgtcgtacacctctccaattccccccttcaatgtggtcagtgttgaatcatctacgtcatacagtgaacaagggcatactgatgagagaagggatgacatggatttttctcattcgagcatcaggttttgtgcgctgattatggtgtggtcgttggtgagactgcaacgtcctctggcagtggcacaagcctggacgtcgttgctgctgccattcaaattttggagatatattttgtgcacataaatggaaca

SEQ ID NO: 36737 - DNA, 999 bp, Zea Mays
aacccggaggtgggactgggaggcaccgtgtcgtcgtcgtcccctttcccttctctactccgccgccgctcgctcgccggtgaagagcaaatgctgctgctgttacggcagcggctctgttggcgccgcgtatctccgacttacctcgcgcctttgtaggatctgtggagactcgtgagtacgtgacccccacggtggatgaggataggcgggcctcgtccggcagcctgtgctctctgggacgggaggcagagctggcaccagagagagcacgaattgaggccggcccaggtgaacgctgctgaagctgctgctcaattaaaactaggggaacagatggggatgaagcgcgagcaagaaagaaagaaaggctgcacaactggcactgtaagatgaagaagactgttgatattgacaacagtcaacagccactttctgaagggcctggagaacttgtgccaaaagtaacaatggaagtttgttcatgggattgagttgacacagggcttagggagcccactgactggagacacttagcttggaggcctgttcatgaagaaagatatcgagaaagacgtcgaacatgaaatggaggacagcgtgtcaacctaccagaatgctgatgtcggggaaggagagatcagctgctgtcaatagtgtacctctctctattccaactgtgaacctgggattctatgatcatgtgcgtgctatgtaacctatgctgccactgtgcaacgtcacaagtcagcacatgctgcacgcctgcactaggatgtctagcgtatgctggacagctggagtacaatagttgggcgttgctgtctgtttttgtggttgtcatgtacagatgtgctagtgctaatgtatgttgtaggtgttccaggtctatgtaaactggacattctgtaaagaaggtaaaaaaaacaaagaatagtgagatatccatctatactatagttattatgtatcaatgtatgtgtttagagaaagatgttt

SEQ ID NO: 36738 - DNA, 292 bp, Zea Mays
aaagctagaatgtatatacctataaaacgatcggtcttgtttttgtattggtccaacttatctaagggtgttagtgagaatgtatatttaggaaaaccttgaatttcatccttatcttcaagcacaatggttctcttgttgagctttaccatataaggattgtcaacaactctgaatcccagtttagctcgttcaattgttattttggatatgtatacaatctttttttcttgtagatgtggctttaagacatcaattgcatctggtggaatctctgcatatattgaatttc

SEQ ID NO: 36739 - DNA, 575 bp, Zea Mays
atactttttggtccatttggaagacaaacaccccggtccagtcctcccccgatgctgagggatacccgtggaagccctcatggccacctgaggccgggcaaccttccccagtttggaagggacacaagcggatccgagcaaccacgccctccgccgccactatcgtccacaccgctgccatccgctctgctgccgctccatcgtcgtccttccccgacgcagtcgcgagcgggacgtgaggcgacagtgccctccaccaccgccaccgtctcggatttgtcgccctccgccgccatctctgccctcggttcactgtcctccaccgtcgtcttccgcgacacgatgtacaatacaatgttgtctccaagacacagtacatggtcttctccaagatccagtacaaggtcgtctcctccaagatccaaaccccaacgctagtgagcagccgaagacttcttttccgctatgcttgattgagagggctgtgtctacacccagttctgcctgtggcttgggctagtattttcttcttactgcgcttcttaaaatttggctctctcgagcttgtacccccg

SEQ ID NO: 36740 - DNA, 3141 bp, Zea Mays
gagaaaatgacgcctaatcagcgtgttttgttttgtttcgtctcgtcgaccgagccgtccgtcgtcctccctggcggtctggccgcctccgccttcctccccgtgcgtctcacccttttcctctacagcttcctctgcccaatcagctcgtcctctcccctcctctccctcccgtgaactgctaaaatccctcgccaagcatttccgtcgggttaggtggtagataagccgaaaatcgagtggaaaagcatcaatcgagtgctgcgctagttgcctggttcgtcccaacaaattccaccgggaatcagggtcgtccggcagcggctgaggcgtctgggttctggaggagcggccgtcggtgaggggggatggggggcggcggcggatcctccgggccggagctgtcgacggacaacatgaaggggatagtcctggcgctgctctccagcggcttcatcggcgccagcttcatcatcaagaagaagggtctccgccgggccgctgtcgcctccggcgtccgtgcaggtgtaggcgggtactcatacctcatggagcccctgtggtgggttggcatgatcattatgattgtaggtgagattgccaatttcgtggcatatgctttcgcccccgctgttctggttactccccttggagcactcagcataattgttagtgctggctcatttcattctgaacgagaggctgcatgccctcggggtgctcggctgcgtgatgtgcattgcagggtctgtggtcattgttatccacgctccacaggagcaggagattacttcagttaaggaaatatggaacatggcgacacaacctgctttcttgttatatgttgcgtcagttattgtgattgtttttgtcctggtgttctatttctcccctctctatgggcagtccaatgtgttgatctacactgccatttgctctttgatgggctctctttcggttatgagtgttaaagctcttggtacatcactaaagcttacttttgagggaacaaaccaattaatatatccagagacttggttctttatgcttgttgtggctacttgtgtgttgactcagatgaattatctgaacaagatcccactatgtgctgatgcttctgaaggcctctgttggatatgtccaaaccatctcaatcggtgttggataagcttttcttcaatggtgctatccctagcctatcatgtatcatcatttcggactctatcccttacattgttacaaattcaacataacatgtattttcgcaacacttatctgttgaatgtgatgtatttttataggccaatattcaacgccatacaacatagcaattctaatcgttgacctataaaacttgccttttagcttatgtggtacccttttgtcacatacaatgctagatatttgacgccacttcctccactcagctttgattctaagaataacatcatcgatatccccatctctttgtagcattgatcctaaatattgaaaggtatccttcctatgcactacttaaccttccaaactaacatgttcatccatgccgaagtcacattccacggatttggttttagttgtaccgagtctaaaacctctgaactctcacaatctttctcctttacccgggcgtatgaactgctatgttgagacaacataggcggagttttaactccaaatgactaacaaatatatggacatcgatcaaattagtgagaattaagaacggaatggaacacaagaaattccatgtagatgtgatcttattgtttcattttttttctgatattaacttcacattcaaggggtttggattttttaaatgacagacctagtgctggtggttcccacatgagtggggtttggggaaagaataaccgatgcaagtcttacccacatgattgaggtctagggaagtaataaccgaggcaagccttactcttgtatttttgtagaggctgcatcgaatctaagacctttggctcagtgtaaaggcttctcaccactgggtgggtttttaagtgattgaaatcaaattatggttaggtttgcattgcttgttatcttgacaagtatcatgttctattctcatcaaatcattactatgcatgcatatatatattaatctggttgtcatcactttttccaacaactagaataaaattcacaaaactaccacattcgtgtcctaattatcccaaaactaccacttctagtgcctatttcatgaaagtgtcactataggtttcctcttcacagacttactatttttcctccagttttttaagcgtgtggacccactcatcagcgttacatagtgcagaacagaatggctccgctgttttgcactgtataattctgacaagtgagcctgagtgcttaggaaatggcacttgacacgttcaacacggcaattgtatctccaatatattatgtaatgttcacaactcttacaatacttgccagcgtcataatgttcaaggattggtctggtcaaagccctggaagcgtcatttctgaaatttgtggcttggttgtggtgttgtctggtaccattttgttgcatgtgacgaaggattatgaaaggatcccacaatcaagaaattaaatggagaattgttgaagcatgtcgtggatgagaggacttcggacgaagaaaaggccttgagaagacaggagatgtattagcgtgcgtcagaatatcaaaggaaatataggttactctgatggattctccggcaggggcttgtacatggcgtagtgataaccttcccatagcgattgttgattcctccattacagtttgttggtttgtgtatataactgcagcaatttgtggctaccgagtgattgcaaatctgccgaggtggtggaaggctgcagagttccaccaaaaagaatctaagtcgggtgcatagattcttatcgaattcccttcttcctttcgtaacttcctcagttttgtccacggcatttgttccatgtgagttttagagtgaatcacggaccctatgcaactgatgtacattattattgtcatagtgaagttcgtgcaactgtgaatgatgtacattattattgtcattgatgcttctgcgaaattctggtaccatggcatctctgccatttatctagtatggc

SEQ ID NO: 36741 - DNA, 1441 bp, Zea Mays
cgactcaggcctcgaccaccaccaccaccagtccacaagaccaccaaacacccttttttgcttgtcgtgccctcctccttcctcccagcttctccggtcatcccagagtacggccattctctatcccgtcaaccacatcagggcaacctgccaaacaccgcacttgcgcaatccatccaaacccccccggcaactccccaattccctctcccggagtcatcgacatgctttcctcctccaacagctcagctcccgccgcgctgtctcgcgggatacctctacaagaaccatgccctgcctattgtttcttctagctccaccgcctcgcccctgtctagctgactcggtgagtcggtcaccgctccccaacaaatatcggttcttcctgccccagacccgtaggcggccaagtccgcggcttggcgacggcgtgcgaatggcggagatgaccagggtttggagcggcggggaaccgctcgaggttggggtttccatggagagtgacccgattgtcggaggggaggcgccttctcgctcgaggtgggaagcgagccggtgggcgcccgtggaggctgcgctgaatcggatgctatttggaagcgtgatgctgaaatcatgtgggttttgctgggtgcggttggcaactctctgctttcgttggttctcaagaagatgctaaaccatgaaagacctgcaccagctttgcggtctgatcctgggatgccatcgtcccatgcacaatccatattctatgctgcgaccgtcctagctctttcattgtactactggcttgggacaaattatctgaccatgattcttgggcctgcaactctgtcgttggctgcctatctgtcttggctacgtgtgtctcggggccttcatacactaaaccaggtcatggtgggagctgttgtaggatctgccgtcggtgctctttggtttgtgctctggcattggcttgtgcaggaggcctttgcttcttctgtgcttgtcagagttgctgtcatccttggatcatcagcattttgtgttagctttgtcgtctacatgattcgtcactggctcaaggatgagtaatgtacttcggagctgcaatgggagatggacagataggcatggtgattttggaaaagtgaatccgttccgattcttatcagaatcgcttgaaaaaatggtgacaaatgggttttggcggagcgattcacgagtggaacaattctcttttccttcagaaactctcggattggggaaaatgaagtttcacaccgattcctaatagtcacatacgcctcgtgtcacactagtaattgtattttttcccagttaatcatttttaagtacaaggaactaaatatgttgtatctagagcaagctcaggagatttatgtcaggaatacaatttttgatgaaaaaatatccttcaacaactcgtttagataga

SEQ ID NO: 36742 - DNA, 5259 bp, Zea Mays
cccctcccctccgccctccgcacgccgcctccgaaccccatcgcccatcctcactacggcgacggctattgccacagccgccgccatcttgacgcgtacgagattctgaggccttgatctgaaacccgcctcgatcccacagccattcacccaccgttccaccggtcacggtagcggcgatccctactctcaggccgtagctacgacctagccggcgccatgcgacacggaggcggaggcaggggaggtggaggtaaaagaggtcgaggaagaggagcgggctccggacgcagagacgcgcgccccggcaacgattcgtaccgcggcgaccgtggtaggcgccacgactaccgctcccgccgcaccgcttccccggaccaccgcccacgccgcccgaggggcgaggacaacgaccgcgatccgccccgcggcggtcgcatcggctacggcgaccgtagccctccccgcggcggccgcaccggctacggcgaccgtagccctcccggcggcggccgcaccggctacggcgaccgtagccctcccggcggcggccgcaccggcccgccccggcgcgagcgcgctggctacggccaccttgacgcgtcgccccgccgcgggcatgcgccgtacaaggacgccttcggctcgccgggcggcgaccgccacgcttctccccgcgggcgcagggaatacggagatagccgcgtctcgccccccgggggtagggactacgaaagggcgccctgccgcgaggagcgcgaccggtacggccgccctggccgcggtgccgatctcgggcacaactccccgccagcccacatgctcccagaccacccgtccgacctgggacgttcagcatccctacgcgctgacgaccatagccttctcaaggacgactaccctaggggaggccctcatcggagcatcagaaaggagaacgagttgtttgcgaacggtgacctgactctcagaataagtgcaactgaaatgggaaggactagcgccatgtactcccaagaccgcaggctctcacctccaccacctatttatccctatgtgccacgtgagacgggattcttgacaggcggatctgccatgaaggccagtgatggttatggtgctggaactggaagcgcccagcggctgcatgatgatgacgattttaagtaccacaaggatgccccacacattgagaggagtagagatattgataggcattattctggcagtagggacttagttgttgagaaaggtggagttgctgaaaggtatgcttctgctgatgatctgccttctgggaggattcgagaaacagagagtctttactctagtagaggtatgctggagtctgacctggtgccgtgtaggcagttgaaggttcttggtgatccttcctcagctttgcctgccaaggaccaccatccatacaggatgtacactgaacctggctacgagacaagcaacagatacatcatggagggccttggcaggtcatctcatgactcactggggcatgggagtgaccatcctcataggttttcaggaggttcattagagcatgtaagcggtcatggtgatgaaacattattggatattgcaaggcaggcacactctaagcatacaccaagagctgcatcattggagtacgatgtacatgatacgcatagtgaaccagagaacttacgtgggaatgtctcaatgacttcaaggcacacatctgtctcaacatctttgagaggtcttagggatgaaaggattaacgacaatctgaggttatcccgtaggattgaagaagatgagggtagcattgaatccatgcatcaggacacagagcacttaattcgtcattgttacaacggtgacgcttctgtacagtaccaaacagcaaggggtggtgatgatcactattcccactcccctggaactgaacctattggaattgcaaggcggctagctcatcaacatgagtttgattcctttggttactcaagtgatcaagaagcttcccttatggtttctaggaaaagatgcaggagtcctgaatatcatgatcatgagattgatatgtatcaagctgatcatgggtttgcaggacatgagcactatgatgatgatgttgttgatgaatatgatatacccccaccaagaatgtcacggtttgatgatgaatatgatgaaatacatgatgtgctagctaatcgtgatgttttctcaaggatttctttgccacatgaaaccaatcaggaatggactgatatggatcaggggaaccatcctcattctaacatcttgggttacgggtgttcaaaacacgtacctatgcatcagaggttgtctaaacccaattaccactcacaatttggggaaactcccatgcatggaagaggaagaggaagaggaggattgactaaaagtgccaaaaagggactgagaactgctcctcatcagttgcatgatgggtacccatcaggtagaaatgaatttgttagaccaaataaattttcaaagtcgtcaaaagatgaacttaatggttctgaagtgaagcatgaagatgctccagagtatgaggatgttcctctgcagaaagatccaccagaaggttcagaggagttcagtaaacaggttgatgaagcctttcttaagtacacaaagatattaaatgagagtccagctatgcagaagaaataccgggaggcgccaaaaggatctttgccatgctgtgtctgtggcaggtttgtcttcctttgcctgcgaactaaacagttcctcctctaacttcgttagcagttgcctacttgctggtatggttactggaatggagaaatccaaggaaaagttatgtcttctgtagtcacattaaaatgcacctcatactgtagataaactttataatttaatcatacagtttaagctaacatactgagttattgacatctttaggaaactggcataatattatgtagctttaatgcccattctgcccctcgttaaatcgaacctacatgttttatgtggggtgcgttactatctatatgtgcgattagtaggatgaaatggactcatgggcggacgtagtcacaaagttcctgggacgattaggtcgtggaacaggggatgaggaacatgatatgctccttaaaaaaggtttttcacttcggggatgatattgttcctggaacggaaacggcgttcccggtgacgaacatgtgatggtgctcatgggattgagtatgcataatgaaagattttgaggaaccatcatgtggatgtgctggactatggcaacattctcggtttaatgtccaatcacatgtctaaagcatgctggtgatttttataagaattcagacataaacattggcgcccaaaggtttgagcattggtctttgttgtgaactgcattctatcctgtggcgagatcagatggtgatgcagtttgaatggagttctgcattgcagtctttcaggtatatttgtacaatatggctgaaaggaagtaaaagtaacagcattgttctgttgatgaaaaaatagcttcagaattcagaatgttgtgccatgagttagttgggttgtcggatcttcttgttgataatgtttgacaccaaagacgaccgtgtcctgtgaagtcagctagctacattggcaaactgctctttctccatggtaacatggagtgaacactcggcaggccacatgtgcaaatttggagaccattaacatgtgcaaatttggagaccattgtgcaagtttggcaatttctttgtaggaataacattatggcaattttatcgagccctcaagcatgtttacttctttaggtcgtacctagcctaccagtaccagcgtattagaattttgctagcacagtttgaaaaccatgcgtgtgcaggtttgccaaatcaagattgcaaaggctgctgcttacatatacggtctggagaggtagagcagcctgagctatgcatgggctgtatggtggcatgctgctacttatttcttgcaagaatcttgtagcgaggaaatttctggaccttgatgcattgctatcacatgcttatgatacatgcaaggccggtttgaagacaaaacacttggggtttcacaaagcactgtgtgttctgatggggtggaattggcatgttgctccagacacatctaaatcacatcactccattccatctgaggaagtaaatgccatgaggggagacctcatgctgtggcctccagttgttgtgatacataacagctcgactggtcatgaggcaaaggatactgatgcaaagattgtgtccatagaagaaatcgaaggtgtattggcagatattggggtagcgcatgagaaggctagggttagccatggaagatcagccaatcagagcgtgttcctggtgaagttccagccaacaatatctgggttccaagaagccatgagagtgcatacccatttctccaccagaaaccatggcaaggaagagttccagctgatgaaaggcagcaaaggtaagaaggctgcctccactgatagcctggaagagctgctgtatgcgcatattggggtcgtggaagacctggggctgctggatgagggaacaaagaagagatgcaaggtcatgaggaagaaggaaattgaggcaaatgcagaggcaacactgaatttagaagtttattaggtctagtactaggatccgaaccatttgaagtggtcctcttttgcttcatcttgcagctgcttgcttgtccttgcggctgtaacgtcaaaagaagaaaagaagtgtaaattctgcttttgccattaaagagtgacgaaactcagttggcttctgtctgctggggaaggcctgcctcggtttgcatggcatggcaaggacataattttgtggctagatggggacaccttaacggcaaaagcagaattacctggtcgaagaaccgagtttaatctttatattatggaatcccttctttttttaagtcttttgctgcgtgaagttatgcataattcgttgaagtgtctataggtttgatggtggactagcatgtatgtatagtagcagctgcagtgagtgacttttctcaggtgttgcatgcatgagaaacgcaaactctattcggcgatggtttgcgctccagcttctcagttgctttgctctccatctccgacaggctgagtctgctcatcagcttgagtctgcttcaaatgaggacttaatataagcgagcaaacatcgctagactagtaaataattctggacaatt

SEQ ID NO: 36743 - DNA, 1889 bp, Zea Mays
aggcagcccagaaatgtctgctgcagggctgctgggtttctgatgccaagtggagcgggacacgaggacaccacaaagcggtgaaggagaaccaaggtaatcgaacccggaagcgaccttcttgagcccgaagcaaaaggcactgctcatcgatccgccaccacgccacaaaatcctctcctactccggcagttctgctcgccgccgcctccacgatgacggaagacgtgcagatgaacgactcggagccccagcctgcggcctcagctcccgccgtcggggcgccggcgctctccacactacaccatctgaaggagatcgcgtccgtgatcgaggccggttctctgtccaaggaggtccgccggatctcccgcgccttccgcctcaccgtcgcgctccgtcgccgcctcgccgcgcgggacgtctccgccttcctcgccttcgcgctacccgcgtcctccgaagcctacggacgcctcactgccctggtgcccaaggaagatgatactgagatggatgttgatgctgcagctccagcaactcagatttcaatcaaacatggtctccctgagattgaaatatattgctacttgctcgtactgattttccttattgatcataagaaatatgatgaggctaaggcatgcgcaagtgtgagcattgctcgcctgaagaatctaaaccggagaactgttgatgttttggcatcacgactgtacttctattactcttatgtgtatgagcttaccaacagccttgctgaaatccgtgggaatttgcttgctctacacagaatggcaactttgcatcgtgacgagcttggccaggaaacactgctcaatctcctccttcgcaattacctccactacaatttgtatgatcaggcagaaaagcttagatcaaaggcacctcgttttgaagcacactccaatcaacaattctgccgatacttgttctacttgggtaaaatcaggacaatccagttggagtacaccgatgctaaagaaagcctcctgcaagctgctcaaaggaatgaagaaagctctgataccttattttgagctcacaaatgctgtcagggttggggaccttgaactgttcagggctgttgcagacaaatttgcaagcacattcagcgcagacaggactcgtaatttgattgtgaggctgcgccataatgtcattcgaactggactgcgcaacatcagcatttcttactcaaggatctcccttgctgacattgctaagaagctaagactagactctgagaaccctattgctgatgcggagagcattgtagccaaggccataagagatggcgccattgacgccaccatagatcatgcaaatggctggatggtatccaaggaaactggtgatgtctactcaacaaatgagccacaaattgcattcaactccaggattgcgttctgcctcaacatgcacaatgaggcggtcaaggcgatgagattcccccctaattctcacaaggaaaaggagagtgctgagaagcgccgagagaggcttcagcaggaggaagaactggctaagcacatggctgaggatgatgacgacgacttctaagttagctgccttttgagcaactacttgcaatgtggagtttgttcgatttgtgaacgcctggttcaaagcaattcccctacctctagttactccagtcatgcaaacactgaagttcatccactgtaatgttgtgtcgatcaggattttgtattaattctatacttgatttttagtccccctgaattgttgaaccagggaatttactcaccattaaacggctttgtttatttctttaatcccagttcggcctcttttgaaattctgtattctgtgtttattatttctgtgtcttaatttaatacccc

SEQ ID NO: 36744 - DNA, 3068 bp, Zea Mays
ccaagagtcacggatgagcatggggcttcacgccggcgtcgcatgcggtgtctattctattggcccggagggcggaggtggagcctgggcctgcctggtcggctggactctggagcggggcctggcatgacatgattcaggtgcacgagacgagatcacgggtgcacgcagctgcccaggaagaaggcaagctcgcctcaaaaaagcagaaaccagataatgaaaccaaggaaaggggccagaatgtgccctccaagaacaagaagtctgccgacaacgaagggaaagacggggagccggaggcgccaacaaagagcaagaagctcaaagctgaggaatctgagccaaatgggagggaagctgctgcaagagagtttgcagagttttgcaaggccataggagaacgcctctccctcgaggacatgcgcaagatccttcaagccaatgagcaagatgcttctggatcggaggatgcggtcgttccaagatgtgaggatatgatgttctatgggcctctcgagaagtgcccagtatgtgagggtcagcttgaatttaaggagtggaaatacaagtgcactgggaactacagcgagtgggcacgctgtactttcagtactaacgacccttcaaggagaagcggttctatagaagttcctgatgacataaaagatgattttatccgcaagtggctgaagcaacaagaaggaaaggagttccctaaacgtgatcttgatgaagaggctcatatcttctctggcatgatgattgcattgtctggacggatgtcacgctcacatggttacttcaaggagcagatcatgaagcatggagggaaggtcaagaattctgtgcttggtgctacctgtgtcgtggcttctccggctgagagagacaaaggtggctctggaggatttgctgaagcattggagcgtggaactcctgttgttagtgagaattggataatcgatagcattgagaaaaaggaagctcagccttttgctgcctatgatattgttactgatgttgttccggaaggccgaggactcccgctaggccaacttgatccaagtgaggaggccattgagaccttagctgcagaggttaaacttgctggcaagagatctgtccacaaggattccaaactcgataaagacggtggatgtgtctttgagaaggatggcataatctacaactgcgcttttgctgtttgcgatctcggatgccagatgaacgagctatgcatcatgcagctggttatggtccctggaaatcgtttgcacctgttctacaagaaaggcccaattggtcatgaccagatggcggaggaacgggtggaggattttggtagccgtgtcaatgatgctattaaagaatttgttcggctatttgaggaggtcactggaaatgagtttgagccttgggaaaggcagaagaagttcgagaagaagagtatgaagatgtatcccttggacatggatgttggggttgatgtgcgtcacggaggtgcagcacttcgtcagctgggttctgcagcagcacattgcaagcttgatccttctgtttctttcctgctgaaacagttatgtggacaagagatctacaggtatgctctgatggagatggcccaggacctacctgaccttcccatagggatgcttaccgatctccatctgaagagaggggaggaaatgctgcttcagatgaggcgagacgcggagacggtggcagagtccggcccagaagcagacgcgttctggaccgacgccagcagcaaatggttcactctgttccccacaactcggccgtacacgatgaggggcttcgagcagatcgccgacaacgtagcatcaggtttcgagacagtgcgcgatataaacgacgcgtctcgtctcatcggggatgcgttccgctcgacactactggatgacccactctctgaatgctacaagaagctcggttgttgtatcagtgctgtcgccgagggctcggaagactacaagatggttctcaagtacctggagaagacgtacgagcctgtcgaggtggaggatgtggtctatggtgtgtctgtcgagaggatatatgctgttgaatccagcgcattccctttgtacgaggaaatcaggaacctgccaaacaaaatccttctctggtgtgggactagaagctcgaacttgcttaggcacctccacaaagggttcctgcctgccgtctgccatctgcctgtgccagggtacatgttcggcaaagccatagtgtgttccgacgcagcggcggaggcggctcgctacggcttcactgcagtggaccgtccggaagggtacctggtcctggcggtggcctctctgggagaagagatcgaggaagtcaccggaacaccaggggcagaggaggcacgagtcctggaagagaagaaggtgggcgtgaaaggcgtcgggaggaagacgaccgacgagtcggagcacttcagctggagggacggcgtcaaggtcccctgcggcaagctggtgccgtcggcgaacaaggacggcccgctcgagtacaacgagtacgccgtgtacgaccccaagcaggtgagcatctgcttcctggtcggggtgaagtacgaggagcagaacatggaggtggtgccgccggacgaccagtgaaggagtcgtctcgtggagtgtcctagggcagggcagggcaggccaggccaggaggtggtgggacccattttggttagtggagccggtagcggcgacgcgttggccgtcgggtggaatggaaacgtgaggggtgccagaacatcctgggctgcctgccgcctcctggttttgtgtcaattgccgtgtctgtggctgtgtgtactacttggtagttggtagcgtactttattagtagcgaaggtgctagtgaccctggctaggtacaagcccttgggaggctgcttgctttgtatgctaacagttcgttccgttccgttccagcggcccttttgggtgctgacagttcgttagcacggctctgagagagaacgtgttccgctctggtttagcactaaatgaaaaaaaaaacatgtttccttt

SEQ ID NO: 36745 - DNA, 893 bp, Zea Mays
gcctgctctaccctagtgggcattcctgccggctgccgactgccgtcccggcatcctgttgttgcccatctcatcgcccgcggccggccgcccagtgccgcacaaccaccatatctccctcacagtcacagcctcactccatgacgctcgttgcctgccagccagcctaatctataagctcatcgccgtcgaggcagtgcccagctgctctcttctatttctacaagcggtcaggtagtattattagtatgttgtatggctaatggctaatggctaatggccgatggcctgcgagacaacaccaactgcgccgagctgccgcagacaacaccaactgcacactgctgcataggaggtcaggagaaggcgctccagcgcagcacggcagcagggatttctggacggatctgattgaataaaccgtgaaggagatgccctggaatagattcatgcccttcctttcaaaatgttgtacttctaccgttcagacatcttcatcatattcatctttttcctcgtccttctccccgatacaaccatggttatttgtgggtcttggcaaccctggtgagaagtatcaatccaccaggcacaacgtgggttttgatatgatagatgcatttgcgcaatcccagggtatacccctgactacacattacttcaaagcactctttggtgaagggatggttgatggagtccctgttcttcttgccaagccccagacttatatgaatctcagtggagaatctgtcggcccacttgctgcctattataaactgccacttaatcgtgtcctagtgggatgtcaagatcgaaccacggcctggtagggtcgattttgctcaaccacagccaccttagttgtaaggctcatcccttaaactgtaggttcg

SEQ ID NO: 36746 - DNA, 5341 bp, Zea Mays
gccgggaacatcggttgcatggctgtggagattggcgatggtggcaacctcgaaatttctttagaatacgcagtgcttttgcgtatggggcgaaaaggctcggaaagttacttgaatgtccaaaagaagctttaattcctgaattaaaccagttcttcacaaatacatggataagacatgggagtggaagtcgtcctgatgtgcctatcccaagtctggttgatgtgcggcctatgaaggttgtttcttctgtagtgtcaagcagccagagaagtttagcggcattcaagaaaaaagttgaaaatcctaaacttcatgttaatcaggataatcttcgtccgaatcaagataatctcactggagttggtgacatacattaccgtaatctaccaagaacagttaatccttcagtttctcatgttcagcaccaaaaaagttatacaccacaaggcaatgctaaggtctctgaacagcttgaaagaaataactcagacggattgatgcaaagtgcaagggataagagagtgccaaatggtctctttgtcaatgacagaaatgggcagaacaggtccagatttgcaaggacccgatcaagtcctgaactcacagactcgtctactgaaggatttcgtggtaggcggactaatgcagttggtatggaaaaatcttttggtgttgattacagcagaagaaacatcttgattccagaagtgtctagcaaccacagcactaagtcttcacaagatgaatcagtgtcttccatgaatggttcatctcaccctagtgcattggcagcttctgactcaaatagcgtttcaagcagctttcgtgatgataatggttttgtgatgaatgaagaactcccttctgtttctgaatcatcggatatgcaccacgatgaacaagttctggctaatttaatggaatccatgaagttgcatggattcaacggacagattcaattgccaatgcaaataccttctcatttgtctgtagcgcatccccctttactggctccaacaacttattcacaaaagcatttggctggggttccaccagctaacttaattgggacaccatggttgcccaatatgcagttcctgcatggatttgttccacctatggcccattacatacacaatccaaattttgcaccaaacatcgaggatggtactgagactgaaaaacctaatacatcagatgtgaatcatgatgctggcaaaacttggcaagagtatggtgttgggttttctagacattttgatcctgaagcaagagatcctcacttctatggtattgatggcaaggagcattcctctttgcctaatggtgtaccaggtgctcccttggaaaggcagatgaaattcacagttgagaataatgttgtaggtgatgaaacttatactggcatgttccaaattcatacaggtagagaacctgctgtagattattctaagaggagtggttatgggaatgttccgtcttcacatgccagttcatccaaaggcaaaactctggattcgagttcatgggatgaaatgactgtaaatacaacaataccaccaagagaaaattggggaaaaagacctgcctttgtggcacctgccacgactacacatggcaatactgggtggcagatgggaaatatcactgagcatctcgcagctgaagttaatgatggccccagaaatgggacagtggtaccaatcatcactgaagcttctgagatagtaacagggtctgattctttttcatcaaaatcaagaactagtcaagtacccaatgagcttgatccatcacaagttggcatgcctaatccagtgtttacaccttttcttattggatcaccacagcataggcaagctgatagctctggacttacttttgttccaacaggtccaccagttccttttgttgtgctcccgtttgttccagggaataatgatggttctggcccccagtttgagagaagcgaaggaattgatcagcttcctgccaatactgtaggtcaattttttggttcacttaatgatgttcaccaacaagattccagtgctatctcaacagtatcgtccagtactatgactgagccatctggtgaacacaagcctgatatcttgcatagtgattttgtcagccattggcacaatttacagtatgggcgactctgtcagaatcctcgtcccatgggtcctgttctataccctgttccagtgccaccgatgtatttacagggccatgttccatgggatgggcctggaagaccagctgcaccaaatgttaactggacacaaatggtgggcggtcaacgagtatttcctgtgatgcctgtacaaccggctacagaaagaactggtgtttttcagcactacggtgaagatgcacccagataccgtggaggcacaggaacctacttgccaaatcctaaggttcattttagggaccgacactcaaattcaagaaactacagaggaggttataatggtgacaggggtgactataatgataaggagggaagctggataaactcaaaacaacgaaatccaaaccgcggctatggacgtagccagtcagagaggtccggcatgaggtctgatagacaggtcactgatgagagccggtctgataggcaacgacgaacttatagaaatgactcgtaccggcatgaggcaagctctcagtatcttgtgcagggccaaccttttggatccacaagctctatgcgcaaaccaggaaacacagtgcatggggtttatacaccaccatctacgtattcaaatggtaccagtgctttatctggccctccaggaccaccattttttatggtgtactcttatgaacaaggctcaaatcatgctgcttcctcatctgaaccaattgaatttggatctcttgggccacttcctgcagcagatggtgatgacataccaaggtcgacacgccaagtaatgcctaatgggttttatgggcaaagacgtggtcgatataggggtggttcctctcattcatctcctgatcaaccatcctcgcctcagcctcgtcggtagttgagtcttcgtatgatggcttgatcacttcgtatgaaaccttgcgatagcaatattttggtccaccccttgtgatcacatcctgcatgggtgaagatggttgggccttcagcagccacaaaaaaagtatatgccctagctggcttgttggtgctctgtgattctcagaagcactgaattgtgaataccatcaaaagaggcatcaatttaccggcaggttattttaccagtcacaatgatgcttcctggaatcaaaataactatcttccgaacaaatcatggaaccttcaatcctataatatcttcatacagaaatcagaactgaactgaaggttatgagcaaggatgaactgtgttccggccgtcccgttatatgaattgtgtcaagggtaataacaatattagtttggatggagcaggaacaagcattgctgcattggaaacaatctggaatgctttgggctttaaatcccgtaccgtttttaggtaggattaagctcatgtaacacagcaaacttttcacttagatgcactatgaatcaagtgaatcgtaggaaacggattctcgtgctgaagggagggatgactccagaatttactcttaaggcacgagtaaaaaagttatccatgtcaatcttcctcgtttcctttccatgtgtgctgtgtgttgggatgttcgcatgtttctctgcccgcgtgttggttttcagggctgtttcatctatgatcattcagttatgcagagagcggcagctttataggttacatcagtgttaaaaaaataagaggaatttagggatcttaagaatcagtgtagctggtaatttgctcgtgctaaatgcattttacaatgggtacatatgtattgcaaattctgagctcgcatgatgttggtgaacattctcgcactcccagtggcctatgggctggtctacattgtttgcgtatttcccttggtaatcagggtatgacgagtaaaatggccattccctggactgctacagtggcgaagtgtgcccatacttcgtctgttgaaactgaatgacgtcctcagctcgctactctgctccagctctcttcttgagctccgaaatgaagtcctccctctcctggtctgacatgccctccgtggagcagtccccgacgccccactcggcgccccgcagacagtacttgtcctggatcatcctctcgttcctgcaaaaaacacaggttcagcgctggaaatgcatcaccagagagatcccaagaaccgaataaaagactacgtttttacttctctttgttcttcctgctcttctcgagcaggtcctgcagcaccttggacttcttgaacctgttatcgaactcggtgtacttcttctggttctccgcttgagagcgaaacagggagacatggtttccatgagtcagaaaaggcccggaatggtaaaacgcttgcagcaagaacaagtccttggcctccacaagaactcagcaggtaactcaggatctcaactaaccattccatttctccaggaactcgagccgggggaggtcggggccgggagtcgactccagtcccgagaaaccggacaggatgccggcgttcactgcagttcgcgaacaaaatgttccgggcattattagtctggaagcaccggcggcgaatcttcgaatgttttacgttccatcaagtgtgcctgactctgatgctgtgttgcaccggtgtcgctagcaagtgcgccgtgccggtgagcaagactgcaagagtagccgtacctggactggaccagaggaagagcgagagcgagacagccgccgcagggacagccagagacacccggcctgtcatcgctggtggcggggcggcgctgcatcgccccttgcccttcgggttcggcggtgctgcggcggccgggggcgcggcggggaggccgagcatggctagctacttcgcttgctggtagcctgacagtatgctaaggcccagcaatgcgaaggaggatgcatcatggatggattggatggagagcatgtagcactagcggactggtgggggcaagccgccgctgggaaaggatgggggccgacttgttctcttgtgagccactaactaaaagctagaacacgatctggggattacgctccttgatctttttttggggtgcacttgtcttggttgtttctctatgctgctcgagttttatgtgtacggaatacatatacaaggtgacttttagagttggaccttgagaattactcaaagttgtatgagttaagtacgactagtacaatacacgtgcttggcaacg

SEQ ID NO: 36747 - DNA, 3737 bp, Zea Mays
agcgtcctccggcgggaaacggtaaataaaaagagatgggatttgagggccccaaaacttccctccccaaatcccccaaaccccatcaccattgtcaccattgctcgccgaaccctagagagggcgcgggggcggataccttagctagccatggtcatcgccgttgagggcaacggcttcgtccacgacgacgaggaggacgacggagaccgccccatccgctaccttcccctcggccatatctactcctcttccacccccgcccccgcaccgcgcccgccggcccagaagaagccccgcttcgacgacggcagaccccccatgaaagtatattaccgccgccgtcgcaagaagctgcgggtcgatgaatcgctgtcgccgccctcgccaacgacggccccactcgcgccgcccgagagggacgagaaggctgggccctcgcgccggaaagactccctcaagcacgagctgctcagcctgggccccgcctcacctgcattggatggggaggagccggaacggcgtctaggacgaacgaggcgctgcggaggggctgaaaagacggtttgcttctcagaacctgagaggcggcggcagccggccaggcccaaggggtcggtcgggaggagatgggtcgagttggatattcagactgcggatcctaatgcctttgtcggattggtgtgcaaggttttctggccgctggatgatgattggtacaagggctccatcgcatggtacaatgaggcaaccaagaagcattcagtaaagtatgatgatggtgaagcagaggaccttagccttgcagatgaaaggataaagtttttcatctcctctgaagagatgaagtctttgaatctgaaacttggaatttccaatcaggataagaaggggcatgatgagttgcttgcacttgctgttagctttcatgactatcagggtctcgacccaggtgaccttgtgtgggcaaaaattacaggtcatgcaatgtggccggcggttgtggtggatgagtcaaatgtacctgcaactcgagctttgaagtcaattcggttggaccaatcaatattggtccaattctttggcactcacgattttgcaaggattaaattgaagcaagctgtgccgtttctgaatggtcttgtttcttctttgcatctcaaatgcaagcaagcaagtttcagtcggagcttagaagaagcaaaagaatttctccacacacagcagcttcctgaaattatgttgcagcttcggaaatctgttcaacatgatgtctctgatgttaattcctatgagggcaaggtagactcttgcagtaatttatcagaagctctagcattgcaaaatggagaggatgctgagatgactcaaatagaactagggaaccttcgtgtgagcaatttaggtaggatagtatctgactctgaccatttccataacaaaaaggatatatggcctgaaggatatactgctttcagaaagtacatgtcaatagaagacccacatgcagtaacattgtacaaaatggaagtacttaggaactctgatacaaaagcacgcccgttgtttagggtgatctcagaagacggggtgcagattgatggatctaccccaaatgcgtgctggaaagagatataccgcagaataaaggaaaaacagtgcactgaattggaaagaaacgtatgccaaagttctggttcctacatgtttggcttttcaaatccgcagataagacaacttattcaggaactgcccaatgcaaggtcatgtttgaaatattttgagaatggtggggacactatcctgggttatagagcggttcaggttaattggaaagatctggactattgcaatgtttgtgatatggatgaggagtatgaagacaacttattcttgcaatgtgacaagtgtcgtatgatggttcatgctagatgttatggtgaacttaaacaattggatggaggactttggctttgcaacttgtgtcgaccaggtgcacctcgtgtgtctccaaaatgctgtctatgtccagtcacaggtggtgcaatgaaacctacaacagatggccgttgggctcatctcgcatgtgctatatggatccctgaaacatgcttaaaggatgtaaagagaatggaacctattgatggactgagcagaatcaacaaggaccgttggaaacttgtatgcagcatttgcggagtttcatatggagtttgtatacagtgttctcatcctacctgtcgtgttgcgtatcaccctctttgtgcacgtgctgctgacctttgcattgagcttgaaaatgatgacaaaatccatcacatgtatcttgatgaagacgaggatccttgtattcgtttactctcgtactgcaaaaagcatagacagccttctgctgctgaacgtccatctttagaaagtgatcctcctgaacccattcaggtagttcagacagatatggcttcatcatctggttgtgcaaggaccgaaccctataatttacacaggagaaggggccaaaagcagccacaagttgtcgctactgcttctctgaaacgtttatatgtggagaatagacctcatattgtcagtggctactgccaaaacagagtaggcaatacatgcggagaatcaattcaaccgtttggtttgtcagatgctgtgcagcaagaagctattggcaatgtgtcttctatggttgaaaaatatacaatcgtgaaggctacatttaggaagagactaacttttggaaaatcaaaaattcatggatatggtgtctttgccaaggttgcacacaaggccggagatatgatggttgaatacataggggagattgttagaccaccgatatcagacactagagagcggcgaatttacaactcactagtgggtgctgggacatatatgttcaggatagatgatgaacgtgttatagatgccactcgggttggaagtatagcccgtctgatcaatcactcatgcgagcctaattgctattcacgtgccataactattcttggagatgaacacatcatcatttttgcgaaacgggacatagatccatgggaagagctgacatatgattataggtttttttcaagtgatcaacgacttccatgtttttgtggattccccaaatgccgtggagtagttaatgatgttgaggcagaggaacagtcggctaaaatcagagttaagagaagtgaattatttgaaaaaagtgaaaagtaaaggtacatcatattggttgggatatgacatgcttgtgtgatatgcttgccagtgcctaaaggcaaattctaaaaaatggttgagtttcattcttgaatcctgataattcttctcattatttgagtggaagacgaatctaattgtataggtacccaatataggatcggcaatccaatttggggacataagttgaatcaattgtcgtgtaccattgaaatgttagttgttacacatatttcggccatttgagatggcctgccatgtgtaatgtaatcgaagtacatggttgcacttttcggtgttgcccatatattatccataacaatatgtagtttcagctgttctgcatttacgaaaatgcattggaagagaaacgtccacttcaactgaatgtattctacgaaatctttatttatgggtatccgtctgttgtgcattctaacctttgtgaatatagagcgtgtatcttatactccttaagtttcaatttacaatttgtttgacttgac

SEQ ID NO: 36748 - DNA, 1353 bp, Zea Mays
gtcagcagcactgcccctgtatcgcatcttaaggagatcggttcctgcgtgcagaggcggcaacaagcgctgcagagggaggagggatttgggatggctggtgacgaccatgtggtggttgacgtgaacggcttagcaaaatccaaggatgacgggggttccaagaagctgtctgaggatgcaaatggttcggctccggctgctgcatctttgtcagcagctgttgacttggtccaggaggaggaggaggaggagggtgatggggaggaggagccgctaatccaggccgcggagtgccgcatatgccaggaggaagatagcgtgaagaacctcgagaaaccgtgtgcttgcagcggcagtctcaagtatgctcacagagcttgcgtgcaacgctggtgcaacgagaaaggagacactacttgtgaaatttgtcatgaggaatacaagccaggttacactgcgccacctcgtgttcagccagatgagacaaccatagacattgatggtgatttggttatggatttgcgagacccaaggattcttgctgtagcagctgcccaacatcgtcttcttgaggcagagtatgatggttacgctagtacagatgctagtggtgctgcattctgccgttcagctgcgcttattttaatggcactgttgcttctaaggcatgcattgtctatgtcagacaacgaaggaaacgatgatgacgcttctaccatattctcgctttttctgcttcgagctgctgggtttctgctgccgtgctacatcatggcatggatattcagtattttgcatcgccgtcgacaaagacaggaagaggctgcactggcggctgcagaggtggccttcatcctacagtcggccaggggccgcgccctccagtttgccatcgctccagactcccccgccaccccgcagcatgagccagtgtcgcagcaacagcaatagtggctgacaaccacatccccagtagttgctcacgactactgaccatacgtatctgtttcgttttcttgggcatcatactgagtcacaaaggttaagcctgggcttctgcctcccgtggccagtttgggtgtcagtgtcacccaaagttcgttacacccgaaaccttgtgctttgtattaaaccgagtgtgatccgagaatataccaatttaatgtaaattcattcttgttcttactgcggcatcattattaaccgttgtatgcactgtaatgtacagtctttcataatactatttatttttctatatggcatatttgatagatgtgaacgatgtggtgtatggaaattgaaacctctattgtttattgtgggaactaatagtgtgtttggattgagaac

SEQ ID NO: 36749 - DNA, 723 bp, Zea Mays
ccccgaattttctgcatatatctaaaaaaaatatcgaattacatcaaatccgaggagcagccacagccatccatggaggcgctctacttgctggcctccctggccgcgaccctcgtcacatccgccttccactcgctcctgctgctcctccgcctcctcctccgctacccgcgccgcgctgcccctaccgatgatgggcccgccgcggcggcgcggctctacgagggccgggtccggcacgcgcgacggcgcccggcggcgcacaccttcgagtaccccgcgcgctacgccctcgtcgacctcgaccgactgccgctccccggccacctctccgccgacgatgcccgccgcgtcgcctccacctccggccccgtgacaggggcaagatggagagctcagaacgtgcattgccgaggtcacaaacaccccctgggcagagagagtgatgtttaccttccaaccgggctctgatctcatcgcgaagcccttgcatgtcagcccctttatggacatgctcagcaactggagtattcgcgctgatgctcctggtgatagactttatgttgttatatcagttcagcatccgacacttggggactacttcactgcagttttggatgccaaattggatggacagacaagtaattctctgaggctggcaaccttcttctggctgatgccgcacaaagttgctgcatgatatactgggaggtaagggtcctt

SEQ ID NO: 36750 - DNA, 1833 bp, Zea Mays
cttggtccccaccatcgcgaaactgaaaacgcaccacaccaccagccagccagccagcctttcctctccctctctggccattgcctcgccatcgcgtcggacgggaccgaggaggaggcctgccgtgccgtgccgcgggcgatggacccgtgcccgttcgtgcgggtgctggtcggcaacctggcgctgaagatgccagcatcggcgtcgccggcgaccccgcgcgcgtccggctccggcgtgcacccgaccgcggcgcgctgccactgccgcatccgcctcaacaagatgccctaccagacggcgtccgcgccgctgctgccggccacggaggacggcccggcgtcgtgcacggccgccttcgccgccgccttccacgtctccaaggccgacctggaccgggccgccgccaggccggccgcggcgctgctcctcgccgcgcgccgccgccgcaccgcgcgcctcaaggtggccgtgtacgccggccgcggcgggggcgtgagcgcgtcctgcggcggcggcggcgccacgtcgggtaggctgctcggcaaggtcgtcctcccgctcgacctcagggctgccatggccaagcccgtcgtattccacagcggctgggtcgccgtcggcagccgccgcggcaaggcggcggcggcggcctcctcctccgcgcgcgcgcagctcagcatcaccgtccgcgccgagcctgaccccaggttcgtgttccagttcgacggcgagcccgagtgcagcccgcaggtgctccaggtgaagggcagcatgaagcagcccatgttcacgtgcaggttctcctgccgcagcagcagcgacctgcgctcgcgtctgatccgggcgcgcgcaactggctggcgaagctggggtcggagcgcgagcgcgcggggaaggagcgcaaggggtggtcggtgacggtgcacgacctgtcggggtcgccggtggcgctggcgtcgatggtgacgccgttcgtggcgtccccgggtacggaccacgtgagccggtccagcccgggcgcctggctcatcctgcgccccgcggacgggacctgggcgccgtggggccgcctcgagtgctggcgcgggcgcggcgacaccctcggctaccgcttcgagctggtgcccggccacgccacggggggcgccggcgtctgcgtcgccgaggccagcgtcccggcctcccgcggcgggcgcttcgccatcgacctcacggcggcggcgcagccgttctggtgcagcagcagcggcgacatgggccacggcatctggcccttcggcggcttcgtgatgtcggcggcggtccagggggaaggccgctgcagcaggcccaccgtggaggtgggcgtcgcgcacgtcgggtgcgccgaggacgccgcggccttcgtcgccctcgccgccgccgtcgacctcagcatggacgcgtgccgcctcttctcgtgcaagctgcgcagggagctgtcgacggcgtcccgcgccgagtttctccggtgaccgggcttctaggtgctttttagagtctagaagcggtggaactcgggtttctgtgcctactgcggaaggattctcaagcgttctctggactctggtggaggagaaagaaacaccgctgatgtgaaccatgtgatgtcttcgtgttctgctcttgttttgttccttttgcgtggagcgaaggcttctgccggagctagctgctatatggaacgaagaagaggccggcatcctaatgtccgtccaccgtccatttcccggcccagcgtctcgttctcgacgacgaagggggagggggagtcagaaaagggtatggagagacggggtggagacccac

SEQ ID NO: 36751 - DNA, 2896 bp, Zea Mays
atgcatgtggaggatggaagggagcagcgagatttggagcgtggatggcgggcgcggttcccgtggattttgggcgaggttgggcacgtcggagtggtggcgagaaaaggaaggaaggagcgtgcagtcggcgggattggaggcgaggttgggcgcgtcgaagcagttgcgaggaaggcgtgcacggcgtggttggagacaggggctcgggtgggggcaggcatggcgcggctttggttctcgccaaggtcgatgctcgcctccgccgtcgacgcggaagcgggaataggagaggagctggaggacgcaacctccacagtgggctcaccgcagcttttcgccattccgacgccgaggagagaggaggggcttaaggcgaacttccactccagtgctgcaaacgtaaagatgcgggttgggggactgccggactggggagtgggacgagacgaccagacaaatccagaatcgcagtcgcgttctgctcctggaggcccccgcctggccgcctgcgccttcgccatggaatcgcgcggcaagcggatcctcccctttctgttggtcattatcgccgctgcggcggctccgtccgccatgccccgtgacgagagagaggtggtggtagtttccggtgcgccggacggggttgtgtgggtggcccagctctcggatctccacttcagcgtgcaccacccggagcgcgcctacgacttccggcggtatgtcggcccggcgctggccatggtcaaccccgacctcgtgctgatcactggagaccttactgaatagtggtcggaagcatctgtttgttggctttgatagcacaatggagattggtcttagaggtccaaccaatctatttggacatccaactgacaagcagatgattgaattggatcaagcattatcacagtggaatactgactttgacaaggttccagtgacaaaaatcgcatttgggcacttcccgttgtctttctcagcattaacagagtcaggaaaaagtatcaaggatgtttttctaaagcaatcattggcagcatatttgtgtggtcatcttcatacaaggttcgggaagaacttgaaacgatactaccatcgggcagtccaggaaccatcattatcagagcattactaccaacataacatgcaccaaggagatgcattccagggtaataaggaaaactgttctgaagaagcttctcatgttgaagagttctgggaatgggagatgggtgattggagaaagagcagaagcatgaggatactagcaattgatgatggttatgtttcctataccgatatagatttcagattaggttcaaagagcataatcatactacctacctttccccttgattcaagattcatgcagagagcctctgcttttcgtgattttaaatgtcatgtcatgggggcatcatcttttgataccgtgagagctcttgtattctctaaacatgagatagtatctgtttctgtaaaaatatacgactcaaggccaggaactcttgaaatagtcttcgactctgaaatgaaaagagtggattccaatgaaactcgaggaaatatgtatttgataccatggaactggagggcatttgaagattcctctcccagccgatattggctccaaattgaagtgatggatataacaggtgacacaagtgtcagccagttgaggccattctctgttaacggcttgctggcaagagtgaactggacatggaaagagttttttgtgattggtattcagtgggcttcaatatatcatcctgcactgtggtgtgccttttctctaatcttttcgttgcttcttgtaccacaagttttagcagtggtattcaaagatcggttcacatataaatctctatgcgcatatggtgggcagaggacactgttgaagtctctagttggtggtttcatctgttgttttgttgaactcgccaggctggttcttgtatggttattgctactgttatatgctatctatttagtttttataccttggttattcggtcaccctattactgaagatggtagcctgacttacatgacacataaaggctggattctaaaaggacccagtagtagcaacgaagtagtccatgctgggattccagatgtcatggtcattgttctacctcacctttgctttgtgttagtacccaccattgtgattttagctgccatggctgctgagagaacagcatatcgagagcattatctttctcgatcaggaaagaagaaagatgactaccgtaagagcaggagacagatagaacatgaaaacttttggaacggtcgctggattagcaaatttctgtgtcttctctgcgtggtggttctatgcaaacattggaagctttgcagagcgctcgtgaaggcttatgctatgaaccccttgctccatgcgccagtacttttcttcttcgttcctttactcatggtgtttgccatctacaagacacggtccatttagctgttcgggagttctgaagatgtgctgcactggactgtccaataaatggtgcttcaactgtgaagactgaagactaacccacaactgaaggtgtgctacttcgatttgtcactttctctctctttcagagagcagatttgttagattgtttaacaggcatgtatagctttcagcgttgtgctccgtataaatgagggactgcacggcatttcattagaatggaatggttaggatttgaaccaaggaagaagagactaaactgctcaatatagtttttcctctttcttttgagaaagttctttttccctcctctgtttttgacctgccggttttgtttttgtacatttatccttcttgtgagactttgaccatctacagtataatagcactgtggcttgcggaatgcgtgtttac

SEQ ID NO: 36752 - DNA, 566 bp, Zea Mays
gcacagccagtgaatggcaaacggaatcgcgcctcccatcctctgctttccccaaaggccagctccaccgccggcacggctcctataaaccaccagctccccgtaggcgcgctttccccgcgacagcctgagcagccatgccggggcggcgggcgatcgacgtccggctgctgccgggcggcggcgacgccgctgcggcgcccaagtggcgcatgtcgctgctggagaacacgttcagcgggttcctgcagggcgccggcgccgacaccgcggcgagggccgtgttcgcggaggggtccctgttctgcccgttcctgttcggcaacttcttcgacccggccgacccgttcccgctgtgggagttcgagtccgacgtgctgctcgccgcgctccgccgcggcaacgccaggaccaccgtcgactgggccgagaccgactgcgagtactacctcagagccgacgtgccaggagaaatattccttgcgtttgcgtgtggcacactggcacaccgtaatccacaccgatcatcgtggaccgtggtgaaagcgcgcgtagccagaactgcc

SEQ ID NO: 36753 - DNA, 92 bp, Zea Mays
gcctagtggaacggaaagtaaaggagcacgcttagaaatacgaagataacgaagtggcatcttactatacttcttgcgctcatggcgcttag

SEQ ID NO: 36754 - DNA, 2202 bp, Zea Mays
aaacgcagccggtgggcggagccggtaattatcactcgcccctcttcaatcctcctccggtcggaaccctagcccttcctgccagcggtgggcggcgcttggccatgtacccgtcaggggccatggtgggggcggcgcccgcggcgcgcccgagcgcgtcgtcgcgggtggagaaggccacgagccacctgctcatggggcccgactgggccgtcaacctcgaaatctgcgacatcctcaacgccgacgtatggcaaacaaaggatgtggtgaaggcagtgaaaaagagattgcagaacaaggacccaaaggttcagttttttgctttaacgcttttggagacaatgatgaagaactgtggtgaatatgttcagtttgaagttgctgaacaacatgttctgcaagaaatggttaaaattatccagaagaagaatgatatgcaggtaagggacaaaatattattgcttttggactcctggcaagaggcatttggaggacctggaagtaaatacccacaatatcattgggcataccttgaagtaaagacgacaggtgtggtgttcccaaaacgtcctatggatgccccaccaatatttactcctccagctacacataattctgagacctatggttcacccagatattctgcgggaagtctaagtgacagaatgtcctcagatgttgagactctgagtttaggagatttgaataagattcgaaatgtgacagacctactgaatgatatggtgtatgctttaaacccatctgatcgaatgatcttgtgacccagtgtcgctcaaatcaacaaaagcttctgcagtttgtcagttcatcagggaacgaacagttactaaagcaaggactggagacaaatgatctcttacaaagcgtactttcaaagtatgatgctgtggcctctggtgctcctttggcggttgaagcatctgtgagagaggcaatcgaggctcctgcagtaaagtcatatgcaccccctgaacataatgataatgttaacgaagaggaagatgagtttgcccagctagctcaaaggaaaaacaaatccgtcgtaagtagtagcgacgatgcatcatccagcactttgggggaccttgcccttgtacccattgatcaagcagtttcagaatcgccatcttctgttgcaagcaatgcgctggttcttcttgatcctgctcccagtactagcactgaatcaaaagagctggacatgatcgaccttctaagcctcaccttgtgcagccctactcctgaaacttcaacagattcttcagcacaggatcaaaatggaccccagcaacctgcagttacacataatcaaaaagggcttcaggaacctacagttacaaatgggcaacaatatccttctagtgtgccacagtatccttcaaactaccagcctcacactgcaaaccaggcatatgctccacagaccagcaactatgtggcaccttgggcccagaccggagcatatccacctcagcctccggcatatgcatctggctatgcctaccctgcaccgccatgggtggcgcctacacatcctgttgattctaacccttttctttcggtcaattaccaagatccacgccctgctgccacttctgttgctcaaacagcaacatatgcacctcccccagcttcatatcccccttcaatatcttatgcacagtttgcaaccccccagtcaattcagcatagcaattctgtggcttcaccgagcaatggtcagattgcaaatcaagcacaaatgaatgtgaatcaacaaccaaaagattcttcggcagcatctagcagaccatactacatacctgataatctattcagtgatttgatcgatgcaaaaagttttggcggtggaaacaagatgggcgggcccactacaatgggtagctcaaatggtggccagcctatgattggtggaaagaaatagggttatttgtctatatatatacagctgatggtgatcggtagctgccttgttatttattatgattactttgtctggtgtacatttgtacttgtatatcgccattcccccttttgacagatttggctgcattggttgattcgtgggtgcaactgttaagtttaacagagatatggacaattgctcatgtacataaatgattagcatttgctccactgaggtggatggttgtgatgaaatctgttggtattgaattc

SEQ ID NO: 36755 - DNA, 1795 bp, Zea Mays
gctcgcggtagtgctgcgtctgcggccattgcatcgaccgcgtcgttcccttactaggaaacccagacatttcaaagttagagtttcacagcttgcagtgaatttgggttctttttaatttgttgctttagtattgaattaacgtatgatcattgtggtttatggttcacattggaatttatgtgttgttcgtgcttgatgaattttctccaaaggaacaagggagacaatgagaggcgatgttgaagctatcgatcccgggaataaagctgctgcggaaccggtgggagatgtagctgcgctatcgtcaaggctggctaggaggctactacatggatcatggtgccctcctcggtgccaggggatatgcttggatcagagtagggaacattcatgctatggacacaaactcaggtggacgtggtgttcgacaattcaaaacatacctattacatatattggaaaaggaaaccccaggcgtttcaaagttagagtttcacagcttgcagcgaatttgggttctttttaatttgttgctttagtattgaattaacgtatgatcattgtggtttatggttcgcattggaatttatgtgttgttcgtgcttgatgaattttctccaaaagaacaagggagacaataagaggcgatgttgaagctgccgatcccgggaataaagctgctgcggaaccggtgggagatgtagctgctgcggaacacgaaagttttaatcaaggaaatggtccaagggtgcatcactggaataagctcgagaccacaagtgtcatatctcctctaatctttactctctcagttgaatatgttcattgctacaatgaagccgttttgttgtttgctgtccgccgccgtattcggggtcttcgcctgcctctatgggctcagggcggacaggggcctacaagatctcctcgggccaaggaatcgttcccctccggcgacctccctcctccctttcgtctcaggccttccactgtatctccatcaaagcgaaggatcagaggctactccgttaggaggagaggaaaggaattgtgagccttgtgttggagaagtcgaagactgagagtatatggtggctccattggtgtccatgttaatggctggcgtgttctagagcaactcggggttgtcgtagagcttagggagacttgccaaccttagggagacttgccaaccttgtcatcgcgtaccatgccaacagaatgcttagcttttacgcaccagcgcgtgacgccatgtgggagcaaagttgggaaaatggatattggcggtggtcgagaggtcactcttattggaagtctagaaatgccaaaggatgacatatggcttgtcacagctatcctatctggtctgattgaataatgtgcgaagatataagtcatatatttcttggcctcctatcttcgcctcaggcagctgggagtggttttatactcgctgatgacatcaagtcttaggtgcttccattgatcaataactcagggaaatatggagggatcatgatgtggttcaagtactatgatgatcaagatggctacaattcttgagtgaagagtgatgtttaggttgttgcctgtggtgtgtcacaatatctgtgtgttacttgtgtgtatgtgagaaattatgtgactctggagtctggatagtgcaataagtattactcaagtatatgattgaatcttctgtcatactattcaaattatgtcatattgtatcttttaaggtatgtaaacatccacttttagcgatgctaacaaaagaatagaacaacaa

SEQ ID NO: 36756 - DNA, 1980 bp, Zea Mays
gctgtgttcccccaccctccaggctgcctgactcggggtctcgggcaggttccgccgcatcgtgtcgtttcttccctttcccgtttcccccgttcagttcagcttcggttggctcgccgtactcgggttgttcctcgcctcgcttcgcttccttcctccgcagtcctcgtctcgaattcgctcgcggtgggagaaatcggggcgcgaggatgaccgtgatcgacatcctcacccgggtggacgcgatctgccagaagtacgacaagtacgacgtcgacaagctcaacggcgccaacgtcgccggcgacgacccgttcgcccgcctctacgcgtccgtcgacgcggacatcaaccaatgcgtcgataaagcggaaacggcgaagcaagagaagaaccgggccgcggtggtggcgcttaacgccgagatccggcgcaccaaggccaagctcctcgaggaggaccttcccaagctgcagcgcctcgccgttaagaaggtgaaagggctgacaagagaagaaattgcgacccgtagtgatctggttgccgctttacctgacagaatacaatcaatcccagatggtagttctactgccacaaagaaaaatggaagttggggagcctcaggatctcgcactggaggagccataaagttcgactctactgctgatggaaactttgatgatgagtactttaaggggacagaagaatctaatcagttccgtcgggaatatgagatgcgcagaatgaaacaggatgaaggtttggacgttattggtgaaggactggaaactttgaaaaacatggcatctgatatgaatgaggaattggacagacaagtccctctgatggacgaaatggatgataaggtggatagagccaatgcagatttgaagaataccaacgtgagactgaaggagactgttcttcaacttagatcaagtcgcaacttttgcatcgacatcatccttctgtgtgtcattcttggtattgcggcctacctttacaaatctggagtggaagcttatatatgttggatcagctgaagatgaaaactacgatcaacagcttgagagcgtgcttgttggccctgtcaatgttgggacctaccgttttgtccttcaggctgacccaccggatccctcaaagatacgtgaggaagacataattggtgtgactgtgctgctattgacatgctcttacatgggccaggagttcatgagagtaggctactacgtgaacaatgattatgatgatgaacaattgagagaagagcctccagcaaaggtgctaattgacagggtgcaaagaaatatcttggccgacaagccccgagtcaccaagttccctatcaacttccatcctgaacccagtacaggcccggggcagcagcagcaggaaccccagacgacctcgccagaaaaccacacaggcaatggcgaggccaatggtagcaagcctgaggctgaccaatgaacacagttggcttcagatattttgatgcgtgccccttacaggttgtgctgtaatattacaaacgggattagtggttgtgcattgccctgggatcctgaactctgttctgtaacttgagatgcaaatgctgggtacctggatgttttcttaagcacgagtatttcagcctcgagatgtgatcaattgcatcgaaagcatgtgctccaagaacgcaagcatgaggaaatacagcaaaaaacagcagattaactgaatcctttctctgaatctttttgagaaacaactttgcacgacgattcactgctgtaccaggacgcgctacgtgaatttttctagacctttttggtgcttgcagtcacgatcatttcatttgtcatcttttcacgtctcttttgtgtatagaatctttgtgttgatctttagtgtagattatggggttgttcgctttaaattaaagttggctatttgtttgatgcagctttaattaggaatggtagtggattatgg

SEQ ID NO: 36757 - DNA, 786 bp, Zea Mays
cttggactccttgcatatcggtcagtttgccgtcagaacaaggagaaaaaaaggttccggtcttcatcccttccatttccaaaggacgacgctctcaccattcacgaacggcgactgcggatcgatcgtgcgtcgtctcctgcgccggcctcccttccagtcagtttcagatagtgtcttcagtgccatggcgccgctacgccagggagcaagtcggtccgccatggctgggtggggcatgtaccacggactgaaacataaaccaacgcaaatccaatgattgttcaaacaagggacgatacgcatcggacaagaaatggacatcaaatcctccgagaactaaagtcgatgtctgagcacagagctcggaagatgtgcgtatcaaccaataggctgtggctgtgcctgcaagatgccctgaaggacgcgcttcttgaaaagtcagaactgcaaaggtgtatgggcgtggaaggtttgcatccatcggatgtgttggaccagcatgttgtagttttgattcgtgctgcgtgcatcgagccatcaggagatctctgcatcggaatcatatctgcacaaagccgtcggaaagatgcaggattcccactgatattttgaaccatcatccaggaggctaggtattagattttatatatacgtggtctgtattttgattaattaaatcaaatcaatcttatacctggtctgtgttttgtttaattaaatcaaataaatcttaagtttatattaaatgtgatggtgttattacctgtttgtttacccccatgg

SEQ ID NO: 36758 - DNA, 938 bp, Zea Mays
ttcccggaaaaaacccagcgccctccccaccgccgcccgcctccctcgcctcctatcggaatccatcccgatggcgcaaggcaccgtgccgtccgcagccggggccggcggaggcggctgcgcctcggcccccgccgtctccacgaccccccctggcacgccacgggcctccgcggcagccgcgccgccaccgcctcctccctccttcgcgactggattctactacgccgtggagctctacttcgacccggcgctagagaaccaggtgctcaaggcgtggaacgcgctggcgcggcggcaacttggcagccgcctcatcgacgcggccgctcgcccgcacctcccgctgctccacctccccgccgccgcgctcccgccgcctggcaccggcgcgggcggggacccgctcctccgcctcgcaccctcgctccgcgcgctcgcgtcgcgcctcgacccgctcgcgctcgcgctctcctcgctcgccgcgctcccggcctccgccacctcctctccacacgacaacgttctcttcctcgcgcccactccgtctgccgcgctgctcggcctccatgcgcagctctgcgaactgctgcggaaggacgctggcgtcgagatccccgacccgttccggccggaccactggctaccacggtgcgccgtcgccatcgacgtgccacgcggccgcatggccgaggccttctgcgtgctccgagagctaaagctgctccccgtctctgggtacgggatggacatcgcgcttgtcgaggtcggggcaaccgtcagggagctcgtgtgctacccgctcggcggcagcggtagcactggagccgactgagagggagccccctgttttatgccaagatgatcttcttgctgcctgattttctgccatctgcttaccacccgtgtcgtttttggaatccttggcaggcgactca

SEQ ID NO: 36759 - DNA, 2950 bp, Zea Mays
cgacctattttgacaaattcctccaccgctcatcctctcccgcgcgcttgcccctttccgcttggccttccgcccctcctcttctccgcacggagcgccgccacaggtgattgctagggtttcggggccgccgcctgcagcagccctaccgccagcgctcctacgcctgtgtccctgttcctctccgtcccgttctgccggcgtaccacggctgacggccgacgccctgcagatccagcaaaggcaacgctgagatccctacgacttcgaacggcctgtgacctgtggatctgtgccagcctgttggtcgagctacctgctccagaccgagcagcccgtgttaaagctagctaaggaaacagggcctaagtgagctcagaggaaaaaaaggaacgcaatggaggaagggaacgtgcgggtggacctcgacaagctccccatcaagcgccttgaggccattgaggagactggcaacgagcactacccacctgacactagcaacgaggagcagcgactcgcggccatccgccggattgacttctcctgggtcatagagaaggatgcaaagaaggccaagaaggcggctgaggctgacactgcccagcaggcatggccctggcagggccttatggagagcctgcagcaggcacatcaggagctctctgtcgtcatagacctcatcggcacggttgaggctaacgacgctgtggcagtcgcctcgacaacgaagcccaagtcgcagccaaatgaaatactggttgacatggcagtctctgctgccaccaagctccagcgccttaggactagtgcaacaaagacaaccagagctgaaagggcagatccagtgtcagagactcctacatgagtggggtctcgagaagggataaaccgaggcaagccttcccctgtaaatgcggagaggctgcttcgaacctgcagtgacttagtgagacaaccctcaccactgcatcaggattgcccttcaaaaaccaagagctgaagggaactctaacaaagaatgtttctgtaattgttatttcaagatctactgtttattattgtacttactaccgtaatattcatttgtgccttttgggatctctcagcatttgtcatggtacttcaaacaatctgctaagactatggagcaacaattccaaaaggagactaggttctacggctccttaataagtgctcagattgcagcagaactggaaagtgaagcggcagcgggctgttgggagtccaggaagtgaaggcttcatgtttgatctagttgatagttctcagctagacacaacaacagtgcttcgattatcaccattatctttaattccgattgatcaagactcttcaggcactttgtctgtacaaattccacagaagtctttgcgttccttgagccttaaatttcatggagacatagtcaataatgcagaaagcagtgctatcaaaaagaaagaaggcacattaaccaacactactgctgaagccgaaaaggatgttttggcagatgatgatgtcaataagtctattagatatgcacattccatccttcgtgacatccacaagtccatatttgaggagcaggtatttgatatggtgatccgggagacgtttaaccagtctcaaggcatcaatgttactgggatgtgcgaagattttctccaattagctattggccaggagtgttcgttgtgcctttcgcttgagctctctggacagaacaataacgcaggaacagtaggacagcaagatcatatggatacaaattatcctggaaatcttgcagtagccactgtaaatgggaaggagtcctcaaataaggatgtgagagggtttcctaaccccaaaagcttagaaatctacctgctccatatgttccatgaaattcttaggaaactcagggagaaatctcgtcatgtggttcgctaccagagttctgctcaggctgcacctgacgattgtggcctgctaagccatttttgcatgacagtggctcacaggatattttctaacaaagtacatttggagctggaaagcgtggttagtagggttccttatctccatctgcgttcccttcctacatggcattctcgaacttcttcctggtctctctgcttgaaagttcctcagcctatcctggccaccggtcgagtcacaaagccttcagactatcacgagctgaagtacaaatccaggtcgcagtttagtacaaaggtgatcttgaaagatggccaaattagtttaatgggtgagggctccccaagcattgttgggtccttgactgggaagccatctgattcacgtctgataaatagttacaattgtgacttggaagacctcccaatgatgcttctgcagcaggtcgccagtcaagtaatccactggctccatgatgaagcgatgattcttgggatgaacgtgaccagagatttcctgtgcctgtactttgaccttggccaaggcgaaacacttggtctattggcacatgtcgacccggatgacacctatggctgcatctcatggtacctcactgttgaacacccaatggaggaggggaagatgtcagctggcagtccagagtcagagaagcgaaggtttttggggtacctttccctggaagtgctttactctaccctgatggacctgataaaattgtgcagcacaagtgatcaaattcgtgcctcttgatcgacataagtggatgaaatgatgtatgtccgtgcagtgtttaagagtatgtaaattgaggcattatgtgcaccttttgtttgctaataggatgtttggcttgaaaaatggagtccatcctctcactcttcagtatgtttgtttggttcatgaatgaaataagctgatacatcaccatcttatttcactaagttaataattagtattagcatgtggaataaagttgtctcgctactctattaaaaaaaagttccag

SEQ ID NO: 36760 - DNA, 1674 bp, Zea Mays
cgccgctcaccacacccatctgccctcccggtttccctttcccccctcctcctcctcagcgtcatgatgtcctcgacgccgctgtcgcagccggccaccgccggcgacgacgacgacgatatggagtccctcccccttgccgccgcctccgactacgcctcagtcgcctccacctttgaccccctcttctcctccacctccgccaccgccacctcgccccgctcccctcccacgcgcgccgccgctttcaccctctccccgaccttttcctcctccttcgttgacccgccctcctacgccgacgccaccggcgccggcgccggcgccgtctcctcctccccgtgctccgcctcctcaccctcctccgcgtcgccgagatccgcgcgcgtggcggcctccgagtactccttcctcgccgtctccgacccggagactgaagcagagcctgccgccacctcgctcgtccccggatccgcgcccacctacgtctcctacctcgtcaccagcgtccgccgcggggaccccgaccagcgccgccattccgtgcgccgccgcttccgcgacttcgtcacgcttgcagaccgcctcgccgacgccttccggggccatttcgtgccgccgcgcccggacaagaacaccgtcgagagccaggtcatgcagcgggacgagttcgtggctcagcgccgtgctgcgctcgagcggtatctctggcgactcgccgagcacccggccatcggccccagcgacgagctgcgcgtctttctgcaggccgagggcaagatgccactgcccggcaccactgatatggcatcgcggatgctggatggtgcagcaaggctgccgcggcagctcattgctggggaagataccgtcaccgcaccacaggaagtcgtgcagcctgccaagggcggcagggacctgcttaggatattcaaggagctcaagcagtcggtggtaactgactgggctggtgtcaagccacccttggtagaggaggatagggagttcctggagaagaaagagaagctgcaggagtgggaacagcagctcaccagtgcgtcacaacaggcagaagcacttgtcaaggctcaacaagatatggctgaaacaatgggagcgcttgggttggcattcgttagactaacaaagtttgaaaccgaggaggcaatgtatgactctcagaggatgagagcagctgacagcaggcgtgtagccactgcagctgttaaagctagcagggcatgtcgagacttgaatgcgcaaactgttaaatatctggatacgctgcatgaacatttaagcataatgttgtctgtccgcactgcattttctgatcgggcaagtgcattattgactgtgcaaacacttatgtcggatttggcatcattagagtccaggatcgagaaactcgaggctgcatccttgaagatatttggtggtgataaagctaggactcgcaaagttgaagagctaagggaaacaattagggctactgaagatgctaagttctgcgctttaagagagtacgagagaattaaggaaaataacaggagcgaactccagcgactagacagcgaaaggaaagaagaattcatgaggatgctaaaaggatttgttgcaagtcagcacatatgttttgcccttgacctgtgcaaatcgtatgtccacacgcag

SEQ ID NO: 36761 - DNA, 2032 bp, Zea Mays
gttctaccactgtctcctctccgtgacgcacgcccgagatcctctccgcgacacacgcctccctctcctctgccccaccctcctccccacgccatcggcgccgccatcatcggatccggcccaagatgcctccgccccacgcgcccgagtcgtcgaggcacactccttcccgcctccgtcgtccacgcatatctccgcctcacctcggcgcccgagtcgtcgcacgcgttcgcggtggtgtccatcccggcaccggcctcacgcaccgtctacagctcccaactctgctcctctcagttctccctccgcatttcgccttctctcccttcctctccaagcagcgtcctcctcgcctagatccgtacaagcggcaaataacctctccggcggcgagacagatggagtcgacctccggcgaggatgctccgaagcacaacccgattccgtccgcgctcgtctccaacctacagtccgtgctcaccgcccgccgcttgtccgcagccgaggtcagcaccgccgccacagctagcgaggttgaggccttggcttaggaagcagaggcgttcgctgcccccacgggagatgggacgctggcgaggcccatcgtgctactgacctatgccggggggatccggtcggcgggtctcgcggcgctcgtcgacgccctcgttgccgccgaccgctgcgacgtccacgtgtgtgcccccgaatcgtacgtgctgcgacttagaaaaccaaaccacagcgggaccagtgctcggatagggtccgacgacgatgcaagcaaggagtggcgcgcggccgacggggcgcagatcggctcctgcacgtgcagcgcagccgcgtgacagtgaagcagggaggccgcgataggtggcgcagggagggtgcgacggaggcaaagtgcaagcacctggggacttcaggtaagtagaaaaccaacactgaatttgtcggttctctgttttgtgattgaccgattggtttgttgatctcagaaaattgtttcaccgttaagcaccaatttttgggtaggtcagtgttttgggatgattctcctatgcatcaatagtaaccttgtgcttggcaaagttatttgccctgataatgttgtaggtttagtgaaaagaaatatactgacatatccacctatccatcgatgcccaatggagattgacctctatcaagatttagttatgtgtctcagtagggcaatatttctgtgagttgtatactgtggattcctcatctgcatcatgaattgatcgcactatttatgccctatttttcaaaccatggtttctgtaattctttgcaccatggtatttttctcaaatgattttatctttcacaacccggactgaactcactgaagcagaaagaaagagtacaagtctactactgcagaaagcaaggagaatgccaatagaagcagatttcatgtatggatcggataaaatcttgagcaaaatgggagaaggtttgggttttctgcaatctgtcgtctcctcttctgctgggtatctccattattattctaatgaagagggctacgagttggattttcgtaggtacatttgagcgtgttttggaatgctgggatcgtgaaacacgtgaatatgttgccataaaagttgtacacagtatccacaagtactgtgatgctgcaatgattgagatagatgtgctcaatcgccttgtagaaaatgaaaaatatagatttctgtgagtatctcagagacctaattgcttaaagtataaccctattctgtttttgacttgacagttcctcttcaatttgtcagctgtgtttaaattcagagatggcttgactatcgtaatcatatatgcatggatgtgttactttatgtttgtttgtgtttaatatagaaggctcccttgccttcgttcgatcatgtggtatttgaaagtgatgtctctataaatgaagtaaggcagggcaatgcttatgttactgttgtcagttattagatttttaaaccaagcatatgtcaatgtgtcctgtttcaat

SEQ ID NO: 36762 - DNA, 9778 bp, Zea Mays
ttaatttataattattgacgtagttttagaaatagcaaccataatacacatatttactatatcaaaaatccacaccagtcatttgtccctgagtaccgaaaatcaagggaagcacgtaacattcattgatcagctatagtaactggaaatgtttcgagagtagtcaattgggggaatggtgatgtcagccaactgaaggagaaacagcagaaaaataacaaatatgtcagtttgcgtagttagaatgtgggaaaccctaaccctaatccagggttgggagtattattatatagagaagttagatgagccaagcccattacaatatgggtcatcaggtatcatgtacagatgtctaacaaggagtctaacaccccctccccgcagtctcaactctatcatgtaccgatgttgagactgcagcgaaactcaatgaatacactcgacgatagccccttagtgaagatgtcatcgaactgcgacgtggtcgagacgctgagaacgcgaacatcaccggtggcgacacactcacgggtgaagtaaagatcaatctccacatgctttgtgcgctgatgtagtacatgactggtggagaggtagactgcgctgacgttgtcgcagtagacgagggtggagcgctcgagggggttgtggagctcctggagaagctggtggagccaggaggcctcgaccacgtcgttggccatagcagtactcgtcctcaacgctagagcaggagacgacaggttgccgctttgaggcccaggagacgaggttagcgcccaagaacacgacataaccggatgtggatcgtcacgtgtcgaggcacccagcctagtcagcgtcggtgtagacccacgagctccgaagtcggtgagggtcgaaggagaaggatatagtcgatggagcctcggaggtagcgaagaatccgcttaagaacggtgaggtggggctcctgtgaggtgtgcatgtgaaggcacacctgctgaacggcgtaggtgatgtcaagtcgggagaatgtcagatactggagagcatcgatgaggctccagtaggccgtcgcgtcggcgaccgggggtccgtcgtccacgaagagcttcgcctgagtgtcgacaggcgtggagcagggcttcagttggacatgacagcccgctccaggatgtcgagggcgtactagcactggtggaggaagagatcctgaggccaccgctctgcgatgatctcgaaaaagtggtggagaggccctaggtttttcatcgcaaactcacactgaagggtgacgatcgtgcgctgaggaagggcagccctagacaccgtgagcacgaagtcgttaggtagacggtgtcgtcccgtgccaatggatgaatagggacgtgtcagatttggtctcgacgaagccaagtgagaccaagtaggaggtgaaacgactgtcccaagacattggcacctgcttgaggccgtacagggagcggttcaaccggtagaccagatccgggcgagcggagtcgacaaagccgatgagctggctacagtagatcgtctttgttagagtgtcgtggaggaaggcattcttgacgtcgagttgatggaccacctaattccgagagagggtgagggagagaatagctcgaatggtaggaaacttgacgatggggctaaaggtcttgtcgtagtccactccaaggcattgagtgaagccctaaaaggacccaacgagccttgtagcggtcgagcgagccatcggaggtgagcttatggcagaagatccacttgacggtgaccacgttggtgccggatggacgtggcactaggtcccaagtgtggttggccattagggtcgcctactcctcttccatggcgcggcgctagtgggtatcggcgagaccggcgtgaacggaggagggaaccagggaggtagccgaagcggcatcagtcgtcagaaccagccgaccgacgagaaggatgtcggccgagcgacacgtcaccatcgggtggaagtggccggggtcgcggtgaatggcgaccgagtggtacaccggcggctcagcacaggaacgaaccggtggggtgggtaggaccggtggatcagtccacccgcggcggtggtaaacgcgagtgtggtcggcgaaacgtgtcggttgggacgcaggtgacggggccacacatggcgcatgtgagggcgacgaggtagcgccgggggcgaagctaggatatgatattaggggggcaaattagactaggggtgttagaaggattttttgcatcatttacatgagaattagctaaaaaactaatagctcctatagaattagagcattaggggggacattgccccccttgccgtcgcccctggtcccgcgtagcgcaggcgaggtcgacggggtcgtggcgcgggtagggatgacaatgggctctaaattttacacaataaaatttaaagaatcggattggattaggatcaggctctattcttgttcattttttaactaaaattaatttagggccctaacaatctgtgaagaaacatttggatcgcggtccattaccacccctaggcgcgggcggagtcgacgggggcgcgggaggggtcaacggggccgcgtgtggtgcaggcggcacaggaagaggcagaggcagcggggacatgcggagcacagtcaaaggcgacgtggccatgggcggaatgaaagagggcagcggaagagaaacatcgacgcaatcggtgtcgaggagagaataatgagatgatgcagtgggtgaggagatcaaggcatcagtaccccttgtggtcatggcagtaaccgaggaaaagacgagtggagcgaggggagaatttgtgaggagcagtggcgaaattgttgggatagcatgcacgaccaaaaacacgaaggtgggcatagaagggggttgtgccatacagggtgaagtgggggtggggtgactcaccggcttggagggaaggcggttgaggagatgggtagcagtgttcagggcctctgcccaatagttggcaggaagagacacctaaaatatgatgcaacagatcatgttagtggtggtgcaaataatccgtttggcctggccgttcagaggggaagtgtaggggcacgagagtcgaactgaacgctgtgggagagaaaggagcgagaggtggagtagatgggaacatgggatgtccaaaggtcacagtggatgaggtcgaaggggtgagtagctcgggatatggaagaatagaagagtaagcgagtatgatgcccaagccgataggtatggcaaagcgaggtggtgtcgccgcgagggcaaggaatggtcgagagtcaagagaggacgtcatggcctgggtggccaagacaacagtgccaagtggaagttggggaagtggaggcaacaacgtagggttggacaacatgggcgaaagaaggttgggtggggaagcgaatggggtatagggggctggaactgtcgtagcgagcaacaacagcacgagtggtaagatcccgtatggtgagcccctagggatcaaactccatagagcgacgtttgtcagtggtgaagcgacggaccgagagggggttctggatgatgttgggggcaacaaggatgttgttgaggtacaacgtgccaggaaggaccgtgtcacctactgaggtgacaggcagagtcgacccatttgccgacaatgacgaaggaagggaaggtggggttatgggggtgggggaaagcgacagctctgggtcgggagtggtgtggaacgaggcgctagagtcggcgacccagtcggtgggaggaggggacgccgaagacaagggatgcgagaagagagccaagggaggcacggggaccgtgacggagttagggtcagcgcaacggctcgggggctggcgcggcaggggaggtggccaggcgatgtcggtggtgatactggggaagtgaaagggaggcgccacgcccgcgcttgcgagggcggtgtagagggccgtcgaggcagcagaaaggggggcagcagggagcgcaccgaggatcaggccctcatcagcggccacggcgagggaggccatgttgtcggagcctgagaagatgtagccgctggtggtggtgctgtgtagggcaacagcggggccgatggtggtcgtgtagagcctgctggtaccaagtgggaggctggagaaggggccacggtcacccatggagaagcctgagccggcaacggggaagatggctggtggtggcagggtcgcgagccgcccggcagcggggaagatggacaaaccacgccatcggttggagcgtcccgacggctgtagagagatgatccacgatagggccacaggaggccggcatcatggagtgcgagcagagacgagtgcgggcggtcgggatccgtagctcaatcgacacgctagaggtcgagtgctcgcccggacgacgacgatggggcgcggaccgagaggggaggaggggcggcggtctaagaggccaggccagggaaggtgatcgggaggaggggttgtggcctgggaggagaggtcttggcgtccagggaaggtggctgacggctaggagtgagggagagagaggagcaaaataagacctagctctggcaccaagttagcatgtgggaaaccctaaccttaatccagggttgggagtatattatatagagttaggtgggccaagctcattacaataggggtaatcaggtaaatataagagagccctaacctaacccaaaacaggagtaacatgagtgacacttgtgaaggtataatacttaagggtatttggtgtaatctcctagtctaggggtttctctcatgtgtctcttatgtactctatataatccccattgcgcctcaatgcatcatcgaattcaatccccatttgtaacatagtaccacaactctaggttttgtgatacaggcatccattcaccactcaccaccttcatcttcactgtgctccccaaggaggatcgtctctgctcgaggcagttttctagatctagaatgtttttagtcttcatcgcattcttcatccagcacgtaatgcagcagcagcaagtcattgtccttcctcttcttcagcagtacaagtcatccagaggtaaatccaaatctgacagccattcctcgcttgttgcgactcctcccctgcaaaatcatatccacccactacggtctgtgcgtcgttgaccaatcttcaggccatcgtcgatgcatgaagagcaatatttaggccgccgtcgatgcatgaagaggccccacacagacagacgggtgagagcacacgacaaatccaggtggaatcgacgatggacatgatggttgcctgaagatcgatctgcagtgcacagaccgtagtgggtggagatgattccgcaagggaggagtcacaacgagcagggcacaactgccggattgggatctacctcagccctcaggatgactcactgctgaagaagaggaaagactgggcttgatgctgccacatgacatactggatgaagagtatgatgacaacaacgacgacaataaagcattttggtcccaagcaagttgggatagactagagttaaaacctaacaaaacccatcagtcaatgttcgagcacatggatagttgttttccatgcacttctattcaaggacattgggcatatttcatcctttcaaatcttaatttattgcctctttccttattaacttcagtcttcctcttcctcttttcctattgctatcgcgccataggatcccactatgcatgggtgcctctagaggtctccgatggacatgtccaaaccatctcaaccgatgttgaacaatcttttcttcaattggtgctcccccagcctatcacgtatataatcaatctagactcaatcccttcttgtaaggccacaaatcaaccgcaacatacacattttcgcaacagttatctactaaatatgttgtcttttttaggccaagattctgtgccatacaatatagttggtcgaatcgccgtcctataaaacttgtctcttagctcctgtgataccctcttgtcatatagaacgccacatgcttgatggcacttcatccaccctgctttgattatatggctaacatcatcaatattctcgtctctatgtagcattgactctaaatacctaaagacgtccttcctaggcactacttgaactaacatcaatattcttgtctctttgtggctaaaagtgttgcactaaagtttagcaccctttagcactttagctccaccaaaggtgctaaactatgctaaaaatggtcccctgacccatttctctctcctctctctcccccaccaaaatgtcccttctctctccttcccccaccggttggtcgcttgtttaggcattgattagggtattgtgctaaagtttagcacttgtattcaaacagccctcaagtgctaaaatttagcaaaagtttagtaggtgctaaactttagcatgtgctaaactttagcactatggaaacaaacaagcccttactatttactcctgcccgactttcatctattagcactatatcttccttaaaaggcatacaccaaaggatatccccttatataccccttgtgacctcatccgtcaccaaggcaaaaaaagtaagggctcaaagttgacccttgatgtagtcttattctaattgggaagtcatttgtgtccccatgacttgttcgaacattagtcacaacattgttgtacatgttcttaatgagtccaacacacttcattgaaactttatgtttgtccaaagcccaccacataacattaagaccaaaaaatgttgatatacaaagctacaacagaagcagaggcgatcttctcatggggagtgcagcaaagatgaggtggtggctagatcacaaaacctagaggtgtgatacatgttacaaataatacaggctaaattggattattgtattgaggccaatgagaactatagagattacatgagacgctcaagggggaaactgtcaaggacctccggtccgagggtaactgaaccgcggctacggagatcgtagtcgtgttctgtggtcgccggcggggttattcccccacgtcgtcgctcaggttgatgcctaggttattccccctaggcgctgacatgagagagagagagaggagagattagattggtagtaatttctgcttactttcctcatccaaccgaatacaatatataggtccaaatctgaaccgcaaggagctaatcactcctaaattctaggtaaccaacaaggtaactaatatggagctaatcactcctaaattctaggtaaccaacaaggcaactaatcccaactttctacttatccattgccttgctgttccagctcacgcgcggcacgttccgtggcgcggcaaacatcgcgcgcacgcctgcggcgcgtatatgtgcgaccgcacatgacatctcccccccctcaagattcagctcgtcctcgagctgaatgtccgggtagcggtttcggaaatcgttgaggtcttccattgtagtcgaggtagctggttcatcgcgccaatggacgagcagctggcgaacgtcgcgcgccagacatgagttcaccacccggtcaggttcgggcagcaccgcgccatggaggatggtgggcagggcgggaggcgtagccggtggcgtgccaataaacctcttgaccactccaacatgaaacacatcatgaagctgtgctcctggtggcaattccaatcgaacggcgacgtcgttgacgagctcgacgatgcggtagggaccgacgtagcatggcttgagctttcctgtagtggtgcgcggcagagaggcggcctggcgttggcgtaggcgcagcagcacccactcgcccacctggtaggcgaccagccgatgaagccgatcgtagtggcgcttctgcacctcttgagcctgatggaggcgataacggatgtcggcgaggaaggactcccgggcctccatgtcttgtgcgaccgcggcgacgcgcgtgtcccgggctcataggatcggatggtagggggtttgcggtcgtagaccacccggaatggcgtctcctgcagggacgactggtaggcggtgttatatgtatactctgcccaggggagccaacgcaaccattgccaatggcgatcgccggtgaaacacctgaggtacatgatgatgaccctgtttgccgcctccgtctggccatccgtctgcgggtggaacgccgatgacatgaggagcttggtgcctgagaggcgcatgagctcgctccaaaatgtcgacgtgaagacggggtcccggtcggagacgatggactgtggaatcccgtggaggcagacttgctgaagcggtcgacgatggagaggatggtcgtcttcccgtgcacgcggggaagcgcttcgacaaagtccatggcgatgtcggcctagacgatggagggcactggcagcggttgtagtagtccggcgaggtgcaagtgttcggacttgtaccgctggcatgtcgcgcacgagcggacgaagtcctagaccaggcgacacatgctaggcaagtggaagtcgtgtcggatacggtgcagcgtgcggtggacaccctcgtggccgtcttcgtggatcgtggtgatgatttcttgtagaagcggcgagaacggcgagatgaatagacgcccctcgaagaccaccatgccatcacgttcacgcacagcccaaggcgcggtgcgggtaccggcgcggatttcgtcgaggatggcgagcaagctggggtccgtcgcctgggtttgccggagtcggtcgatgaagtcaaaccggggggctgagatggccagcagcccagccgtggccgtgtcccatctggacagggcatcagccacgatgttggtggcgccagacctatactccaccgtgaaatcaaatccgagcagcttaccaacccaatggtgctgagggatggtcgcgaggcgctgatcgagaagatacttcaggctgtagtggtcggttttgacgatgaagcgccgaccccacaagtatggccgccaatgtcgaacggcctaaacgagccctatgagctcgcgctcatatgcagcgagggcatggtgacgaggcgcgacagggcggctgaagaaggcaatcgggtgcccctcctgaaccaggacggcgccgaagccgtaagtggaggtgtcgcactcgacggtgaacaccttggcgaagtccggcattgcgaggacgggtgccgaagtcaccgcatctttgagtgcgacaaacgcggcctcaaccgcttccgaccaggagaacccctctttcttgagaagggctagggatgaaaacgggacggatacagccggatacagggtcatcccgtatcctaccctaatgtatttctctcggatacgggaccggatacgggtagttaagattcgggacggatacaggacgggaccgggtaataatccggacgggtaagaaacggataacggatactattcgggtaggtaccgaataattgtcgggtagttcatccgatgatattaattgtccaaccatccataagttaagcaatacataatcatgtatatgatagatcagatgtaagaaaggaaactggtaaaattgacatcatgcagttcaaagttgcttatcacaaggacattgtagaaccaacaccgcaatatttaaaattcataaatattctagtttcactaaaaattgcaaataagttacaaaaactaataaacattttatatgaagataactcaagtcctcgtatgaaaatgataaagtgaag

SEQ ID NO: 36763 - DNA, 2203 bp, Zea Mays
atttttaggatgggagggcctactagatctaggaagcctagcggtagagaattttataataataaccgacgcgactttttctttttgttttctggcggcgtggtgttctttttcactgagaagagaataagggagatcaaacggggccgtggaaaaaggggggttagttttattcgactggcttcgcgtgcgccgatcttctatttagcacgcgacaggagcatctcgttgctcgattcggttttcttcgtgaattcgcccccagcgagccgagctagaattggaattggaactggacttgcggctgctgcgttcggcgggggctggaattctcgccgcatccccgtgtggtggtgagaggccgtggctcgtgttgcggtcgacgcgcgaggagggtcgacggcctcgcgccattggggtacgaagccggccgagactgagcggccgctgatcctggtttgagcgcctcgggttcctcttggatttggttggcgtttttatgggcgggtagatcggtccggtgatttctcagctgctatcggtgcgatggcagctgactccagcatggggtttcaccaggggatcaccgcctctctgtacaaccatcacatgctctcgttccagtccaacagcgacgtcggcatcggcggcggcgacgacgctaccggtggcatggtcatggccccggggagtgtgagtgggggcagtggcaacgccgggctgttcctctccccaaacacaggggtcgtcggcaacgcaccgggggttgccccgttaatgaactcgtcgggggatgcgttccgtggcactgggacgcccaagtataagtatgtcactggttctccttccgattggagtgaccgtgaggtagacatactgaatgaagggcttgtgagatatgctcgtgaacctagtatcatgaggtacattaagatagcagctatgcttcctaacagaaccatcagggatgttgcgctgcgatgctgctgggctacaggtaaagagagaaggaagaaacctgatggattctacacagggaaaaaaatgagagacgtgaagccaatccaggacaaaatggttgcatcagtcccaatagctaattttcacatgacacctacaaccaatgtaatccccttttcggtatcaacgcagcatccaaatcaacaaagtcaggttcccaaagaagcagctcctgttgtcgacagtgcaacccagcgtctcctggaggaaaataatcagttgcttaaccagatttctgcaaataatgaaacattcaagacagtggagaacacagatctttttctccgcacgagtaacaacatcaaaacaattttaagcagaatgagcgaaacgcctggtatcatgagtcagatgcccccattgcctttatccataaacgaagaccatataaattctcttattcaactgaacagactggttgcatcatatggcacaacaagcatttcccatcatacgaagcaagagccatgaagctagtctactaaacccagggaaaaatgagaggaccagatggccggacccctcctgcaattctgtaaacgtgctgctgaggaagtcttgcatgttatactctaaccaagtgccaggaacagtcactgctttccagataatgttttcgcagtgacctgattgtttccaacccgtctgccagcctgcctgcccaccaattcttgaagcatttggaagaagtctgcagttgtggttcgagagccgcaagctatttgctgctgtttctgtttccgttatccagcatgtagaccagagtatcagacagtggatcctggtctctgcaaatgacctgtaaatatcggacggctgctggcgttccatgttttgtttctctgatcgctcatgaatgtatttcttcttttctcccccacccccggtcaccggacagggttgcattgctcccaatatgtaactgtatacagtagcgactccattttctgactaattggacacggaaacccaaacatttgttgtccagatgttctactcttttttttcaccacttcaaaagtaatggtggacaacgagtcggctcgttcgagttcgagctgactcgttaagctaacgagccagctcggctcgttaaggtaacgagtcatagagtcggctcggctcgtttacgagctcgagctgtctcatttagctagcgagccagaacagaacaaaaataaaa

SEQ ID NO: 36764 - DNA, 2126 bp, Zea Mays
tggaatccttgtacttgtacgcacctcccctctctctcctcgaacacagacacggatacaccattgtacatgctcgctcttcctcttggagtcttgggaccgccccctcccctcttccgaggtccgagcctgatccctccttccttccgtcagcgcacatctctagggttttagcgccccatttccgcaacgccattcccgatcggatcgcccccttcccacccgccgccgaccagatcccggcgcgagtgctacccaaccctccggcgccgccacccttagtctcagagggtcggtctccaccgaaagcttcgcacaaatcccctccgtttgtcggtgccatttgttgcaaagattgtgttttcctcctcatccgtgcctcgcgttccatttctgccgtccccgaaaatgccaccgctttgttgagatctctcgtttctcgatctgatctcgcctcggtatggcgtgagagttcctaggggagggcaaaatcgtcggagttgagattcttgcgtccatttgctagtctcaataccgagcatccgatctcgaacagtgagacaaagtagcgacctttgtgccgttccttgtaactgagcttgcccccgcctgcgtatcggtgggtgacggcgagctctacggcgctgcccattcctatgaatggacgggagggagtccacggtggcgtcggggcccaacttctcatcgttctacacgcagcaccggggcatcggggcgccgggtgtccccggccactcggcggtgctccatgacccgccgcccgccgggtaccggcagcatcttgatgctgtctctgctgggtacgcattccagaccccgcaggttgggggttcccacattggacaggggtaccaccatgtcgaggcctcaccccatgtggcgcaatacagctccggtggcggcaccagctccggcggtgatatggacattggcatgggttcggctgtgtgcaccaatgttaagggggagctggggagcgggcctgcccaagatgagcaggtgaagaagaagcggggtaggccaaggaagtataagcctgatggggcggtgactctcgggttatcaccctcttcatcattaacacctcactcggccagcttggggatgggaaccatgattagtgctccaggttctggatttgggtcggagggatcaggggcttcaggcttgggtgcgccatcagagaagcgtggcagggggcggccacctggctctggaaagatgcaacagttggcttcgcttggaaagtggtttcttggctctgttggaactggttttactcctcatgtgattattattcagccaggagagggtcggtttgagatcctgtgcctttctgggtcatacttggtggtagatgaaggtggcggcgcacggacccgaagtggagggctttgcatagctttgtgtggtcctgacaacagggttattggtgggagtgtaggtggagtcctgatggcagctggagcggtgatagtggggagcttcatgtacggaggaggttcaaagaagaacaaggtgaaagccgagttggacgcggagcctgaggaggcgaacgccggcgaccaagaggtggcacttgcggagcacagcagcatggcccctcatcctgccatgagtggtggtggcgggtgggcatctggcatgatgaggcagatggagtcgagaactcccaacatcgatatcaactccatccgcgagtagtttgcctgtttggttgggtggatgaggaaggctcctcctccttggatgcacacagcacagcggcatgcatatgtttggttgtaggcgttgctatgttttaggactccagagtatattgtgatgtgatgttgtacttggatgttgttgtataagatcatgggaacgcttggtcgtgttattatgttaataaaaatatataatggatggtaagctactgtttggaagaagattaattttgaatctagttttgataggcccattttctttttttttactaacatctccctaatggtggcgtgagcatcgatagtccagaccaactccatctgacgcaacaagttagaactaatcgcaactctatacatttgacacaacaaattggaattgatcacagctccatc

SEQ ID NO: 36765 - DNA, 1797 bp, Zea Mays
tcagcctgctggcctggaacaccgtcgtctactcgctcacgttcctgagtgctgcatctgccttgcgtagtacggggagaaggaggaggttcggcagctgccgtgcacacacgtgtttcatctcaagtgcatatacaggtggctcaggatcatctcctcttgccctctctgcaagcaagagctcaagtgaactttatattcattacacacatgacattctcgcttattctttggatcaaggtttccagctaacaagggaaatcaaggaagaattgatctttatattagcaggcggatgcaatcactaatcaaaaccacgatgcaaggtaacctaaatggattttaaattttattttggattgttaaatctttatttctgactactattgttttatgtcgtggatgccctcgtgaggttctacgccgacgccttcaggagggattcacagaggccatggtgaggatggccagcttgagtcggctcaccgggagcagcgcgagatccgctacaactaaatgataggaggtttcgctgccatttgcagcgactgtgttccagttcgaccgtttggggaaaaggcaaggaaacaggatctgtcacggaaggcgattcccatttctcagtgatgtcgatgtcctgtactcctgtatatttggattcaacaatatgccattagtatgctgtcaagcgtcctatttgcaagagataaatggcttacgcccgaggggcttattcttccttatcatgcgttttcaggtcggtcgtgactttggttatccactgaaaagatatgcttggtggtgctttcttgtgttgaagaacaagtatcccacggaaccacaaccgtttgtattatctggtgatttcctacattattagctggcctaactaaaccatgcgctcagaccctaaaccagctgtaagtctgtaacttaaaagcacagtgcactagcggaatggggttccttgctttttggagcgtttccccagtcagatcggcggcagggcaggtcacgtggacggggctccttgttgctggaactaaataccgtggagagtttgaagtgagactaaagaaacttatggaggaaattaagcaaaatgaagacattattctctttattgattaagtgcacacactgattggagcaggtgcagcagaagtgcattggtgccacaacactggatgagtataggaagcatatagagaaagatcctgccttggaaagaaggtttcaaccagttaaggttccagagcctactatggatgaaacaatacagatcttaagaggacttcgtgagagatatgaacttcatcacaaactgagatacacagatgatgctttaattgctgctgcacagctgtcttatcagtatatcagcgatcgttttctgcctgacaaagccattgacttgattgatgaagctggatctcgtgttaggctgaggcatgcgcagctccctgatgaagccaaagagctggacaaagagctgcggcagataagcaagcagaaaaatgaggctgtacgtggccaagattttgagaaggtatactgttgtttggcacagcggtgacaaagccgatccgctcccacctctctagcaacgtcgatatggttaataccaagcattatgttgtttccttttgagataaatattttgttactgattttaccttttgtctcctcttcttgttttttgttctagaatctgtagcaaatggctaacgatgaggatatccattactttgtttatgacaataaaactgatatgttcaagattccgtagcaacgcac

SEQ ID NO: 36766 - DNA, 1797 bp, Zea Mays
cccgtcgtcctctccatttccttctgtctgcttgccctcaaaccctagcccgtaccggcgtccaccttcgcgcaccctcgcctcaccaaacacccacggcgcattggcgcttccacctcttatcgtacgaaggcgagcggctttcacggtgtctctctgtcgcatgcaatggcaccgctgtttgaggggcgcccaacagctgcctgcccacggcatgctcaggggcgctggggtcccttgccgctgtccctgaagtctagcctgggttgttgatcttgccgcagatgcggtactccattacttctccgcccgcgccatcatttcggccacacctcagtctgttggtcggtcgcagatcccttgccccgtcgagcttaatatgcaatccgttgcttgtgaaggttgtggcttccttgggtgatgcttatttgagaacatagctgttgtgctctgagcatgtcctgtgtgcctgtcatggcggcttcttttggcgacatcataccaacatattcaatgtcaggctttaaaggagtgagctggtttctatattttaactgatgcaccttgatgctttattgagcggtgtctatgaaatgatttggatggaagtaaataactaagtgacaatggaaagcgatagatgacatccatgggcaaataactgaagacaacaccaacgtagaacttatcatagttttggaacttctgcgggtactcctttggaacatcatgacttgagaaacggttgcatctcagcaagtgtcccatttaggttaaagtggattgaccatttaggttaaagtggattgactcatacatttccaatatgtgttgctgcctgctgtcccttcatgtttgtgatttcaaaaggctatcctatgctgctgatcagtacttaatggatgggagaagggtcagacctcagataagtacctaacttgctatttcctatttttttatcacttttattgatgcccaattgcatctaaagtgttgtccacttctattgcagcagtgcttgaggattcagtgatcagcagatctgcaaggacaaaaggaccaaaggagtgagctggtttttatattttaactgatgcacctggatgctttattgagcggtgtctatgaaatgagttggatggaagattgtcgtgttttggacaatgccaacctttgtttccgctgtgcctgccaaggttgtggcttccttgggtgatgcttatttgagaacatagctgttgtgctctgagcatgtcctgtgtgcctgtcatggcggcttcttttggcgacatcataccaacatattcaatgtcaggctttaaaggagtgagctggtttttatattttaactgatgcacctggatgctttattgagcggtgtctatgaaatgatttggatggaagattggagaaacgcccatgggcctggcaaactgtggcatgtggctttgaactttgccaattggagacctgatgtggatcattttgggacgcgagttaagccccctgtttggagtgccagaaacaaaacagatggagaagggaaaaaggtgtcaggggataagagccagcgcctgatcaccgttttattcgtttttgagtaaactgtagcgagcaacaggtagcctataattgagacaatgctgaatggattgtagaaaaggatctgctttaatttccgttaatttagcgccttcagtgatgttcctagttgctggagtacatgttaagtatatttaccatttaaatcctcccaccactctcgcgtagctttataaaaaagctcttaataaacca

SEQ ID NO: 36767 - DNA, 2162 bp, Zea Mays
caaccttcttaattttctgaagcttgggcgggatctcggctcgcctccgtccatctctatggcgccacggggccaccacctggcggaggtggccctcctcgcctctgcttcggcggacctcgcagccgcaggcgccggcgagagggaggggtggttggacgaccccgccatcctcccctcgctcgggccccgcgcgcgatctctcgccgtggccagcgcggcgcactccgtgctcgtgatcgtcgcggtggcgggaggtggaggcggcggggtcacggtggagcctgcgctggggcccgacgagggccgaatctccgccgttgagtgggtcccgttcgccggggaggacgatgcagagggggaggagggggtgtccgtggtgatcggcacggacgctgggtggctactgttctactcgctcgcaggcgatctattgcacaagcaggtcgttcagtatatatcctgcaaagatactgaaactcaactttcgtgagaggaaggagaacgcttgggaagattcaggctcagatgaactttctgtagtgtttcctggtgttatcgcgcgctttgatggtgctgaccttcagaacgttcttaaaaaagcatttcaagatgtaaaatcacgcctgtggaaagataagtttgaagagcaagatgctgaggatgaggaaacttttggacgaataccctttcagatttggaatgtaaacaagttcagttcatgcgctgatgctgcaattgttggtctgatgccacctcccttgttagaacttcagctgcttttatattgctgggcagtcaagtcagcgccactactgtgccatcacagttggagaggatgctgtagtttcagcatataggttatcagaagatagaaccaggtcaattgttggagcaattttgtcaagaggtgtagctgcaacattttcgacaatatcatctttgtccaaaatactatggcggagtgagccgtcaccacctaaaaagtcacggccaaagccccaatcctttgcaaaaacatcacccctcacctgcttgaaagactccccaaggaaaggagaacggcttacactctctccgagtggtacgctggctgctataactgattcacttgggcggatactactgctggacacccatgcgcttgtggctgtacggttatggaagggctatcgtgatgcttcatgtctatttgtggaaatgcttctgaacaaagacaaggcttcgtcagggtcgatgcacatagagtatacgaagagtgactattgtttgtgtttagcaatccatgccccgcgaaaaggcataatagaggtttggaagatgcgcaccgggtcacgcctcctaaccatcccatgccccaaaggaagcaggatcttacaaccctcagcgaggctctctacgtcgtcgttctcaccttcgtattccccgctggaggtttacctgttcaatggagactctgggcaattgtcagttttgaataggcacatcggatgaatcatttgttcctttgttgtgttattaaattgttactgccaagtgttgtagagaattacttgtttcagtgtttacagttttgttaatcaagaaaaaaaagtgcgtgggtcaggattgaacaaacagagatgaaattgggcggatggataaaccagaagcagacatgaatgcgggaggggagtggcaaaaaaaaaaaaggagagtaatcttggcaatagatacaggtttccttttacctctcttatttccagcccgtggaaactaccaaaatataccctaccccttatggcctcatctctttattaccatgaatgggaacacaactgaagacctaccagagtctggagactttctcacgttcgtctctccctcgcttggccttgagcatcgccgggggaagatgtaggcgaccggaacaggggaatccctcctgggtaaggttgctgtcagcagtccctgatccttctctttagaatgtgttttgtacagctgtgagttttgaaacaaagctgatgtgatctgtctgctatgaaaaagttgttgagtgttgtaaaagagctaaaaattatttggttcaaacggctgagtgaattgtctataaataaattgtatatcgtttatatacaattttgttcaactatctcttaattaatgtatcgaataaaaac

SEQ ID NO: 36768 - DNA, 908 bp, Zea Mays
gcgaccgccaccgtcatgaccgccgtttacccgatcatgcctcgctatacgccaccgtaccacatcgcagtaagtcatgggggatggccaattactgtcccgagcccttacccctttgagcgccatagtagacgagctccgatgactcatctcttcaccgctgtgagctcacctcggtccaaaattcgtagcacctatagccagtctctataaattgagtgccctccctgttccaccctcttgttacacgctcagtgcaccactcctcacctcgatccatccaccgtagcccaagaatttggaatttcccccaaatcggtcgctgtcgccgccgtgaggcatcgcgctgcggccaaccattctcaggtgatgaaactgctgagttctgttgtttctactccaaggttgttccaaagcaggaggaagaaaactaagaactacctttggaaggtgttttgccatcctgtgatgtaataagtttaagcacttagaacccggttatgtaataatcaactctttctatattacacttatgaatgtaaattatgttattgtaatccttttcgcttactccgatggtgtgtaatgtttgcgttatgggataagcgctcttgggcgatgtgatggggatacggataatcagacctaccaagccattgagcgcacctccatgactgtttgaggtccttaggacgaggacatctataggtgggttttgagttttggaattaggtgaacacggttgatctttgaaaagggctgaaaaagacttagagaaaaggctgatttttccctttaagttctctagttgagtgatcaatttgggggtgttttagactctttttggggaaactttcttattatctttggtaaatatttagtgatcttcaatgtgtataattagtcga

SEQ ID NO: 36769 - DNA, 2663 bp, Zea Mays
agaaaaccaaacgaagcaagacactgttctgggctcgggcccaccatttgtcctcctccgccggcgactcgccgatgcccttgccggactgcggccgccgcggcttccccaccctaccgctcctccttctcgtccttcacgcgctccccaggcggctcccgcggtgcgcggccgagtcggcgacgtgcctcgcggtgtaccgggaggggggcgcccccgcggtgttccagtccgcgcactgcccgcgctggaccctccccccgcacgacggccaggggggtggcgggggaaagagcatccctatggggtgccacgtggcggcggatcgcggccgccgccggtcccaggaggaccgtgccgtctgtgccctcggcatccgcatccccttcgtagagaacatgagaattaaggaggttgatgtgggagtggtggcaatatttgacggtcataatggagctgaggctagtgagatggcttctaagctttttctggattacttcttgctccatgtttattttcttctcgatggcatacactctctgcggttcagaaaatctactgggaaactgacatatagggaagttactatttttaacaatgtatttaatctgtacaagcatggccaatccgaccatgcagagaggtcatgttgggcatcaccagccattctagaccggtcatttcatacggaaattctgaaggaatcactaatgagggcagttcatgatattgatttaacattctccaaggaggcattacagaacaattttgaatctggttcaacagcgaccgtggtcttgatagctgatggacaaattatatctgccaatgttggagattcaaaagcttttctgtgctccgaaggatataatctgcaccatcgaaataggaaacgaaggagaaagagaaactcaattaatcacgaggaatttgctttggcaaattatgatggaccgttgtatcatgcaagggagttgacaaaggaccatcatcctaatagagaagacgagagaaaccgtgtggaggctgctggtggttatgttcttgagtgggctggtgtatatcgtgttaatggcgagctagcactatcaagagctattggtgatgttccttacaaaagatacggtgtaatatcaacacctgaattgacaggctggcagattctgtcagaaaatgacagttttcttattgcgtcatctgatgggatctttgagaaaatgactatgcaagatgtttgtgacctaatgctgcatgcaaaaattcgtgttaaacatgattttggatcctctgccataacacaacgtaatttggcagattacgtagttcatgttgctttacagaaaggcacaacagacaatgtggctgctgtggttgttccattgggatcacctggtagcactggtactacattaaaagattcgtcccagttcgaagaagatctcaagatatctatttctccaatgttgaatgttccatatggattgaagcctgatcatggacatagttcagctgtcattgacatggagtatttcaagcgctcatcaataaagttccagaggttcttggttgaagcaaaacctaagaaacttggttgtttctatttatccgagagtctggatgaagatatggactatatatttagggtgccggaagcataccagcgtgaagaagtccatgacttcaaccacataccagctgagactgccttatattctgatggtaatctggaaaaatacaaggacaaacacttttgcttgtaccttggtcccgaagatggcgaaatgggacagtgcaatggtcctgaagcttttgcaaacttttttggtctacttgactcccttccgcataatggaagcaaaccaaatggttcacactcctttggcaacacgatcgatttcaggtacaagctcaagagaaggtttgatcgtgggtcgtacggtgaagtctggttggcatttcattggaattgttctgaagatacagatgttcataaagagcctccacactttacaaatatatctcaatcagagatgtataattgcacaagttcaggcagaatgtcatctgatgaagatcatggttcaggcacagtaaatggtgatttattcatactgaagcgcataatggtggagaggggaaatgcagcttacttgagtggattgcgggagaaatactttggggaattattttcaaatgcttccaggactcttgaaggtttgtcgaggatagaatcatcgactatctcagtggacatgctatatgatcctgatatccatctagaaaagaacttgtcagctactgaagaaccacttaagcatgtggctaggtttatagaatcttttgaatcagaatcaagggaaatttggctggtgtatcacaatgaaggccactcattatcaaaattgatatatacagctgaagaaacgaagttagtcactggcaacaataatgagagggtcagacatatccaagttttgcacccatcgaagtggtggcattggctaaggacaacaaaagctgggctaaagcagatgcaaaacctcttatggcagctgttgatgggactgaaggcttgtcatgatcgtaatatcacccaccgggatatcaaacctggtagaaatgatgtcactgcctattttttccttgttttctatacttcttga

SEQ ID NO: 36770 - DNA, 10250 bp, Zea Mays
atggcttatactgctagttcattgatgactaggtcaagacaagatgaagtaaataagataattgagatatcaaatgttggaatttactgtcatcagctggaagaagagcaggatctatgccatgttggtgctcttgaaaatgaccactcaagggattatcttgtaaatccattttgtgtgactgtatctgtgcttgctaacaaagctgccaagcttgacggtacccctcagtataacatgactgcagagctaactgcattggccctatctgttgatgaaatccagctccaacaaatcttaaatctttgtgattacttcactatctgtgctttgcgaacaaaatatggtcgttaccgtccttctcaaagctctttatctaagagatgtaaaggttggtacagaatgtggtggcaatatgctcagaattctgtattagcagatgttcgcagaagactgaagaaaacttcatggcgttatttgaagcagcgactgaatcaccaactaagatatgtgaaattgtacagaatgaaattggagcttttacagaaaggacagattgttagtgaagacattctacaagagttggaaaatatggacagagaatgtgatatagatgacatacttaactacagaacgattgcagagcaacaactgcaggttgttgatggttctgttagaagaacgttgagggaatcattggtgaaatcttccatagatactcatagtccaggaagtcctcgaagcgatgaacagttggcaggggcaagccagggatggttaaactggctttctcttggaatgcttggtgttggtggaacagctgatagtagctcatttgctggtgttatttctgaagacattattaaggatatatatgagggaacagaatttcgtccagtttcttctgctgaaaattgtttgaagaaagaaaactactattctttgtttgttagactatctatttctcagatagtcacaactgtcacctccaggaggtttggcacgaagcttgtagatacaatgttttctgggcttggtatggaatgtaaaatatgggatgatgcagcaactattcttgcttggcttgattctcttcgggttatcaacccactgaataaaacgaaaatcttatgggctgaaaagtgtagcaccggtgatggtcttggggcacctgttgtcagtatccaagtcgactttcccaagtcaaatgaaagatcagaagcttcaacaagggtcgttgtccaggaattcaacgccatctatgaaccagaattctttgttaatgtcctgtacatctacaatgtgttttccgctttccaatttcagcatgatagggtactttcttctctaaatcggttcaataatttgggaacaagacttgtctccaaactgaagtacatgtctgctaatcgtaaaaaacttatttgggatttgaggatttatcatttcgtcattaggataccatcacagaattgtgaaaggaaagaacttgccatggttattgatgctggggatgtattcattcagtctaaagatacaattgacgatatttctcgaacacaagaaagcaattcctttcttgatcacatatcaaaaagtcttcctagttatttttctgatgatctgttactcggtatccagttggatgagctttataaccagtttgagcttggccttactgggtttcaggtgaaggtattgttgcctgacagacataatgtttcctctacactgattaagcttgatgcttccattgcacttcgattgtgtgtattcctagatgaaccagtgctaaaacaattggaggtcggttttattgtgtcatctattgatgcatacctctctcagacaatgtacagtaccattgttaatttgcctagaatgaaagaaactaaccttttcaagaacagcgtatttgataataccaagacacatgtacccaagaaattggccttgaatgtgtctgtgtctctgaagctcgccaagttaggtttacatgttgaccttgatggtaattttgaggaaagttctggtctcattgttggcattgaagacattgatatcaggtatgctatctgtgaattgtcagatctttctcttgccatgaagacggtcaatgttactttcagatattggaaggataaatcagattcacatgtgctatgcttatctgggaacttaacacgatgtcctgaaaattctgttgaaacttgtttggatctgcattatagaactcacaagcatgacgatcaaatacatcatgtataccggctgattttatgtgatgttgatctgcatgttaacccatctgttattggtcagataaggatgtttttaagaaaacttgattcaggaccttcaattggcagtgatgttgaatccacaatgattggtcagagttccatgaaatccggggcagctaatggcatacttcccatgttctttttgtcaaatttatgtggtgcagatggcactgtattcgcaggagtttctgttgaccacttcccatttttagttgcagatcacagttgtggatataattttgggtgcttaggaactcaaaatgttgaagcacaagaaagtttatactcaaagaatgagcactgtcatgacacttcaggtttgaatggttatcatgcatcagatctcaccagcaatacatacggtaaaacccagcgttcagattgttcatctggctcatcaaatgaccccaagaatgccagcagaactgttctggatctatcacttatttctgttagaatacattttcctgaatcatgtggtactttagtaacaataaccattcctgaatcgatatcaacactcacttattttgatgcaagctcatgggacttactattgtctgctaacaatttgactcttgcttcaccatggactccaccaaatgtcaacgagctggtctggggcacagcttcacatcgcaatgctagtgtactcaacgttcgagttaaaaaggacttacctgcactgtcaaccgaagtatgtgttggaattcaaaacgtttgttgtgtattaccatccaagttactggctatgtttgttggattctttttgttggatgattggaatcgtattgcagaacaggaattccttgtggcagataacaaccttgaaggcttgagagaatcacatgactgtgtaacatataaatttgatatcagtgattgtgttgtattttttcctgtggaagagcaaggtttatcgtgtctaaagctggaggttccacattttttctgtgagttcattgcgaacggaagctctgtagaatttgcaaagcgtatccccaaagaattcttcagttcagagtgcatagtttccagaagagttgatgtcatctgcatatatgcaagaaatgcatccatatcacttctaattgtaagcgaccaaacagattttatgctaaagcttgatgagaacgttcctaagagaatccattctcttattgaaaagcttgatgccgacgtatggattcaggttccttgcaaagatataccatactcgcagcagcctacttcacctacctccgttatgagcaaaatatcacgatgcaacttgattgctgaagatttatattttataaatgggatggagacagttattggtgttgttgaccagttgatttcgatcggcaatgaaagtaaaatgtacaaaggcaatgcctcacagtttttagatcatagaagtttctgtgagggcaaccctgatcctaatgagtgtaccaatctcactatttcgatcaaggatctgatgattctcttgggccagtctaaagctaaaggtctggcactggagaggattgccactgcaaacatggagtttgatgtttctgctgtactagttggtgaaaaaccagagcgcatagactttgacgttgtttctttaacactgcagtcacctggtggttacacactcatctccattgtttcggatgggccactatctcctgtttttttcaagtttacaaagcaccatactggacaagatgagatattactaagtgtacccctttttgagatctggttatatttacaggattggaatacaattatcaatcattcccattcatacataaagacagaagtaaacagtatgcctgtggagcatgcagctgctttgtctcagtttccagaaatggtatcgtcaccacttattgcatcagaatttggttcaccagatgacttcaacttagtggtaacatgtgaaactatttctggtgtactccatatacctatctgggggaaagaagaaaatcacacaagcaatcacatgggtgtgactcctgcttcttttccaatggaagtgggcactcatgagacagatgatattcaatattgtgaaccaaaaggttgcaagtttgtcaccttaacttttgatactaaacattttgtggtgatgtcaggtgatagctgcataaattttagatgtgatttagagagattgaaggtattgctggaaatgattcaagagaataagggtacctctgttccatttgtgcatatatctaaggttaaatcttctggttatgttcgtcaatcagaaaggaatttggaacatctttctgttgatctacaagctgaatacatggatgttagtttttcacaccagatatttaacttctggcataacatggaactcaaatttcctgctgcatcatctgcatcctctttttattctgtggcattcaaggcaggattgaggaaagggtctcttctgctaagcgatggaaggtggagcagtcatggacctgtaatagagacgttattgaagaatctaactgtgcagttcagtcaaatgaaggataggacagaagtgtctgcttttgttgaccttttagtaaattacaataacattgataaggttatgtgggaaccttttgtagaaccctcaagatttcagttaaatatgctaagaaaatgtggtgattgtggattggatatatcacccagtactgatgtgtgtttaagttcaagcaagcagcttaatctgaatatatcagaacccttaattgaggctcttctcagacttaaccagatgattacagattctcttgatccgagtaatggtagtggtatttgggaagatcctggaatcttgagattaaaccatgatgatgttcgtaccagaagatacgcaccatactttctctcgaatgacacatcattgccctttaggttcaaggtgtaccgaggtgctgttaattcagatgatattggcagtttctctgtaatagatgaaaactctgtgccggcggggtatgctgtcccaatttacgtcgaagaaactcctgatgaatttttcttccaacacagagaagcacgatcatcagaccatctcatcgagaaacgaatgagtgctctatcacactacatgatctccattgagtttgatggaacatcaggcccttcaaaaccaatgtcaatggaccttgtgggcatttacttctttgaagtaaatttctcttcaagtaaaaagccaattctcggcgaagaaagtttaggagcattttcgtctaatgcaaaaggcaacgatgggttaattgtgcctgtggtgctcgatgtttccttacagaactacagcaagcgtatacgagtttattcgacggtaatactatacaatgcaacatcaatgcccctcgagttgaggtttgatataccatttggtcttgcatcaaaggtaattgggcccattcctccaaacaaagagattccactgccggttcatttgtctgaagctggccagattaggtggcaccctgtcggcagaacatacttgtggagtgaaacccgctccttgtcaagtttgctttcacgtgaaaacagggttgggttcatgaaatcatctgtttgttatccttctcaccctagtaatgacccatttcgttgttgtgtatctgttgaagaatacaatgtcccttcatctgttagtaccaagaaaaaacagttgtgcagtgaaagattgaacacacaagtttctggaagttctactccaaatacttttaagcaaaatttgacaaggacacattttatacggcatgtcaagcttaataccccgcttctcataaagaactatctgcctgtttacatttccttggcaatagataatggtgggtctgcgcgggtaatttcgctaaaggaggtagggtctgcctctattttgtttgttgatccctccaatgatcttggaattacaattgatattcaagattataggtccttgaacataaagtttccccgggctgaatcattctcaactacagccaagttaaatggcttcaaattctccataactgagtcaattactttctactcaaatttgtctaattttcctcttaatgttatgctggaaaaatcaatggatgctcgttctggcgcaagagagttgtatctttctgttccattcttgttgtacaattgcacagatctattgcttactgtcactgaaagcagctctgagaggagtgggcctactcttgtgattccccctagttttgaattggatggatatgcaagacatatgcttgaaaagggtggtctttctcttgtcaatccttctgtacaatgctttacaggcaaaatgccccagatatatttgatggatggacactgctcttcttcagatataagttgtacacgtaacagtgagtctgtaaagaaagatttggacaacagtgttaaagcttatatgtttgctcctgatgggcacactccagcaactgaactttcagttaagttgaatgcttctccgcctaataatggaactgaaacaactcggcgaaattggtcaaatcccttcctccttgtccctgccagtggttcaacaaatgttactattcctcagtcatctacttctggtgccttcttagttgcagtggcatctatacctgtttcaacagaactttttggcaggacaagggctattgctttcaggccaagatacgtcatatgtaatgcatgcagcaatgatttgttctttcgacaaaaaggaacacggttttctaagcacttaagttctgggcaacactcttttcttcactggtctgatacagccagagatctgctggtatccattcggattgatggcccaggatggcaatggtcaggaagttttttccctgatcacctgggagatgctcaattgaaaatgcggaatagtgcctcaggtttatcatatatggttcgagttgaagtgcaaaatgccgatctagacttaaacagcaatagattttctggaaaaaataatatcaatactggtacagtactgattctgctttctgatgataagactggttttgtaccttacaggatcgacaatttttcaatggagaaactgcggatatatcaacagagatgtgaatctattgaaacaattgtttatccctacacatcctgtcaatatgcttgggatgagccttgctatcctcatcgccttactgttgagattcctggagaacggagtttgggtacattcaatctggacattctcaatgatgatgttcatgtgtcactaccatccacatccgagaaagctgcaagacaattctgcatctcaatacatgcggaaggagcaattaaggtgctaagtgttcttgattcaaattgccacaataaggaaacaaatgaaaaggattttctgggatcaaaggaacctaaagttgttgatcacaaactggagcttgatatgaattttgctgaggttatcaaattacacttaccattcatcgggatatctttaataagttcttgtccacaggaattgttgtttgcttctgccaaggagatgactgttgttgccatgcagagtttagatcagcagagatttacggttcagatacaatctatgcaaatcgataatcagttccctgatagcccacacccggtcatgttgtcatttgagggcagtcataagggaaaatccatgaacttttttaagagtaaagatactaagctgaaatcagcaaatgacattctttccagtaccagtgaacctgtgctgcagtttgctgcagctaaatggagaaccaaagatgtatcatttgtttcctatcaatatataaacataagtctagcacctcttcgccttgaacttgaagaacgacttgtcttgagcatgattgaattttttagatctgtttcctctcgaataaatattggacacttggagaaaagtattgagctaagtataggtggtgctacggacatgttaagagaatatgaaaaaatctcaaagaatatatcagacaagctcctggtgcaagacagtgaattgttgccttctgttgtcccagttggggctccatggcaacagatacaccttttagccagaaaacagaaaaaggtgtacattgaattgtttcagttgactcctgtcaagttgactttcagttttacgagcacaccttggctcaataggaatgaaggtggttcagaccccagcgtaggtttcaacaacgctactgcaatccagagaggtcttatggccctcttggacgttgaaggagtaccagtttaccttggagaaattatagtggaaaatcttatggccagctggcaatctgttcaggacattcttatgaggcattatagtaggcaaatcctccacgaactttataaggttttgggttctgctggcgttataggaaatcctatgggttttgctaggaatgttgggtttggtttaaaggacttcatatctgcttcaagaaaagggaaattgcagagcccagttgaactattaaacggtatagcacaaggttcaaagactcttattggaagtacggtttatgcagtcagcagtgccacttctcacttcagtaaaactgcttataagggccttgttgcctttacatatgatgagcaagctgcttcgaagatggaagaacgggaaagacagctaggtttgcatggggaaggagtactgaatggttttctagagggtctgactgggctccttcaatcaccgattaggggagctgagaaacatggtcttcccggggtcatctcaggtttagcaatgggaacagctgggcttgtggcacggcctatggctagcattcttgaagccacaggcagaactgcccagagcattagaaaccgaagcaaccctcacgaatccaactacttgcgagtacgtttccccaggcctgttgccagagatcgccctttgtttccctactcctgggaagaagccatcggtgaatcgttgcttgcccaagctgacagtggcagactaaaggaggagacatttgtcatgtgcaagacactcaagggggctgggaagttccttgtgctaactgagaagctgcttctgctagtctcaagcccatacttggtggatctaggatcgcctcggttcatcggtgttcctcctgacccgcagtggtcgatcgacacggagatgcacctcaagagcgttgttcatctggacaggtctcaggaggtagtgaacattgttgggagcaacggacagacctcacctagggacaaaagaggtggcacgagaaacagggtcatgagctcggccttcgtccccctgtttcacctcagcatagagctgccaaatgaggaggatgcagaagggacggtgcaggtcctacaggcactcatcgagaagggcaaggcacggaggtgggacaagaacatcctacaccggagcaacatcagttgaggttttcacaacagtagtagaggttggtgttttgattgaagtggaagataaactaaattccaccccgtgactcaggtggattaaatatacaaacaaggcctcaaggcagagcagtcaccagcatacataagcttagtgtgaataagaaaacaaagtgttccataggtggtcaccgttggacacgtgcttcggttttgttttaagcttagtgtgaataagaaaacaaagtgttccataggtgatcaccgttggacacgtgcttcggttttttttttttttttgcggtctaggtgtagcttctagaagttttgtcgacggctcttgtaaatgaagtgtgagagggcttatgttatgtgtagcaacaccactgttttatgccacggctatgtttacaaacttcgccgttcatgggccatggatatttctgatttcaccataatgaacttagcggaggtagggggtacgctgacaaacgtattgtcgagtagtcgaactgtcattaaaggttgtggatccaggatttaaatctaggatagtcaagaataaaaaatatgtaataccatgta

SEQ ID NO: 36771 - DNA, 2631 bp, Zea Mays
aacagcgatcacgtccttgagtcagtagagcggagaggggagttagaaagatcagcaatggcgaagttttctaacagtgccatagttctcctaatgttgctcatcgcagcatggaggacgacgccggcgatgtcccatttcaggatgggcaagccaccagccgagccggagctggactacggaggccggtatgtacaccaaaaaaatcccatcaatccctatattattgtcatggtgaagaatgagaagaaaacaggcccgtatgatccagagtttaagaaggcggctggtgaggctgcactcttgatcagggccaagcaagagatgacgaagcgcatggtgaaacacatcgagaccatcgcctccagcgcgaaaatcgcgatccacctgaagctggtgctgttgatcaagtcggcggagttcatgagggccatggccggagaggtcgcggaccagatgttcgtcgtcagccagcagcacgccagcgtcgcggccgccgacatcgtggcggcgctcaggttccagcaggagatccttaagaaggccgccgaacgctgcaaggccatctccagcgacgttgccatggcacagaagatgaagcatgagatgctcaagggcgtggcgcacgacctctgcaatgtcgcaggaaacatagccatcagcatgtcatcgatggctgagatggcaatgagcgtgtctggtcgggtagtagttggtgtcgatgtcaaagtccatactgacatggagagccgagctctggctaaagttgaagctgaagctgtcgctgaagctcaagctctagacaaagccgaaggcgaagccgttgctggggctgaaggagaagctaaaaaaggcaagagcggcggtgtcagcgctggtggcgacgccggaggatatgcaggtggcaaaaccgatgctgatgcaactgcttctggtggcaaaatcgatgccggtgctggagctggtggtgcgtctggaggtgcaaaggttggctctgatgtaggaggatctgttggtgggggtgctgacgtcaatgctggagctggagctggagctggtgctgatgccggtgtctatactgttgctaagggtaataaggcaggtggaagtgatgctaaggctgatatttcggggggtgctaaagctggtggtgatgctggagcagatgctagcgctggtaccggtgctggtgtaggcatctccaagagtttcacgattggcggtggcgttgcaggaaaggctggcgggagtggcaacgctgaagctggtgtcgatgctggtgttggaggaaaggcaggagagagtgggaaggcatataccggagctgatgctgttgtctccaaagacgccaaagttggtggtggcgctggaggaagtgtgggagggagtggcaatgctggcactagcgctaccgtaggtgctggtgtctcaggagacgctaaagttggtggtggcgtcggaggaaacgtgggaggaagtggcaaggcatataccggagctgatgcaggtacaagtgtttcgagcggaggatctgctggcgccgatgcgggtaccggtgctaccgtgggtgctggtgtctccaaagacgccaaagttggtggtggcgtcggaggaagtgtgggagggagtggcaatgcctataccggaactggtgccggcgtttctagtggaggatcctccggtggcgccgatgctggcgctggcgctaccgtaggtgctggtgtctcgggaggcgctaaagttggtggtggcgttggaggaaacgcgggaggaagtggcaaggcgtatacaggaaccggtgccgatgcgggtgtttccggtggaggatccggtggcgtcgatgctggtgtctccggaggcgccaaagttgacggcaacattggaggaaaagcgggagggagtggaaatgcatatactggagctgatgcaggtacaagtgtttcaggtggaggatccggtggcgccagtgcaggtaccagtgctaccgtgggtgctggtgtctccggaggtgccaaagttggtggtggcgtaggaggaaatgcaggaggaagtggcaacgtctatactggaaccggtgccgatgcaggcgtttctggtggaggatccggtggcgccgacggtggtattggagctaacataggtgctggtgtcttcggaggcgtcaaatttggtggcggcgccggaggaagtgtaggaggaagtggcagtgctgctgcaggtgcttctggagggagtaaatcatcggggggtggctcagattttggatatggttcagcgagcaaggagttatagaggatgatgaccactcaccaccgtaagatcgatatgatccgtcccaaggaatttattcctgccctttttgttatcgcgtgttgttttattaccacgcaccagtcaatagtgtggaggcaatatacattgattccccttgactggacaatacaaagataaccttatgtatttcatttttgcttacttaacattgccatgtaaaccagaatagctgaggcttattctcatgataaacatgacatttattttacggcttcatcttgatattattgttttcttcttgtattgttttcttgaatgtccaccctcttcaatcaccccaaacgcaccacctcgaaa

SEQ ID NO: 36772 - DNA, 2863 bp, Zea Mays
  misc_feature (1)..(2): n is a, c, g, or t
nngaattccaagagttggtggaccaagaaggtgccatttttgaaaagtgtgtgaccgctggtggcactactgttgaagatcaagacaaggaaatggagcaatctgcaggtgacgaatcaagagaaaccgaggctgagaatgctgtggaatataacaagaaggtggatcaagaagataccattaacagacaaggtacagctaaggaagacagtggtgtggagccacaagaggagaacgttgtggatccagatcaaggtgtggatgacttttctgtactagatgagggtaatgtggtggcacagtgcaccagtgatcaattgagaacaaccatggaagataatgctgcagagatgcaagaggtggtggagcaagaaggtgccatttttgaaaagggtgtgacctcagatggcattactgttgaagatcaagacaaggaaatggaacaatctgcaggcgatgaatcaagagtgaccaagggtgagaatgctgtgaaagataaaaaggtgtatcaagaagatgccattgacaaacaaggtgcagctgaggatggcagcggtgtgaagtcacaagaggacaacatggtggttccaggtcaatgtacagatggccttcctgtactagatgagggtaatgtggtgccacagtacacaagtgatcaactgagaacaaccacagataacaatgctgcagttgatccagagttggtggagcaagaaggtgttgatagcatagtgggtgcagccaaggttggtattgctgtggaagaatcgcgagaggacatcatggtggaaaagcaagttgaaggtgttcttttacaagatcaagatgaggcagtggagcaatgcaccagtgatcaactgaggacaatcacagatggtaatgatgtggaagatcaagaggtgcacagagagaaggttggtctctctgaagggtacccacagaagcctggtaaactgaactgtcgtttttacatgtcaacagggaggtgctcatatgggtcatcgtgccacttcaatcatccacggctcaaagcaaaactagaagtttcaagtttcccttccgaacaaagaaatcatgaagctgaatttctggaactgaaccgtgttggcctccccattagagaaggagcaaggaagtgtatctattacatgcgtaatggtacatgcagatatggaaagaaatgttgttttaaccatccagagcaagttcttgatgttcaacgccacactgcaacaggatgggatgatactaacttgcaatcttcaccacactcaaagaagtcacctgaacataaaactatggatgacatatcgtctggatctgaggttcttcctccaaacatacttcggatgcttttacctccccagaatgtgccccctagtacaaaagaaaaggaaatcaggataaaaaaggatcctgattgggcttcagcttcagatgattctgatggctgctgctcggccgatagttcagatgggcctttgtgcaagcaggaacatgaggactatcctgagaggcctgaatgccctttccttcttagatttggtaattgtaagtttgcatcatcatgccaatattaccacccaaaagacaaatttccaagtacctaccatccagaagacaaattccaaagtcgataccatcaaaaagaaaaatcaagtcgacaccatccaaaaaaagagccagcactatcaggagaactgatggtttatcctgacagacctagtgaacctgactgccccttctatgtgaaaactgggtcctgtaaatttggggcaaactgtaagtttcatcacccgaaggatataactccaaacatgcagggtccagcaagtccaaaaaggtcggtcgctgcaaaagagcaccacgcagcagctagagcgacattacaagaccagatgtaccagcaacaaaaattccctgagcggcctggccaaccagattgccggtactacatgcaatttgggaaatgtaaatttcaatcagcttgtatattcaatcattcaaaagacatactttcaagtgggtggcatccagcagaatgcccattctacatgaaaactaggacatgccaatttggatcagcttgtgagttttatcacccaaaagatcggtgctcaggcagagggggagtgattgatggtactgactatggacatgattttgccacgaagtcacggaatgttctgcaggaactggcaatatatcctgaaaggcctgatgaacttgagtgttctcactacatgaagcatggctactgtaaatataagatgaactgcaaatttcatcatccaagagatcgtcttccaaagaaatagctgacgtttgcacatcgcacaagctgctgcaactgatcactgttctgtgttgcaatttgaatcacctgaactcctgaaggaccatttgctacaaccactgttgtaactggctgtcgttgatgagtggagcaagtactgatgatgggacagaaatgcaggaaggaagccatagtcttccttttttgaagagctcgattctactcatgtctatgtcgaatttctgccctagtgtcgttagagttctcgtaccagatgcgaactgcctggtggcttcccaactcccgttcattcatatactaccaaacattgctgtgatctagatctagcccgatgcggtgctaacctgagattgtgggttactgtagctcagtatgcagctcaggtacctgcacttgctcaagattgcgataatgatcagattaaaatagcaggccacgcatattctgcaacttgcgacttttacatcgttgttgagtctcctgggttcagcctctttattgtttttgtttgtgtgcgtgaccatgtgtgtcggactgtcggttgtc

SEQ ID NO: 36773 - DNA, 1573 bp, Zea Mays
caaaccgccgcacggatcaccccttctcactgcctgtccaggcgccgccgcttcgccgctgcccgtttcttcgaaccactccgaagctgccccgccatggacagctccgccactgacggcgcgaggctaccgccgccaagggccgggagtcgcctctgcgtcaggtgcggcgagaggaaggccgcgctgaagcggcccaaaaccctagaacagatctgtagggaatgcttctatatcatctttgaggacgaaattcatcaaactattgtccagaattctctgtttaaagctggtgagcgtgtggcaatcggagcttctggtggaaaagattcaaccgtgcttgcatatgtgttatcggagttaaaccgtcagcacaactatggtcttgatttgttccttttatctgtcgatgaaggaatcacaggatatagagatgactcactagaaactgttaaaaggaatgaaatacagtacggcctgccactgaagattgtttcctataaagatttgtatggctggacaatggatgatattgtcaaagcaattggtctaaaaaacaattgtactttctgtggagtttttcgacgtcaggcactagatcgaggtgctgctctcctgaaagctgataagattgtaactgggcataatgcagatgacattgcagaaaccgtcttgctgaacattctgcgtggtgatattgcaaggttaagtagatgtacctttataactactggtgaagatgggccaataccaagatgcaagcccttcaagtatacctatgagaaggagatcgttatgtatgcatacttcaaaaagctggattacttttccacagaatgtaatgtctggatcttttttctgttcagttcttttcattttttcccgcattgaaggagaccactttattccaatatcagaaaatgctaggatgtcacttgaatcaaaatataggtctcaaacatcactgtcagctctaccatttataggttatactgtgttctcttccactaagaccgtaaacttaagtgcacttctgctcaacttcattcctccaaacgtaacgtatatcagaaatatattaattctattgacctgtgccacgattctgttagaattgagaatgggttaatttggctatatcatgatccaggcatctattcaccaaatgcataccgtggttttgctcgtgaatttattaaagatttagaaagaatgaggcctagagctatactagacatcataaaatccggtgaaaatttcagaatctccacaacaacaaggatgccagagcaaggaacgtgtgaacgatgtggctacatttctagtcagaaattatgcaaagcatgcgtcttgctggatggattgaatcgaggcttgccgaaactaggcattggaagtaccaaagcaggtgctagagctgacagtgatgtcgtgaaccaaaagaaattatgtggccacaattttgacgccatctttagtttgcttaaatcccaaaaactgccatgcttttggcgatacataagaacgtcttcaacagatcccaataatcctaattctgaatcttaatttaagg

SEQ ID NO: 36774 - DNA, 2597 bp, Zea Mays
cggccctctcattcgtcttgctcggtttcaccgccgggccttctcatctgttcacttggtacttggtagctctcccatttgtagtggcagcactggactagtcgtgttcaagcgcaccacaaaaggagagcgagctcgagagtaacaagggcttgcgtgtgcatggttgataggggaaatggctaatggcagcaactggctaggcttctccctctccccgcatacggccatggaggtgccctccgtttctgaacccgcttctacccatcacgctccacctccaccttcttccagtaccacgatctcctcttccagtaccaacaacaccatcagttccaacttcctcttctcaccgatggcctctccctatcctggttactactgtgtgggcggcgcgtatggcgatggcaccagtgctgccggcgtctactactcccacttgcctgctatgcccaacaagtccgacgacggcaccctctgcaacatggaaggcatggtgccgtcgtccccaccgaagctagaggacttcttgggtggtggcaatggcggtgggcaagaaacggccacctactacagccaccagcagcagggccaggaagagggggcaagcagggattaccgccagtaccactaccaacaccagcagctcgtcccctacaacttccagcccctgacggaagcagagatgctccaagaaggcgcagcgccaatggaggaggcgatggcggcggccaagaacttcctcctggcgagctacggcgcttgctacagcaacgaggagacgcgccctctgagcctgtcgatgatgagccccgggactcagctgagcagctgcgtgagcgcggccccgcagcagcagcaccagatggccgctactgtagccaccgctgccactgcggccgcagccctggggcgcagtaatggcgatggtgagcagtgcgttgggcggaagaggagcaccgggaagggaggccacaagcagaccgtgcaccgcaagtccatcgacacgtttgggcagagaacctcccggtataggggcgtcaccagcaggcacaggtggactgggagatacgaagcccacctctgggacaacagctgcaggaaggatgggcagactagaaaaggcagacaagtatatctaggtggttacgacaccgaagacaaggccgcgagggcttatgatctggctgctctgaaatactggggtccagctactcacgtcaatttccccgtagaaaactaccgagatgagctcgaggagatgaaaggcatgacaaggcaagaattcgttgcgcatctgagaaggagaagcagcggattttctcgaggtgcttccatctaccgaggggtgacaaggcaccaccagcaaggaagatggcagtctcggattggaagagtcgctggaaacaaggatctatacctcggcactttcacaactcaagaagaagcagccgaggcgtacgacatagcggccatcaagttccgcggcctgaacgcggtgacgaacttcgacatagcaagatacgacgtggacaagatcatggagagcagcacgctgctggccgtggaggaagcgcgcaaggtcaaggcggtcgaggcagcgagcagtgctcctatgacgcacacgcacagcggtggcaaggagcagctcaacgctaccaccgccgaggagacaagcagcgcgggctggaggatggtactccatggttctccccaccagctggaagccgcgcgttgcccagaagcagctgatctccagagcgcaatcatgaacaacgactctcatcctcgtccatccctgcatggcatcgctggactcgacatcgagtgcgcggtgcatgatcaccacgaccacctcgacgttcctgctggcagcaggacgacggctgctgggagcatcaacttctcgaactcgtcctcgcaggtgacaagcctgggaaactccagggaggggagccccgagaggctgggcttggccatgatgtacggcaagcagccgagcagcgctgtaagcctggcggccaccatgagcccctggacgccggtggcggcgcaaacagtggcacacgtgctgaagcagcagccgaacgtcgtcgtttctcatcgacctgtctttgccgcctgggcggatgcctagctacccgagggagttggagcttagtagccgctcgatcgatcttgctcgccattgctggttttttttttggtagactggagcaagattggcagcaccaggttaggtcaactagctggaatagcaaggctcgttagttagcacgatggctggtgtaatgctatgcatgcactgcagtagaagataggccttaatcagtctacagcttatgcacaatctcagtagtgctgctgctagctggtggtagctagcgttgttttgagccccttttgggtgacagattggttagaatgtagcatggcttcctttgaagaacgttgcatgaaacaaggccgttgcgagagagagagaaggaaaaggttcacgaaatgagatggctcgtctttgtttgtacgggccattcaggtctcgtcagtgggacctgcctttggctatgcgcacagatgaagatcttttgaccgct

SEQ ID NO: 36775 - DNA, 1234 bp, Zea Mays
agaggcgatgttgaagctgccgatcccgggaataaagctgctgcggaaccggtgggagatgtagctgctgcggaacacgaaagttttaatcaaggaaatggtccaagggtgcatcactggaataagctcgagaccacaagtgtcatatctcctctaatctttactctctcagtctggtgtctatcagaagctactcctttctacttaaaaggtttcagccatggctgtgctgaatttgcaatggtaggttccagttgaatatgttcattgctacaatgaagccgttttgttgtttgctgtccgccgccgtattcggggtcttcgcctgcctctatgggctcagggcggacaggggcctacaagatctcctcgggccaaggaatcgttcccctccggcgacctccctcctccctttcgtctcaggccttccactgtatctccatcaaagcgaaggatcagaggctactccgttaggaggagaggaaaggaattgtgagccttgtgttggagaagtcgaagactgagagtatatggtggctccattggtgtccatgttaatggctggcgtgttctagagcaactcggggttgtcgtagagcttagggagacttgccaaccttagggagacttgccaaccttgtcatcgcgtaccatgccaacagaatgcttagcttttacgcaccagcgcgtgacgccatgtgggagcaaagttgggaaaatggatattggcggtggtcgagaggtcactcttattggaagtctagaaatgccaaaggatgacatatggcttgtcacagctatcctatctggtctgattgaataatgtgcgaagatataagtcatatatttcttggcctcctatcttcgcctcaggcagctgggagtggttttatactcgctgatgacatcaagtcttaggtgcttccattgatcaataactcagggaaatatggagggatcatgatgtggttcaagtactatgatgatcaagatggctacaattcttgagtgaagagtgatgtttaggttgttgcctgtggtgtgtcacaatatctgtgtgttacttgtgtgtatgtgagaaattatgtgactctggagtctggatagtgcaataagtattactcaagtatatgattgaatcttctgtcatactattcaaattatgtcatattgtatcttttaaggtatgtaaacatccacttttagcgatgctaacaaaagaatagaacaacaa

SEQ ID NO: 36776 - DNA, 1183 bp, Zea Mays
tgaactttcaatctaagcccagcttcgagctctggcagtctggcacaccgcactctgccacaggtccacgcttccaccagcccactccccgtcgccgacctcacccccctcatggacggtggccgagccgcagccgtcggcggcgacccctctcccatcgctgctccttccaatcccccggcgctgagcagccggcccgtcgatgtctcctcgttcacccataccccgtgctactgcgaagaaaatgtttacatgttatgtaacgagcttattagaaccggagtggctgatcctgcgggcactgatctttatgttgttttcatatccaacgaggaaaaaaaggttcctctctggcatcagaaagcaggccattctgatgatggatttatttgctgggattatcacgtgatatgcatccagtctaggcgaagcaaagaagttcttgattttgtttgggatctggactccgatcttcctttcccttccccattgatccaatatgtttctgaggcgattcaaccactatcattcggcaattccagatatgcaagactcttccgtgtggttcatgctcctgtgtttcttcaatcgtttgcctcagacagaagccatatgaaggatcctgaggggaactggattcagttacccccaaaatatgaaccgatcgtggctgaagatggaaccaccaataacctcaatgagtacatcatgatgtctgtgggggacgtggcagacagagaaaggatggctaatgatgtttactgcaacaagcatggtgtggtgctaaatgaaacgatcttccctgaattcttcgcccagctgcctgctccacatacttagcaagcgatctttctgttgtgatgggttactctgtacacttcaatagtgcactcacaagattatgaattaaaatatatgggcactattggacacatggtgcctctaagtagcgtttcagatagatcctggcctgttttggaaagcaaaatgtggggatctcatagttctgttagcctagacatctgaaagcttcatcttgtcccaaataatgatgactaggtcatgtttaacggctttagctttctttggtcattgttcgtcgaaacttatatgaacataacacttctatgtgctcgttgttaccttacaagtaaatatgcaacccataaactttaaacttgca

SEQ ID NO: 36777 - DNA, 456 bp, Zea Mays
gatgagttcgggatcccggaccacggcagatccgaatgcccggccgctgcccggcagcatttttttcatggtacccattgaattgaactactagctacagtgctgcaagacagatggcgggcaaaccgtcaatgccgccggagattgtttggtccctgtttccgacgcgtcgtcgtccttgctagctggccttggagccgagcgcagcgccggccccgcgaccacggaccacccgcagcgcgaagacgaatcgccggactgcacgcacgcacgtacggccggccgggcggacgcggacccttgtgcgcgcggatcttgatgtcggcgagcgcgacgtggggggcgggaggaatgtggctgaaaggggaagccgaaccgccggctccggcgccgcgcgtccgacgtgtgcggtggagggaggcgcagcgcagggcagggcactgtgcgcctgtacgg

SEQ ID NO: 36778 - DNA, 877 bp, Zea Mays
cgagcacccacccacctttgcttgcacggcccgcccattcaccggttgaggggagaagggagaggagaggtagctcagtcctcctctgaccgccgacccatccgccatggccgcctcctacgaccgcgagttctggaacttcagcgaccagctgcgcctgcacaacaacttctccaacctctccatcgccgaccccatctggtcctccaccacactggatcctccctcctccttcagcgacgccccgggcctcataggatccgccaagctcgcctttggcaacgccaccacggccaacgccgaccgctacaacgccaacgccgccggtgtcgccagcaagagcatgagcgtgggcatgatcgaccactacctcaacaagaacactaacaacgacgtcgtcaagagctacttcaacaagtccgtcggcagcaggccggccaacaacaacaccaccacaaccgtcaagaagaactccgccgcccaccacgacaagaagcacaagaactccggcaacggcgccggcgtcgacaagaggttcaagagcctgccggcggcggaggcgctgcccaggggcgaggccatcggcggctacatcttcgtctgcaacaacgacaccatggaggagaacctcaagaggcggctcttcgggctgccgtccaggtacagggattctgtgagggccatcaggcccggcctgcccctcttcctctacaactactccacccaccagctccacggcatctttgaggtgaggctgcaagcttcggaggatccaacatcgatccagcagcttgggaggacaagaagtgccccggcgagtcccgcttccctgctcagttgcatgcacagaaaagtagtgaaggtagttgggcgagct

SEQ ID NO: 36779 - DNA, 4661 bp, Zea Mays
taaaccccaatcaacttggcagccctctctaaccctgtctgcggctgcgagcacacaccacactaggcactagcacacctcccctctcaggctctcagcgccccgccgccgccacgcaattgccagtcctcgcgatatgggcgcgcaagaggaggcagtggacgagatgctgcgcgccgccgccgccgaggtttcaacctcctcggtgaagcgccgcctccgcatcttccaccacaccctacctcctctcatcgcgaaggccatagagtcaccgtcagatactgtattgttagtcgatctcattttccagacattgccaatatatgacgatcgagcatcacgaaaagcagtagacgatttggttattcaggctcttggtgaacccaccttcatgaagccctttgctgcggtacttgtacaatctatggaaaagaatctaaaggttacaaacccccttacaagcttaaagcttctcagatggtcacactatcttctgaaatggagtcagtttgccacacttacaaaaggcgcctttaccagactggccaatgcacaagcagtcttatgtcaagtccttatggatgggtccttccgtcggcgccggacttgcaaacagttattcattcatctcttctccgagcacagtggaatatataagatgtacatagaggagctcagagatttaaggatttccatgagagattctcctgcatttttgaatctaatactggattttaccattacctctccatcattatccactcagtaccagtcagtattccttgatttgtatgtcaaaatcatcttgagttcaaaagatcggccaccgaaagcagccactgaagcttttaagcctcttttcttgaacattgggcatgaggattttaagaatactattataccatcatgcataaagatgctgaaaagaaatcctgaaatcgtactacagtctattggatatcttcttaagacagtccatttagacctaagcaagtattccatggagtttatgccagttgttctgcatcaagctcggcattcagatgaagagaggaggattaatgctttgagtattataggaacactaagtgagaagtcaagtgatccagatgctctaccttccatggtcaatgctatcaaagctgttttaggaggctcagaaggaaaactatcacttctataccagagaattggaatgataaatgctttagagcagctatcaagatctcctccaaagcaaataggcagacttgccccctcagtatcaactttccttctaacgtgttacaaggatgatggtatcgaggaagtgaaattggcgattctatcagcaatagggtcctgggctttggtatcagctgaagctgtccaaccagatgttgtttcatttattgctgcaggcttgaaagagaaagacactttaaggaaggggcatctgaaatttttacgagttatatgcaaaaactctgagtctttaacaaaggttgcttctttattggatcatttgattcagttgtcaaaaactggcttcagcaaggcaacacagcggttggatggaatctatgcactctttgcagtatcaaggcttgctgctgttgatacaaaagcagatggtgccattctgaaggagaaactgtggacattgattgctcaaaatgaaccctcattgatctctttacagttgcttcccaaactagcagatgatgattgcttagccgtcctggatcttgttcaatcactgtttgtagaacagttcttcagggttcgagaatatttttcaatccattcattgctgcagctgctaatatatctactttgccatccaagctgggaagttagaaaggtagcttacgatgttaccaagaaaattttctcaagctccagtggtctagccgaagatattctatttttattcacagactggttgtcactggttggagagagactgtcaatattgaaacaaggtgatatggatagcccttcggattctcagctaccattctttccatctaccgaggtccttgtcaagtgtttgtttttgattgcaccttatgctgttgtgcatagtctgagatcatattctcgaattattttgtgctcccaccacccttgccttaccagctcctcaagcccagctggcgtatataagaggttgcaaagaaggcttagacaagaacagatcttttttgttgacttaattactcccaacatctctgttatctgcaaggaattactttcacaggatggtctatttagttccaacaatcaagtacagagtgcagcattatgttcgctatcaacacttatgacaattactcccaacgacacatttctagagtttgagaagcacttcataggactccaggagcgcaccttgcacgattccttctctgagagtgatattaagatattctatactccagaggggcagttgtcaaccgagcaaggagtttacattgctgaggctgttgctaacaaaaatacaaaacttgcaaaggggcgtttccgtgcatatgatgatcagatgcaggagacagctcggtctattgtccctgcaaagaatgagaagaaagaatcctcaggcattggcaagcgagaaactgggaaatctacaaaaaggactgctcctatagacaaggctaagactgctaaagaggaggccagagagttgctcttgaaggaggaagcatctgtgcgtatgaaggttgggcaagtgcagaaggatctctccttaatgttggatgctcttggcaagttggctattgctaatcctatatttactcatggtcaactgccgtcactggtaaactatgttgaacctttgctaagttctccaatagtaagcgatgctgcattttgtacaatgttgaggctagcacgttgcacagcccctcctctttgcaattgggcgctcgacattgctgctgcgattcgtgtgatatctgttggtgattttgaaatggttttggatcttacacctgtgatcatggaagatgatagtaagaagccatcatctggcatctttgaacaaatagtaaatgggctgactattgcgtgcaaagcgggtcctcttccagcagattcatttactttcgtctttccgatcatggaaaggatccttctatcttcaaaaaagacatgtcttcatgatgatgtgcttcacatactatctatgcatatggatccaatactaccacttcctcgacctaggatgttatcagttctttatcatgtgctaagcactgttcctgcctatcaaccttcagttgggcctatgctgaatgagctatgcctaggtctaagaggccatgagttagcacaggctcttgtcggtgtatatgcaaaagaactgcatgttaggcttgcctgcttaactgctataaaatgtgttcctgtgcactctgtgcaacgagatttgcaggtgtcaacaagcctctggattgctgctcatgatccggagaaggtggttgctgaattagcagaggaattatgggaccgctttggttttgatgccatcactgattactctggtattttcaatgcactttcccataaaaattacaatgttcgtgctgcatctgctgaggctctggctgcggcattggatgaaaatcaagacaaaatgcaagatgcactttctacccttttctctctgtacattcgtgatattggcactagtgttgaatttggagatgcacactggctcggaaggcagggtattgcattagcactccactctatcgctgacgttttggcctctaaagatcttcctgttgtcatgacatttctcatctcacgcgccctggctgatccaaacgtcgatgttcgtggtagaatgattaatgctggcatccttattattgacaggcatggaaaggaaaatgttcctttgctatttcctatttttgagagctacttgaataaaagggcatcagatgagaaaacatatgatcttgtgagggaaggtgttgttatttttactggtgctctggcgaaacatctatcaaaggatgatcccaaagttcacagtgtcattgaaaagttgttagatgtccttaacaccccatcagaggcagttcaacgtgctgtctcagattgtttgtccccacttatggtatccaaacaggaagagggtcaggctcttgtttctagactcttggatcggatgatgaaatgtgaaaagtatggtgagcgacgaggtgcagcctttggccttgctggtgtggttaaaggatttggaatttcttccttgaaaaaatatggcatcgctgtgacattgcagaaaaatttggaagacagaatgtctgcaaaatctcgtgaaggagctttacttggatttgagtgcctgtgtgagaagcttggcaaactatttgagccgtatgtcattcaaatgcttccgttcctacttgtgtgtttctctgatcaagtcctagcagtgcgcgaagctgctgagtgtgctgctcgggcaatgatgtctcagctcactggtcctggtgtgaagcttgttcttccgtcacttcttaaggtatcaatatatcttatttgatgctatcaaatcataacatttattgtgtccaaatgttctggagaatacaagtgtccagttcatctagttatatattgaaatctgacaaccacttaacttctgctgaatatttagg

SEQ ID NO: 36780 - DNA, 867 bp, Zea Mays
gtacggaagtcacctcgtgttgaaaaggtggacgacacactgcccacgcgccgtgtgaccttttaaaagaactgcgcgccaaaggcgcttcgctacggagcagagccgaagccgaggcgaggcgtgcatggaactgcacggattctgaggcgagatggtggcgtttcgtccctcgcggttcccgccagccctgtgcgaaattgctgccgcggttcccgcttcttccatagccatccacacaagtacagaacagcgcagcttgactgccaaaaacgatgtgctccctaatcaacaagcgaaccgggcgtgccgccatggcggcgcccaaagacaaggagcacggttggtggaagccgttaccgcgtactactagcagaagcgaagcagactgcgcacgtcgcgacgggcagtagccaaggttcagcacttcagctggagctgctgcgtcggcaactgccgccgactcggcatcgcccggcggccgtgcgccggcctcgcgctcgcgggtggagtcggcggcgcctccaaaaggtgcggcgctgaccgcctggcctggcacaaccaggcgcggcctggcctgtccccgtcgcgtcacgctcgacgattctgacccgcctgtcgcggccagcactcgcggcgggccgtgaccggcgctcgggtcatcgttcggcgcggaacacccgtccttttcgggcagcccgccgcaccggcggtgaagacatggagcaggtgcctctgcctgccacacgcggaggaggcgataatcgctctctttgtcatttcaaatcattttttcttcttctgtatgaaaagtatcagcgtatgaccgagttgtgttatgtcgattctagtattttacgataatac

SEQ ID NO: 36781 - DNA, 2207 bp, Zea Mays
ctcaacagaggacgtcgagaatttctgatccggtttctgcgctcgtgttgtgttcaacggatggagagatttgtgggcgctcgcagctgactaggctcgaatcaaaaagataatgcaagcagatgaggatgttggaaagattgcactagcagttcctgttttagtttcgaggtctcttgaattgtttttacaagatttaattgaccgtacttatgaaattactcttcaaagtggagcaaagacactgaattccttccacctgtgagttcaatatcagctgacattttgttttttttttcataaaataaaaaggtgatgtgatgtatcttttaaaataaatggatctctttgatgaatttcagctgtgactttatttagcatttgtagtgagggtaatctagatgcttacaatttgcaattgctatgattcgacgtttgaactttggtgtacaatatcccccctgcccaaaataggattttatccaggattcatcttatttgtgttgcttatgccatcaaaataagttggtggataagctgtactgaaacagaattcattaattataggtcatgcttcatataattactacacattcaattgccttttggttgtagattctttggtataaggtttactggttaaaagttgttatctaagttaacatccataatatctgtaggtgggattcatacctggttggtccctgactatgtccagctaatttgtactatataagtaaataaggtacttgagctagagccatctaatgtttttgcatcacctctggaggaagtgatgaacagatcgcttttttggcacaagtctcaacttgaaaataatcttttggggcatgtttggttcgataccttccaggcagctcactggccaggcagcccgaaatcagaagcctgggaacgctgcctgagcgaggcagcttctgtcatgagccaaccaaacagccccttaattcgaaaatggaagcaggttggttttagtaaccaatttggaagttgatatttttctttccactgtaagcgacttcagtgtagtttatggaagttgagctcatggacatttctagagaagatatttgtagaggttatgttatatatccttgaaactgaaactggtcagatagttgtcccatcctgctcatgtagatctagcatacgagcttgtctaatttatttggaattaagtttcatatttaaatgtgagttgtattgaggttaatttcgatggaccatgtttttttcttgttaaggcacttagctgatagtttcaatgcatgcgtcttggtattgtttgcatggcatatcagttttgagccattcatattaacattcatatgtctatcttctgacatctgacgttcaggaagcaatgtgtgaagaggtacagttcttttgatttcctaactgaagttgtcagcaaggtaccagatcttggtggcgctgattcctgtggagatgaaagaggattacctagaagaagaaagtcaaatggcagtgacccagagaatgatgaatcaagatctagtaaaatggccataagaaatgcaaacatcagccccagaggacgtgggaggggtcgaggcagaggacgaggtcggccaccaaccaagagaaaggaggttggttatgtacaatttgaagatgagagcagcatgtttgctgaacaaggtgagcccttgccaggagaggaaacagttcaagagatcaatggcaacgagaccatgcctcaaagcacgcaacctccagtagaggctccgccaacagcccttgcacaagctacaacaagttctaaggcggaagaagcgaacagtgatcatcagtcagattggcctatgccagatgccattggaagcatcggtgtcgtgccatctggttttggacatctgacagtgcaggttgaagatgaggactacgacaatgaggattagtcagggtcatcttctcattgtatgcactaacaggactgttctggtgttgtaaaatgtaaatatagtttgaaatagttgccgcagtttacctgtgattgtctgtcgttttatgcggttatgtagtcctgtgtaactttcgttctccaataattgcttggtagttgcttttttacatgattcaagtgttttgtgacatttaacacagtatttgagcagggattgcctattttaagtatttttgtcttatttcaccgcagtctttga

SEQ ID NO: 36782 - DNA, 280 bp, Zea Mays
ctaaaaccgtggagtagaaggttctacccacagagagcttcgtcccggcggcgagacttccgctccaatgagtaatttcccccacgccgacgagtaatcccacccgaaggcactacgatcacgcgcggggagcgttggcgaagccctatgactaccctctgaggttgtatcgtggtcggaagtcgcaaacgtcgacggcggcgaagttccgcccctcacctcgctctctctcgctttggtttaatggtgacggtgtctgtgatacgggggccagaaggag

SEQ ID NO: 36783 - DNA, 3500 bp, Zea Mays
cacgcttcccctccgtcctccgtcccctccgtcccctcttgccgcaacagatcgccaaccccgacctcacgtcctcaccccacgccaatggcggccgctctggcgagccgcgtggagagttgggtgcgggaccaggcggcgcggctgcagccctgggcggcggcgctgccgcaggcgccgcggtggccctggcccccgccgcggcccgcctggccgtggcccggggaccgcagacgccagcgggaacgcatgttccgggaggagtacgaacgtcgtagcagacagctccgcgagctctgccgcgctgtccgcgtcgacaccgtagccgagctccaggagttgctctgcgccatggtactcgccgagtgcgtctacaagagacctgtttctgagatgatgagatatatcaacaagtttaagtctgattttggtggaaatgttgtgtccctggagcgtgttcaaccatccttggatcatgtaccacatcggtaaccaaaaagctaaagcccacttagaggtatctgttagcagaggctggtgacaccctatttgctacatttattggcacaaagcagtacaaagatattattgctgatgtgaacatattccaagggaccttatttcatgaagatactgctcatgatttagctcctgatgttgaccctgaacaaaatgatacccaaaagggtgaggaaagccatgggaaatcttaccgagaaacatcaaagaagctaagaaaaccaaaacctgcagtgcaccgaggtttcttggctcgtgctaatggaattccagcactggacctatacaatcttgcacagaaaagaaacaggaaacttgttctttgtggacactcacttggtggggcggtaggtacccgtagataatatacattatctcattatttgctcatacatcttcaatacaactgcaggttgctgcattggctactcttgcaattttgagagttattgctaccacttcatctgaagaggataacaggcttcatgtgaagtgcatcaccttctctcagccacctgttgggaatgctgctttaagagattatgttcacaaaagaggatggcaggactacttcaaatcctattgtattccagaagacttggtaccacgcattctatctccagcttattttcaccactacaatgcccagacacctgaagcatcttttacaaataaaactgatgtgaaatctgaagaagttatggaggcaagtggggaaaggcccagaggaaacaacagggaacacctcgttctcggtgttggtccagtgcaaaagtcattttggaggctttcaaaacttgttcccttggaaggggtgcggaaaagcttaagtgcaattcaaaaacaaacaaatgtttttgggaaggcaccatcacaattggatagctatttgcaatcaaaggttgatgaatcagaagaaccacctcaatctcttgagattcaagaaagttcacaaggaattgctcttacccctttatcggataaagatggagggaacactgaagataataataggactgagaaaataaatgcatctgaagcaggggggtctaaacgctggagcagggtaccttctttgccttcatatgtgccatttggtgagctttacctattgggagattcatcagtcaatacactttcagattcagaatactccaagatgacgtcggcatgtgcaggtgcagtctgttatatcggagttaagagagcgtttgcagtcgcactcaatgaagtcctatagggctagatttcaaaaaatatatgattcatgcatgtgtgcaaatgctcccatttttactggcattgagcaattgccacaattttcacatctacaagaattaattggtctaacagctactgattctgttgaacttggagatatcgtggaccctcctgttatccgaactgctacttctatccttcctcttggatggactggactccctggtggtaaaaatgctgagccactgaaagttgatataattgggcatgacctacaaatgtgcactcttttccaggcacaaataaatggaaactggtattccacagtaatagagactctaccatcagctacttcatactcaccaaatggagaactgcaacccacattacagaaaatgcggattcttgttggacaaccactaaagcagcctccaaattacattagtggggatttcatgattcctgtgatggcaggtgctgattcaacacccgactttggatttgaatcattttttgaagataaagattgctgcaagggtttgagtggatttctaatatatgggacaagtgattttgtaactgtacgtaaagaggtccacgttaggactcggagagtgcgattgcttggattagagggggctggcaaaacatccctgcttaaagcaatgttaggacaagttaaagaaagaaatagcactgttcttgaatgcatacatgtcgatttgcatggcaagggaatatcaaatggattgtgctacatagattcgacaacggtaaacttgcaggagctacctttggaggttgggcggttcaaagaagaactgttgttaggactccatgatatcagcaggaagactgaccttgttattgcggtgcataacctagcacaccgaattccacagtatcaacggtccaatacttctcagcctcagcctgctctttcacttctcttggatgaagctaaggcgctaagcattccttggattcttgcaataaccaacaaattctctgttagtgcgcatgagcagaacagattgatcagctcagctatggaagcatatcaagtttctcctgagatgacaaaagttgttaactcttccccatttctgatgccaagtgctagaaacagtttgcagcagatcagatcagctactgggaagttgaagaaggatccagcaaatagatctggttatcttcctgtaaactttggattgtcatcatttcagaggaaggacattgttatgcatgtggagggtgttagttcccttcgtcaacttgtacatcaagtagtcctcaacaatgaagaaacagcatttgaggaacttgctcgtgagagattgttgaaggagctagcgtcagagaaagcagcgtccctgcaagtgaagcagaagccccggaaaagagatggctctgttacagctgctgctgtaggtgcatctctgggcgcgggcctgggaattgtaatggctgtgataatgggggcagcatcagcccttcgaaagccgtgattcatgtattcttttgatccattatttacttcttgatttaaggatgtctgaacaaaagcactagtgtaggcatgaaaaatgaaattttagggcagaatagttagctgataccgtagtgccacattttggctgtgtatagaatgtaggttgagccttttttttgctgatctgaattttgttgtgttactggagtatggcttggatatgttctacatcatgttttaatttagttataaatctgtatcatgtcta

SEQ ID NO: 36784 - DNA, 1755 bp, Zea Mays
gtttgaaccccgccctccaccgccaccatcagctcgcatcgtcgtcttcgcagataaaaaataaatgaaaccgaacggaaccctatcgcgagttcatcctggcgctgtctgttctacgccgtcgcggtcacctccagccctagcgccatctgctctgtacccccaccgctaacctcctcagctctggcctgcccgcgctcctcctcgttgcctggatccggcagcccctccatgctcatccgcccctttcccgctctctcctcgaccggctcgctcccgcttgcaaccacccacaccctgttctgctccagagacagtcctggcggcgctgaaggaggagacgcagcagcggatggatgacgcatcgattggaggtcattggtggccactcacgcctcctcagacctcaccctcacttcgtcgtcagcgcaggtttggccaacggcccccgaccggatcgcaggtcctcctcacggtgaggcacagcccacagagtcgagccggacatcacaaccatgaccatgaggcatcgtcgcagcagtcggagtcatttttgctgccccctcccgacacctgtaaattttgtatgccttcacgccgtgaagccacatttgcggccattggcaatggctgtatccactgtttcgatccatatatttggtgatgtcccttcttcacctcttgttgggctgcttcaggacaaaatcaataactggagggagacatctcttatattgacatccatccttttcgctgcagttgtgttctggttcattggtgtgtctgaggctgcacaagatgctcttgatcatcttttcaaccaaggccacaatctcgtaacagaaaatgagatttctgatacctttactaggctggttgaaaggctaccacaagtggtacttggaagcgaggagacaaccacactttcacatgctaggatgttgttggctctgaccttttatgctggtccctagtttctgataaatcatcttcactgttctcctgtattgctgctcgtttctttgattgtttgggtttatgcataggtcatagctcacagttttctggttccatggacaagctaattgtatcaaagccactatctatcggcctccaaaatatctgttatccatgataatgctttgccaaattcattacttggtacagttgaatatgagttgccccatgtgcctccatggtttattcatgctggtatccagaagctttatggggttcttgctggaataattagacttgttggcctatcaacagtgtcaggaaccgggccatgttgatgttcaaaagagttgtcagaagttcatgacatctggtatttattatatcttcttttgtagtgggctggtgtggtctgcttagcagcaggtagcactacaaccagcaatgtatggatgaattgaaggtagtaaagaacgcatgcaatcttatagaaactctacatcttgaaactggcatgattgacaaagaagctggatgcatcctttggattggtgtcttcttatcatcaagcagtaatgtgaagcaagttcatttgttgactaagaacagatgagcacaaatcagtgaagagttcattgcactagagatggaggatggataggtggtagatttcaatatggctttgatactattgtttctctttacaatctttgtacataacaagaaaaatgacgttgtatgtggatactattgtaattcaagaatttatttctgaataataaatatatttgtttataa

SEQ ID NO: 36785 - DNA, 344 bp, Zea Mays
caatcgagccccatccctcagccctcgccgccgccagctccaatccgctcagccgccgccaggtccaagcctcccgccgccaactactcgtcggtcggccgccctgtctctaggccatctcgacaccatctcctcggcactaggaagcctcggccccgccatcagttcctcactggcaggccgctctaccgcgtcgcgtcgccgccagggcacgctcctcgtcgtcaactcctcctcaccgcctcacttccccacgtcggtcgatgcgaccctagatttgggggcagccgttgtcgatttcacaccatgcactcaacatcctccttcgcccaagactgcttgca

SEQ ID NO: 36786 - DNA, 320 bp, Zea Mays
taccaggtgacggaatcgttgtcaatatccatccattatttggcagcatgtttgaacttctttgcatggctaccaccccggctgagcatgcagtaagtaagcatgacgattctgaacactgattggtctgttcgtagtatcattctgaacactgattggtctgttcgtagtatcagtatatcccctatgttgaacttactacgtacggaattaggcaggcatggtgtggtctggttgcaattgtcagggctcttgagacagctcgtcatgatgtcctgaatggtccgttggtcctgcatctagcttgttggagaaggatt

SEQ ID NO: 36787 - DNA, 1015 bp, Zea Mays
cttccccactccactcatgatcacaaaactaattacaaacccagggaaacaattccactcgccgcggaaaccttccttctgggcctcgtccggtcgtccgtcccttcgcgcccctgaaattgtccgaccgcgtggcgactcgggtcggacggatgccggtcgacgtcgaggcggcgatggccccgccccaggcggcatcggcctgcagctcgtcgtcgataggcagggacagcgacgagtgctcgccgccggggaaggaggaggaaggggagggggaggtgcagagcgcgtacgagggaggaggagggggcagcctcgctgggttggaggcattggaggaggcgctgcctattcggctctgcaaaagacattactaagtcagagaatgcatactccagaaaacggaagaatctctttgcctacatcatcatgtatggaaattcacatgaaccacgggcagctcaagtttatgaaactgccgcccctaagaggcatgctagtttgagtagaaactctttggtgactttggctagcagcagttccaggagcagcagcagtatcagcattgaagagcatgaactgcccgagcatcttgattctccgcgttcacctgatggttttatatccgcaccacgatctggctcttgcgtgcctgatgcatctgtgcctaggtcattgtcaatgatggacttgcatcgtctgaataggtcaagttcctcagttcgtctcaaagatgggaaataggaaatacgactggacttggatccagaggattttctatttctttttgtcatcttttgctcgaggtttctagcaccatcttctctaatagaactaaggatggcatggaggtttctggataaataagtgatcacttagtttggcgaggggtatatatgtgtttgtaaaatagttcttcactccattgtaattagcatataatgtactaatatgaatgcctctactcatgtgaccatcttcagctgtaaattaacaaatacctttttatgccgtt

SEQ ID NO: 36788 - DNA, 2461 bp, Zea Mays
tttttgggccagttccagctctggtctataataaatttttccaggcagtgtttagatccaggaattagggcaaaatacttcagtccacgactaatggaggctgtgatctggttcttggccagatgggttgcaacctatttagtgccacttgacgtgagtagaggaaaagtaagcagagaaattgataatgtgggtacaaatggatcccaacattccagaaaactgctaaacagttttgcttgggaaaataaccaaggagagcttgttcttgattttgttgttctcatttcaatgttagctcttactacctatcagggagaaaatgagttgcaggtaagcttcatttttactttttaatcatgatggaattgtgcagagtgcccagacatgtttgccccagttcaatttgcagtgcctaatgcaaaaatgctcgaacactgacatgccagaagctacttgctacagtcgttcgccggaaacacacatgcacttatcttgttcaactggattcatggcgtgatcttacaagagcttttgcaagtggacggtctttgctttcattgagtggacgtttacaaaggtctctagcagaaacacttgcctctgcagcttcctgcatcaaagatcctgaagcatctgcacagtacctgagggatctcatgggaccagtggcagggtgcctggtagaaaatgctagcaggagtgatctaaaatctgtggcacagcaagcagatgttatttacatggtctgttgcctattggaacgactaagaggcgctgctagagctactcaaccccgaactcaaaaagttctatttgagatggctcatactgtgatgaacccacttttgactcttctggaggtctacaaaaatcattccacagtcgtatacatgatactcaagtttgtggtggactttgttgatggtcaagctgtattcctggatgctaaagagacatcagctttggtgagcttttgcttgcaactactccagatatactcctctcataacattgggaaggtaatgctctctctttcttcaagtctgcgtaatgagtcacaagcagaaaaatataaggatctgcgagctttgcttcgtcttctgacaaatatatgttcgaaggatttggttggctttctgtctgattgtggcggtgaaggttcacctgatatcgcagaggttatctacattggtcttgatattgtgacccccttgatatctttggatcttctgaaataccctaaacttagtcgtgattattttgtgcttatatcgcacttgttggaactgtacccggaaaaggttgctcacttaaatagtgatgcttttacaaggattattggaagtcttgacttcgggctccgtaatcaggatagcgatgttgttgagaggtgcctggcagcagtaaatgctcttgcttcatacaatttcaaagaaagattaggagggagaggaagactgaactcgcagctcatggaatctgaaggatctaatggcaaactgcaggaaagcatatcaagtcacttcttgagacttctgttgcaaatacttctttttgaagatttcagatcggagttagcaggttatgctgccgatgctttgcttcctttattgttctgtgaacaggagctatatcagaggttggtccatgagttgttggataaacagcagaatccgaccgtaaaatcaaggctggcaactgcgttccataaccttacaagttcaaacaatctctcaagctcactcgaccggccaaacaggcagagattcaggaaaaacctccttagcttcatggcggatgtatcgggcttcatgcagatcaagtagatgcgatggcagggaacaggtgatgtttgaccggtcaattaaaccccgaggaagcactgcaccactgtggtaggggtgcatgtgggcaccacatgtctgtggattgatgagagcgaagactgccacgacaagtctagtagatcttgaagagctagtgtcaccagaaaagacagggagatgagctagtcttagggttggcattcatagcgcatttgctggacaagatggaggcgtccctggccacgagatcgtcgtgtaaatgcgtttgttagacgcacagaaacggtggggattttgtggtggcgactcgttttgttcaattcccacaggcagaaggtagagatgttaagttgatgtaaataccgtttgatttaaacatgccttattcgtaggagaaagcgacacggcttgctgtaacttagggtttattactctttctcgtggcataggatccccaaagaagtctttgctggggtatttgcagccaaacgatgaccagtatgattgcgagaggttttcaatcttttgtaccaaatttggcctgcagttatgatgacactgagtgccgatacaggcatgaggcattccaaaattggcgggcaccacatgtgtctgtctgctgtctcagtggg

SEQ ID NO: 36789 - DNA, 822 bp, Zea Mays
gactggtcgattgatcgattctcttgccaatcattgctcctagtgcttcaagatgcataccatttaggtatagagctaacaatgatgaaacctctggtgacaaaactaagaaagtcgtggaagttctcatgataaattcccagagcggacctggtcttttgtttccaaagggaggatgggaaaatgatgaaactgttgaagaggcagcagctcgagaagctatagaagaagccggagttcgaggtgatatagtgcattttctggggtcgtatgacttcaaaagcaagacacatcaagatgcgtgctgccctgagggtatgtgcagggctgcagtgtttgcgctgcatgtaaaggaagaggccttgctcacaggcttctctgactggcacgacaagtggagcataggtgacggcggtggcggcggtgccaactgtgtgacccggcctaactgctgatgaacccatctgcagtcgtccaatttgtccatcctcccccatttcccctaggctccgacattgcgtaacgcaataaatacagtgtacttctctcgatgctgggttggtcattgacccttggatggttatcttagttattagtgggacgaggtatatagtatttatatctgatgaagacgagaattctcacaacttttaagtgtcgattctcgtgcctgtttatttctcggtttcaggtcagctgcagcctgcaggcaggcacgcaccctgcgcactttgtaactctgctcctgattctggagatgcacatcctgtgtatgaactgaactggtataacttgaaaataactgttaagtcaaccatgcat

SEQ ID NO: 36790 - DNA, 209 bp, Zea Mays
ccagatggccgggtgtgggtcgcgcgcttcatcgccatccattttcggggctagttgattcggcaggtgagttgttacacactccttagcggatttcgacttccatgaccaccgtcctgctgtcttatcgaccaacaccctttgtgggttcctaggttatgcgcagtttggcaccgtaacccggcttccgtttcatcccgcatcgccag

SEQ ID NO: 36791 - DNA, 2033 bp, Zea Mays
gagaagccacgcctctcgacagacagggatcgggccgggccgaacaactgcagtctgagaagccacgcctctcgacagacagtcggcgtcggcgtcggcgtcggcgtcgagtgttgcgtgccggcttccaccgcagaggatcctcgcgcggcacccctctcatcatcgtcttcgtcatcagcgacgatccagtattgaattgggacggagcacgaaaagttcggtttcgaagtcgacactttacgccctataaaatatgatcagattcgtgacatactgaacggtcttgctgagagatttgattgggacaagataatggaagaaaacaatgttatcggtctcaagcagggaaagcaaagcatctcactagaacctggaggccaatttgaacttagtggcgctcctctcgaaacattacatcaaacttgtgctgaggtcaattcgcatctttatcaggttaaagcagttggagaggaaatgggaataggatttcttgggcttggctttcagccaaaatgggcactgagtgacataccaataatgccaaagggaagatacgaaataatgaggaattacatgcctaaagttggtactcttggccttgatatgatgttccggacatgtactgtgcaggttaatcttgacttcagttcagaacaggatatgataaggaaatttcgcgctggcctcgctttgcagcctattgcaactgcaatatttgccaattctccgttcaaagaaggaaaaccaaatggatttctcagcttaaggagccatatctggacagatactgataataatcgtgcagggatgctcccttttgtctttgacgactcatttgggattttatgcaaggaaagcttccacaggctcctggggagttgcccactcttaacgattgggagaaccatctaacaacaatttttcctgaggttaggctaaagaggtaccttgagatgagaggtgctgatggtggcccatggaggagattgtgtgcgttgcctgcattttgggttgggctgctgtacgacgaggaatcgttacaaagcattttagacatgacttttgattggacaaaggaggaaagagagatgctaagacggaaggtaccatcgactggtttgaagacgccgtttcgtgatggatatgtaagagatttagctgaggaagttctaaaactggccaagaatggactggaaagaagagggtacaaggaggttggtttccttagagaggtcgacgaagtagtgagaacaggagtgacgcctgcggagaggctgctgaacctgtacgagaccaagtggcaacgcaacgtcgaccatgttttcgagcatttgttatactgattactgaggatgacgccgccgaacgacgttggactgagcttgtagatgtaccccgtaccctaatacagagtctcgtcttgattcattcaatgcctgagccggaagggctcagtttcaggcacacaggagcagagctttcggttggttgttgacggggggcaaccgctgcacagcccggtgctgtgcctacaaataacttcgcctggaactggaacggatcactcatcactgtgctttgctttgacttgatctgcctgtctctccagggagatggaacaaactactgtttgtaccggcccgttttgttttgcagctatgaaaatcgccgtattgaaaataagtccgtcttctgcacgatggaactgtttgtttttcctttttttttggattgttgggacttgggatgtttgttcggggttaacatggcaaaagtgatctcatcgacgataaataaatgaactgatggtttgatccggaatctgcgatatctgcatgttcctttgtagccggtctttatggtctgctacctctgctacgataccttagggtacatgattttccgtacgcatcgtctcttagctgcatttgttgcatttgtgatttaggaaactcagagttgtatcatgctgttttttattgtttcttgtacttagaaaactgttctactgtcttagggttgtatatgcc

SEQ ID NO: 36792 - DNA, 1427 bp, Zea Mays
ccgcgctcgcctcctcatggatcgcacgcccaccccgcgtacatctctgggcggcgatgcccgccccatccttgctccattctcgcggtcgtcggtcgaccctacctcgccatcccccatcccattcgcttgcaccagcggcccgagctccaggtcgagtgccgagctgtagaagggcaagatctacttcctcatgccggtcatggcaagttgcccaccccgacgcctgcgcccaataagccgcccgtcgatcgccggtcaatccgcttcggtgcgaggaggcgacaacgtcctcttgctccgatccacctctcccccaacccgctaggacgccgctgccgagagcgagcagaggcttccctcctccgacgggggaggaagatgctcaccaagttcgaaaccaagtgcaaccgggtcaaggacctcgccttccactcgcgtcgtccatggatcctgtctagcctctacagcagcgtcacccagatgtgggtctaccgcatgggcaccatcctcaaccgcttcgcagtggcgtccagttccacgccacataatcgctctttgtatccggagtagtatcgctccccttcctgactggacgtactcctagcccactagcattggccttgagcacgcacgaaggctcattcatcagtaactatccggtgatttgccgtataaactgtcacatgatgtttctacctcacaagtggttgtactcaagcaattgagataatttgctctgtgttagctcgtcatggtgcaaacatcctacttccaagacttggatttatgttctatgaagcgcgtgctgttttcaatggcatggaggccatgtacttcaaacagatgttgtttgtttattgttattatcttgtcggcagcgacgtcaaggaagatgatgatggtcgtagggatcgacgatagcgagcaaaacttctacacactgaagtgggcacactgcagcacttcttcccgccaagcaagctgcaacagtactgccttgtcgtcgtcaccgtcaagccctctgccgcctccagtgtccgccctgccagcccagaactcaaagagtaaatgaagatggaagaccaagatgatatttatggagactattctgatacattgtcaagcactgagttcgacaatatgaacatctcaacatactgatccatggaagaacatgtatcattgtttaatgatgaggaaagacagggatttctcttaagtacaatgcttgctagcgtgtgcgacatgccagatcacccaaaagattgacaaatgatgtgtatatggttgattcatttaattttgttatgcattttggtcactataagaatgcattctttatgtgtgctaatatgacatcctaggacctgacgcttcaattttcaaattggttattgatgtatctttttacatgaagaggtaat

SEQ ID NO: 36793 - DNA, 2820 bp, Zea Mays
tctcggccacaacactgcgcgctccgcagacgcccaccaagcttccgctattcgccaaaaggtccccttctgccctccgccctatctatccatggaaaggcggcacggcttcttcgcggcgctgcgggaggaggtggcgcgcgggctgtcgccggcgcgggcgcgccgcaagccggacgccacggacctggccgccgcgctcagcttcaccggagtggcaggcgccggcgagatgctggcgccgctcatggaggggcccgatccggagcccagcgacgacggggacggcagcggccgccgaggtgccgcgcgcgggaggaaggaaggctggggccactgggtgcgcgtgcagttcgcgcgggccccgtcctcggcggtcgcgctgcgcagcgacatcaggatgctcctcggcgttatggctgcgccgctcgcgccggtccgcgtctgcgccgccgagccactcccgcacctcagcgtcaaggacactcccatcgtaagcgcttctctcgtctcgtcacgctgctgctgctgtgtttttcttcctttccccccctgcccacttgtttgctccacgttcctttgcaatcaactgttcgacgaaatgccggtgccaaggttttcatgggtgtatgtatccgagtttccttgaattcgtgggccctgtagactgtaaaaagttcgttactagtgttacagtgcggtaaaagagttcgttactagtgactacaatgtctgcatgtctggtcaccaggatctttgactgctctttaggactggtatatatgactgattgtttttttcaccgctgttgcctggtagtatgtgttaattcactgtttgctgttatatgccagatttttaataaatttatgattttttttttgggtgtgatgtgcttgtccacaggaaacctcgtccgcgcagtacatcctgcagcagtacctcgcggcttccggagggcacaagctcctggcctccctgcgcagcacctacgccatgggcaaggtacgcatggtggccaccgagttcgagaccgccggccgtctcactaagaaccgcagcgctggacgcggcggcgagcctggccgcttcgtgctgtggcagatggcccctgagatgtggtacatcgagctggctgtccgcgggagcaaggtgcacgcgggatgcaacggcaagctcgtgtggcggcacacaccatggctcggtgcccattctgccaagggccctgttcgtccgcttcgccgtgcccttcagggcctggatccgctgacggcggcaagcatgtttgctcgtgcgcggtgcatcggcgagaggaaggtgaacggggaggattgcttcatcctgaagctgagcacggatcctgagatcctcaaggcacgcagcgagggccatgcagagattatcaggcacgtcacgttcgggtacttcagccagaggactggtcttcttgtccacattgaggattcacatctgacccgaattcagtcggccgcgggaggggacgcggtctactgggagaccaccatcagctcgtccatggaggactaccgcccagtggacggtatagtggtggcgcattctgggcgctcggccgtgaccctgttccggtttggtgaggttgccatgagccacaccaagacccggatggaggaggtgtggagcattgaagaggtagcattcaacgttcctgggctgtccatggactgtttcatcccgcccaccgacatcaagtctggatctgttggcgaggccatggagcttgctcatggcgagagaagccgggccggtcctcctccccctcccccaggctgccgcgctaaagttgccgcgctggggaaggcagaagaaggtaaagtggcatggggcggtggaaccgtactcgagaatcaaaactgatccgcagactgtccataaacttggttctcacagccgcgcggctgctgaccctgtttggagtctagtgtaggagagaaacaaacgagtgaaggctgagagaggatttggaagtttggtaaatccaaatgcctcctctgtataggaagaagcatgggggcattcacatggtcttgcatatgattgaagcggatctgtgtgaaacatcctctctctctctctctctctgatcccatccagagagacatggtatggtagtaggtaggtagccttgtttcctgcttcaggcttttctttcttctttgtctgttcctagtgaaaggaaacttagggcatgtttctgcactccagccgcatgagaaagtcgttgtggttggttctcttttagcttatactcctaatttggtcgctgccaccagcgaggaagaagggtttcctcaccagcaaggcaggtgttttggccgtcatggctgggcatccgattggcggcgttcagtgtgtttggcttgctgacggattgagccgaagctaacctctcagtgaagagagagagagagagagagagagagagagagagagagagagagagagagagagagagtagaacatctgaatggtttttacttgtgttttagtactgggtagaacctgttagatgtttgttagtaattagcagtgtttttatttagcaagttgttttttttgttcctgaacctcctttgcatctctctatattttaatcatgagatgaaggatgtactgttattaaacagatggtggatgtaatctaatccaagacatcttttttgagcgtcatggattgaactgtgcttgtgctcgtgcttggtaaggtagaaccgaagaaatgcaatgattcgggctttttccagagcgtcgatgttctgcagacagagacagcagcatggc

SEQ ID NO: 36794 - DNA, 1819 bp, Zea Mays
gctggattggctgcaacgctcccttcaccagccgcaggagcatcgccgctgctgctccactgcaacgccgccccttccgtctccttccgccaccgcaggcgttggcagcggccggctgctacacggcacgatggccgcgtcgcgcagctgttgctgccggtcgcgcgccgctggctgccggcagcagcgcctcccggagtcaatggcgcgcgcggaggcattgcggcgtcggggtcaggggcaggggcagtggctggggaggcgccgtacagaggcaacgaggggcaggggtcgctgtggatggtcttcctcgccacggcggtggtcgtgtgcggctccttcgagttcggcacctgtgtcgggtattctgcgccggctcaagctggaattgtgagcgacattgggttgtccaactccgagtatggtgtctttggatctgttttgacaattggagcaatgattggtgctgtgactagcggcagcctggcagacattcttggacgcaaaatgaccatgcgatttgcagcagttgtaggcatttttggctggcttactgtatattttgccaaggatgctatgatgctctatgctggaagagttttgctggggtattgtactggagttctttcctatgtggtgcctgtgtatatatctgaaatagcaccaaagggtatccgaggaggccttgcaacctcaaaccagttattcatctgttcagggtgttcggctgcttacattattggagcacttgtttcatggcgctgtttggttgtagtaggattgataccttgtgctgtcctacttgttgggcttttcttcattccagagtctccaaggtggctggccaacatagggaaagaaagagaatttcatgcttcattacaggagtttaggggggaagattctgacatttctgaagaggctactgagatcaaagattatataaaatcagttcgtcgattgcctaaggccaagattcaagatttatttcagagaaaaaatatgtatgcagtcacggtgggtgttggcctgatgatttttcagcaactgggaggaattaatgccttaggtttctatacaagctatattttttcctctgcagattccaatcacattctttggggcccttctgatggataggagtggaagaagagcccttcttttggtctcttcatctggaacatttcttggctgctttctgactggactatcattctattttaaggcacaaggactgtgcacacagctggttcctactttggctctttgtggcatactggtatactatgcggcgtactcagttggaatgggcccagttccttgggttatcatgtcagagatattctcaatcgacatgaaagcaatcgccggagggtttgtaaccctggccagttggattggttcctttgcgatttcatactcattcaacttcctcatggattggaaccccgcaggcacattctttctgttctctgcagcgagcctggtcactgtgctgttcgtggcaaagctcgtgcctgaaactaaaggaagaacactagaagagatccaaacattgctcaaagccacatgagtggcttccattcgctcagtaggtaaagatccagttaaaaaaatgctgtaaatattcgcctcttgtaaattattgtgcatggcaggtgaatgatttcgcctcttgtcgattctcctatattttagtctctttgatatatgttatttaggacaaagatacggtctacaacatatgcttatcttcaactatttcattttctgagttttctctctgctactatacatcatcagtttcgacggttgtctt

SEQ ID NO: 36795 - DNA, 2358 bp, Zea Mays
ccctctatcagatttttatctgccgcgccttctgattttttttccaccgtcggaggcatacgtcccctgccctcttcccatatcggtgctcatctcctgggttgaagccgccgcacagccttcatctccccgcccagcccctctctctggcgagcttgacccggcgtcgagctctggcggtcctcctccgctgccactcgttggaccttgcccctgctgcgccgtcgatagctcaccacaccctctcctccctggctcccgagcttcaaccatggagcttgtcccctctctgctcgtcggtgacctacgtcttctccagccaagccgcagccaagctcatctccatagccgacgcccctgccctcctgctcgccatggctggccatcggacgacgcacagcaacctcgccgtttctgagcccgaccccgccatggagctcacggcgcctactgctgctcagccttgggtgccgtcgctgagctcgccctgctccctggtgcttcctgctcgccgtctctggcgagctggctgtcctgcccgtcatggtggcgcgcgctccatctcccatggcgcccggccgcccctctttgctcatcttcgccgtcgggctgggatattccttggtgctacaactgggaggtgctcgccgagccctgtatcactggttaagcgtgcctgcccacaccgtcgtctttgatctctcgctccggtctccttgttcttcatcgcttgccaggtgttcggtaaaatgggtgaaccggtgaacgtcgttaattttatgttttcgagtcaaattactatctggtgcttatgggtgtttttgtgtgtgagattggagaaaggagatcctcggattttgtggatgatgaagtaagatccatgtgacgttcgccaagtattcggtggattgctcgaactaggattcgttgtcgttttcgtgaattcgtgttgttttgatcatggatatacaaggaagagttagcggatcaaggaactccttatgttcaaaaaacccatgataagcaattttctttctggtttaagaagcatattgcaaaactacgttacgtggatggagaagacattagtgatgacctatttgcattgtcatgtgaaccggaccttcgggttcgaatattttcagcatgtcttgtcgatggggttcgatatcacactattgaccgtgaaagaaatagaagaacacaaaatagtggagtcatgtgtgagggttgccatggtgacgaaaatatcgaattttatggtcaattgaaagaaataattgagttgcgttataactcagatatgtccaaatgtcgcacagtggttctatttcgttgtgactggtttgacacttatagcaagaaggttagaatgaaagatgatggatattttagaagcatcaaccatggtagttgttggtacaaggatgatccttttattctatcaacacaagcaacaaaagtattttacttggatgacactaaacactgtgaaagctggagaattgttcaaaagtttacacataggcacttatggaatgtcactgaaaatgaaaatgaggaaacacccatgggcttgggactatcataccaagatgaaatatgtgcaggttttcatgtacaagtgaatgaaggaaatttgaatgatgaagtaccggatagtgaagattgtcaccacgtcaatacaagtttagttgatgagtttcgtaaaccaaggcaagacaatgtgcaaggagacgggacaagcgatgatgaagatgaaactatatggcaatatgttagtgatgatgaaagtccaacaattcttgtcgaggatgatgatgatgatagcgatgccgagtaaagactagaaagttgatggtggaagcgttgctgacctatatggatcttggtcatgaaaatggtgacccacatggatattgggtcactatgataggatggtggcaattagtgtgtgctaggatattaaattttattctagattttgggatgtcctaggtcttttagctcggacaaagtctatgcttgtgtcaaatatttttatctttctctatatgtctacagacgaagaaattataatatgtcagaactataatatgaatgagcaccaattcattgattttattcagaaatcatagtatccctttttcctgggcatatgtttcacttaatattgttttagtgtaggctgagtgaggaattgaggatgcatgcagtatgaatatgtgtaggcaatctgaaattctgaatatgtgcacgcaatctaaaattctgaatatgtggagataatctaaatatgtgtaggcaatctgaattgattttagtcttctggtgatattcacttgtgccattgaatat

SEQ ID NO: 36796 - DNA, 673 bp, Zea Mays
gcggccccggcgtgcaaccccggcgggcgagcagccgcccctaagcgcgggcgcggccttcgacggctcggtgcatgccggctgcccgacctccaaggacggcacggccgctcggcccggcgcaagcgcgcggccccttcgacgacggtgcaggctgcaccgacgcacgggcacacggcgtgggtgcggcctcccgcggcacggcgcgggggcgcgcgggcacagccatcccgggcgagcgcgcgggtgtggcccagacgcgggcgtacggcccccggccaagtgtcggcacggtctcggcgtgcggccagccggcgcggccccgacggcgccggtgcgattggcatggccccgtccggccgtgggcgtccccggcgtgggcacgggcccagcagcctcggtggcaccggcgtgtccctgtcagccccagcggtgcgggcgcgaggcttctctggcgggcagcgctaccatcgtctgtccgttagattgcagcacacatgtgtgcaagaacagcgccatcaccgatgagaaccgatagatacaagatgattttgttgccaccaaatataacaaaacgagtaagcataaatcggtaccatttttaatctttgttgtgtccaacgcaagtgagtgtcagagcaatgcattcatgcatgatttaggccatgctctt

SEQ ID NO: 36797 - DNA, 5934 bp, Zea Mays
ctgtagcagcagtagataaatactgctgcggctggctgctgtacccctcctagtcggctagtcctctactctccattcatccccaccacctccacttgtcgaaattgaaactcaaatcaaatcgaaccacctccacctcggcaacgagcgaattccggtgcgaattggagccctcctccccccgcatctagggtttcgcccatggaccccgccgccggcgggggccggggccgggaccgggcgggcttcgagcgggcgtgccggctgcccaacaccgtccactccgaggtcctgccgtcgctgccgctccccaccctcccgcgcgagctcggcttcgacgcgctccgcgacgacgagcccctcgccgcgcccgaccgccccgacacgatcatgcaggccgccaacatcgcccgcgtcctcgccgacaccgacgtctcccacctgggcttcaccgctgcggacaacgtcgacgtggaccccatccgctgctcctggctctggagggaggtgctcaagcacaaccccgacgctttcaaggtcaaggcgccaagtccgtcttcgcaaggtccatttggaggcccaggatatcaaaatcaagaacatgagaagcactttgagcattttacacctaatacgagcaaagcacgaaatgaatctgcatttcctcaggatgaaattgactcacatagagagcatttttataatgaactgacctcagattcaattgcttcaaagaagccaaaaataaggaagagagaaaataacaattctgtttcaagttctgctcccagcattcctaatactcaagatgttatcactaccttctgtgaggtggtggaggatttctgtggaaaaaccgaaattcctgatgatggagatggcggtgactggttgtcaatcccacttggtgatgttaaggttctcgtgaatgaaattacatctgttcgatccaaaaggatattgcatgaggttcctatggatacagttacaaggttattggatgtgattgaccgtcagattcgatattctcaaggtttgtcgatagatgtgaaagaaaattctgatgtcgttgatgctgaacctctggttttctctgctttggaggccagtcatgctgcgttggcaattatgacccaccatgatatgccaaagcaactgtaccgagaagaacttattgagcggattattgatttctcaaggcatcagatcacagattgtatggcagcaagtaacccaaccttccgagctctctacaaaccagctgaaaatgttgcaaatgatggagatgatgatgaagatgatttggaaaatggacaagttagcaagaggagacgtactgctactaatttgagcatgagaaaatcttcaaacaaactttctgcttctgtttattctgctgtgcagaaactatgcttgatattgggctttcttaaggaactgctcacaacagtgcgcttgtcagatggttgtattctgcagttagcgaaaacatgctttactacattcttggtggataatatgcagctattacaattaaaagcaatcggggttatttgcacggtgttttcgtcatacacacagcacaggagttacttggttgatgaaatacttcaccttcttcgcaagttgcagttttccaaaaatgccgtcagaacctaccatctagcagatgaagaccaaaagcaaatccagatgataacagcactgttagttcacctggttcagtttagtgcaattgttcccaatagcttaaaaggaacagttgattggaccactattgttgatgcctccggagatgctgattattatccaattaaatgccatgaagcggcaacagaggcttgttgccgtttttggactgatgtccttcaacgttttactgctgctaaatctcaagatatgtcggaaaccaaaggaataatagataatcttgttcaggatttcctaatgatactaaacttgccggagtatccagctgctgcttctatccttgaggttctctgtgtgttgctccttcagaatgctggattgaaatctaaggacactaatgttcggtgctttgctattgatcttcttggtggtattgcatcaagattgaagcatgattcggtcatctgtagtgaagagaagctttggatattgcaagatctcactgatgcaggtagcgatggctcaaaaatcttgaaaaacaagtgctgtgtttgtcttggtggaagaggtataaatatagcctgtaatgaatgtggaagatgtttccattcagattgtatgggggctgctagccaggataacttagagcgtgatagtgtttgccccttgtgtttttgcaaacaacagctcaatgtgctacagacgtactgtcagtcacaaattaaagaaaatggcaaaaaaactgctgcgtctactagtaagaaatctgctaaaccagctgaggtgccagcagtggatattattcaacaaatactactgagttatctccaagaatctggtccacaagatgatgggaacctgtttactcgatggttctatctgtgcatctggaacaaagaaaaccaacattctcaggaggagatcatctactatctcgctagattaaaatcaaaagagattctgcgagattctggcaatggtctggcaatttccagagattcagcaaagaaaatttgcttggcacttggtcagaagaactcattttgcaggggttttgataaaattcttgctcttcttttggctagcttgagagaaaattctcctgtaataagagcaaaagccttgcgtgcggtcagcagtatagttgaagctgaccctgaggtcttgggtgacaaacgtgtccaatctgctgtcgaagggaggttttgtgattcggctatttctgttcgtgaagctgcccttgaacttgttgggaggcatattgcttcacatcctgatgtgggcctgaagaaaaagttgctgagcgaataaaggacactggagtcagcgttcgcaagcgtgcaatcaaaattataagggatctatgtgcttctaatccaaacacagacacaacacatgcctttgtggagataatttctcgtgttaatgatgaggaatccagtgtacaggatcttgtatgtaaaacattttatgaactatggtttgaagaaccaactgggagccataagcacttggttgctgatggaagttcagttccaatggagatagctaaaaagactgagcaaattgttgacatgttgaggaagatgaccaatcaccaacctctgattaccatcataaaacgtaacttgactcttgatttcctccctcagtcaaccaaggctgcagggattaactcatacatggtggcatcaattcagaagcgttgcgaattaatatgcaaacgcttattagaaagaatattgcaggttgaggagggagctgctaaggagatggaaatccacatgcttccttatattgttgctttgcaagcattttgtattgttgatcccacgctctgcattccagtaactgatccttctaagtttgttgtgacactacaaccataccttaatattcaggttgacagtaaatcagctgcccagttgcttgaaagtattatttttgtgattgatgctgttcttccactcataaggaagccaacacaaaatgttgttgaagaacttgagaaagatctgaaacatatgatagttcgccattcgtatttgacagttgtacatgcctgtatcaagtgcctttgtgctctgagcgagtcagcaggtagaggtccaggattagtggaaaaccttgtcaatattttctacaagcatctgtctggagctaattcagatagtcagttattgggtcgatcactgttttgtcttggactcctccttcggtatggttatcaattgatgcaaacatctgaaaatcagcttgattttcccaagattatcaacttgctccagagaaaatatcttctcagggatgattttagcttgaaggttcgagctttgcagactttgggatacatacttattgcgaagcctgaatttatgctacaaaaggatatgttgaaactcatagagacagcactatcttctgaggttgattatagattaaagattcaaggacttcaaaacctctatgagtatctcagagatgctgaaagccaacttactgccgagagcactgtgaaacctcctgtccggtgtgaaataaatggcagaagtaaagtgcctgttgctgctggtgctggagacaccaacatatgtggtggtattattcaattgtattggagttctattcttgaaaggtgcttggatacaaatgatcaagttcgccagagtgcacttaagattgttgaagttgtactccgccagggtttagttcaccctattacctgtgttcctcaccttatagcacttgaaatggacccactggaggggaactcaaagttggctcatcatctgctgatgaatatgaatgaaaagtaccctttattttttgaaagccgtttgggtgatggactacaaatgtcatttaaattctttgaatccatagtcagcaaccataagatggcagcaaacataaaatcaaatccaattgcatttgtcaaacctggcatatctagaatataccgtcttatccgttcaaatcgaaattccagaaacaaatttgtccactcgatagttcggaaattcgagtctgatagccggagtcgcagcacagttagctttcttgtatactgtgccgaagttcttgcctccctgcctttcacatgctccgatgaaccactttacttgatctatgatataaatcgaattattcaccttaaagctggaggagttgagagcaatttgaaaaggtggacttctatgtctcagtctcaaaatacagtggatatgccaacgttgccaggagagaggcatgttgtcatgcaagagcctggcggatattatgataacgtgggctatgcccatgaaagggtgaatgccaatccttgcagtacttcagacgtggacatggccaaagtgcaggttgacgtggatatggccaaagtgcagggagattgccttgatgcaatagcccttcagctactgctgaaattgaagagacatttgaaagttgtctatagtttagatgatgcccgctgtcagtcattttctctaaaggagcctccgaaatctggagaaacattctccaggcagaatattccttttaatgttagcagcactaacatcagtctgccgagctgcctgcaggacgtagcttctgtttaccaggatttcaagacagtgctccacgaagattccatggactttgctgtgttcatcccttcagtccagattaggaagcgcccaaccccgagaaatacgacaaacccaaccccaagaagtacgacgagggtcaggagaacggctgcctcgagtgttacaaaagcccgtggtggcgcacgtggcgatgactccgacgactccgatgatgacgactggaccgggggcccaagagtgcttgacttcagtgggggtggccgtgtgacaaggcagagggtccaagtatgatgactggtcttggtgcttttgtacattctagggaaacctatagcgggtagcagctgacacgaggagagttagggttgagttttaggtttaaagtcgtttagggtacatagaagcagaaaaggaaaggaagatagcctttttacttagatgccattgatttggagcactccttttcttgctctgcccctgtcctgtttgtaattccggtcgggctttggcaaaactgacaaacagggttgtgctccggcttctgatctgattcaatgggaatgaaattattccttttgctttgcctgtataataacagttaagcctatgtttcgtgtaattgtctgccttgctaatgttatatatctgtacgtgtgctgagccttttttgttgaagttcatagaaattgcc

SEQ ID NO: 36798 - DNA, 1252 bp, Zea Mays
gaaagtcagaaaataatcagaagaaaccatcatcttcgaggaccgacgatcccagccctgcaacattcaaagatgctaaattatatatgtcaaaaaatctgattgacttcgattcagatctggaacctcctcaaggtgttgctcagactgatattcagaagggctcttcacctcaaacagatgttggttgggcaacttttgatgatgctacatccaaaaaaactacaaccatgccttcaacttccagtactaattttttggagggtccaatgctacagatcgccgatttgacatcagcaccacaaattagattttcaaatgccaagtccttgtcttttgccccgtcaaatcgtggaaaccaactgaaccaacagaatttctctcctgtgaatactacacagtacagcaatactctgttgaacagagctactagtgctccagtgcatagccaggatatttttgcaatgagctatcgtccagtatcttcagcctggaactggcaaccaaatcccagtgtaaacatgcagtacggacaacatcgcacgcattatcctgttgggattgtaaatacaactcaacttgcccatccatatccagtgaatcctgttagcttggcaggagggcctgcatcggctcatgcctccaccaggtttccttctttaacttctatgcaagaagcattaccaaatctgggcagtaccgcagtgctgtcgcgtgctccagttcatcagtacatggttcagcaacatacagttcaagtaccgaattatactttcccctccggatatgaaggaaccagagggatcgccgcaactgccagcacatacggattacctccaatggatcagcgtttggctgcgcagaatctgcaggtcatgaaccacggttctttaccccgagttggtgggaacccgtttgcttagtgttgttacttcggtcacctcagttcggtcgtttgtgtatagttttagcatttgatgatacggttttgtcgtgagaagatgcgagtggaataatgtagctgatcaagcagagtggcaacaagtgcctgacaggttttgtgtatatgatttttattttcgctatggaaggtgtcgattgctccatctccgtcgtccctcccagtcccagctgcaactgcaacctctgctgttcctgttgtgccgcccgtggaatagcagctcaaaagcccccagagccagaggggaggtttgtgtgcagggtgcagcgacggagacggggcagtggttgg

SEQ ID NO: 36799 - DNA, 631 bp, Zea Mays
aaaacctagcgctggcgccgcagacccctccccttcgcttccttccctagcgccgacgcccaccagacgagatggtgcgctcacttgccccccaccggccattggacccaactgcctgtcgcgctaactttttcgtgtatatccttgcaggccccgaagaaggacaaggccccgccgccgtcgtcgaagccggccaagtccggtggtggcaagcaaaagaagaagaagtggagcaagggaaagctaaaggagaaggtaaacaacgcggtgctgttcgaccaggctacctacgacaagctgctctcggaggtgcccaagtacaagcaaatcaccccttccatcctctccgagcgtctgaggatcaacggctcccttgctcggagggccatcaaggacttgatggcgcgtggcctcattcggatggtctcggtccactcaagccagcagatctacaccagggcaaccaatacataaggatggggaagaggtctaaaatgcattgtctgccctctctgcaggaggagctcgtctttagaacagttgccatctttgtcaagagttgccaatgttatgttactggtgatgagttccagatggttcgtcgtcggaatccgtccgtgatcaatttcag

SEQ ID NO: 36800 - DNA, 1814 bp, Zea Mays
ccatggaagcgaacgcgagtagaagcgaaggggccaaggcccaagggggccaagagcgcaaggtccggatcagctgaagggcagtctcgttttttcatgcttgtccactctccagtctccacggtgccagtacacagcacttcgcctccatacagcacttgagcactggcatcctgctctgccagagagaactcagacgcgcccggtgtcctctgcagctctgccacccccaagaaagcgaggacgacggctcgccctcgcgcggcgccttcatcatgctcccgccgttcggcaacccgctctgggtaccggaggacatggacgaccagcagcagcacgcgcctccgccgacgcccatggagttgctgacggtgccggcgcaggggcacgaggagcagaacctcctagccctggcctcggccgccgccgttgccggggccggatgtgttttcagctcaccggcgatgctcgatgacgactggtacttcgaccccgtggctgcggccgccgccaccggcgcgcaggggcacctgctcctggcgccgccggggccggtgcccggccccggcgccggctcgcagatgttctccctcttcaacgttggcggcgccgcgacgttcgacgtccatgggttcgacattggcctcggcacgctcggcggcgggtccggtggcgacctggtcccgttggcgggtgcagggaacacatcgaattccgcgtccttttccatgtccctgaacgccggcctcctcgcctcctcgttcggcggctttggcacagcgccggcgcaaatgccggacttcggcggcctgggcgggttcgacatgttcaacaacggcgccggctcctcctccgcggcgccccctcctgcctcggcgtcccttacggtgccgttctccgggcgcgggaagcccgccgtgctccgcccgctggagaccttcccgcccgtgggcgcgcagccgacgctgttccagaagcgcgcgctgcgccgcaacggcggcggggaggactacgacaagaagcgcaaggcggaggccaccgccgcggctgcgggagcttcgtcggcctgtggcggtgacgacgctgaggacgatgacggcgggagcatcgacgcgtccgggctcaactacgactcggaggacgcctgcaggggcgtcgaggatagtggaaagaaggacggcaagggttccaacgccaacagcgcgggcgacgggaaaggtaagaggaagaggttgccggccaagaacctcatggcggagcgccgtcgccggaagaagcttaatgaccggctctacatgctccgatccgtcgtgcccaagatcagcaagatggacagggcctccattctcggcgacgcgatcgagtacctgaaggagctgctgcggaagatcgaggagctccagaacgaggtggagtcatcagcatccccagcttccacggcctcgctgcctccgacgcccacgagcttccgccctctgactcccacgctgcccgccctaccatctcgcgtgaaggaagagctgtgcccgagcgcgttgcctagccctacttccaagcaaccaagggttgaggtgaggacgacgagggaagggcgggaggtgaacatccacatgctctgcgctcgcaggcctgggcttctgctcgctaccatgagggcaatcgaagggctcgggctcgacgtccagcaagctgttgccagttgcttcaacgggttttccttggacatcttcaaggctgagaccaggtcggcattgcatgacggaggcgcagcatcgcggattccttctaaatgatcaagggggcaaacaattcca

SEQ ID NO: 36801 - DNA, 4030 bp, Zea Mays
ggcgagcatcgacacctgacggatttagtggccaggcagcgccggccaaggcatatggtgggcgatggagtcctgccaaattgcagccctcgcagacgaccacggcttgggcagcacaaacaagcgacatgttcctagctgggttgttgccgattttctagtaaatcaggcaatggagaaggagcacctgctggacatgttggtgatgccgagcaatctctgaaagctgaacctgttggtgacccacaagttggagtatattcgccatcaatcagtcgtctctttcagcagcttgttcatgttcgaactatcatctcatccttcaatgggaagctgccatctgatgcttggttcaatcatgtaaaaaatttgacctcagatgcagaagaatctctcgaatatctgcactacaagatgatgctggccaagcttggggttgggatagagttcaagaaagtaatgcccaatgtgtcagggacttgttccaaaacaacagctttaagcttcatgcacttactagcttcacaggaacttgtttttttaccagttaccgacaaattggagggccttcgacctggaagccctggtttgactggtgtagttcttggaaactacagtgagatattgtcacttagttcttcggtcatgcggtgcatccttttgtgtcgtggcattttaggcattattaacatagttaacatgaggcttaagaaggatagtctggaacttcctgcatttgcttttgatgatctgacatatgctggtcagaacaagggaactggaatgaatgcgcatcgtgtgccggcacacatgactgaccctatatatttgttgcctatgtttatcaggagtcttttgtgtttggatctctcaaactgcagtggccttacacagctgcctgcttccattggcaacctttctaatctggttgcattgaacctctctcactgttattcccttcacacactgccggcgtcagtaggaagactgaagaacttgcaaattcttgttctttcctgctgccatgaactaaggattttaccagtgtcactttgtgagctttccaagctaaggttgctggatttagcaggctgttccggccttcaaaacttacctgcttctttagtaaatctttgcaatctagagattctgaacctatcatattgcaaagaactgaaggagcttccacaaccatttggtaacctccaggaactgaagtacttgaatttatcaggcagccatcgggttgacttggatgttgagtgcctatatacacttgcaaatttgaagtccctaactttgtcgccgcttacaaatattcaaggctttcctggttccttcaaagatcttgcgaatcgcttggatagtttaagattgtggaagaaccagatccatccccagtgtggcccaaaggctgtttctttgcattcatataggtgttatgagcaaagtatcattgacatgttactttctgatgaggctgacaatagtagcaaccagatagtcacttctgcttgcatagttggtgaaagtggcatgggaaagactgagctagtccatcgaatttacaataaccgaatgattttggatacctttgatttgagaatatggctgcatatgtgtgataaaaagaggctattaggtaagatagtagagctcactacttttgcatcctgtggtgatgcctcaatcagtgttcttgaagaaattgtaatagaagaacttgctagcaagaggttgttacttgtactagacgattctgaaatcaaggaccagtatttctggggttatctatggaagctacttaatgtttgtgcaaaaggaagcgctgtcattgtaactaccaagagcatggtagatgctaaccagactggagcaatgcaaaccttttacttgagtcctctatccaaagaagaatgctttatgattttcaaggaacatgtgcttgaagatttagttgtgaataattactgtcagttagaaagcattggctggaagtttgcggagaaatgtggtggcaatccaatgtgcattaaagccctaagtgggttgttatgtcattctgaagttggattgtctgaaattgatatgattgttgatggtatcttaccagcattaagattatgctacgatcttttgccagcacaccttcagcagtgcttcaaattttgttccctattccccaaagattatatttttgtcaagcaccatatcatccgattatggatagctgaaggcttagtcttctgtgaagaaggtactaagccagaagatactgctctgcattattttgaccaactattctgcagatcatttttccagcgttctccatttcatagtgatcataaagatagctttgttatgcatgagctatttcatgatctggcacactctgtttccaagaatgagtgcttcagatgtgaggaaccattctgcagcttagctgaaaatgtttcccacctatcccttgttctttcagattttaagacaactgcactttctaatgaagtaaggaatttgcagtcttttctggttgtcagaagatgtttcccagtggtgagaatttttactttggatgatattttcgtgaaacatagattcttaagggcactaaatttgagctatacagacatactagagttgccaatttctattggaaacatgaagcacctgcggctcttggctctcaacaacaccaagatcaaaagccttcctattgagataggacaagtaaacagtcttcagacattggaactgaaggattgttgccacctcattgacttaccaggaagcataagtaatttggcaaagctgcgacaccttgatgtgcaaaaagaatcgggcaacattattgttggcatgcctcatggtataggatatctgacagatctccaaactctcacaatgttcaacattgggaatgatatgttgcattgttcgatttcagagttgaacaatctgaatggactaaggggacatgttcatgtaactaggcttgagaatattatgacagccaatgatgccagagaagcaaatatgatgggtaaacacttgctagaggctttgacactggagtggtcttaccaggatgaaggcatggacgatgacatgggcaaagaaattgctagtgagattcttcaaaatcttcaacctaacagcaacattatggagcttatcattcgaaattatgctggagatctgtttcctgtctggatgcaggacaattacctttgcaagctcacctcagttacacttgataactgccatggctgtagtgagctcccttaccttggtgatctaccatctcttaaatctctcttcatacagagaataaatgttgttgaaagatttggaatcgagaccagttctttggccactgaagtaaaatatcccactagatttccatcactggaggtgctgaatatatgcgagatgtatgatttgcagttctgggttagcacgagagaggaggattttccacgactctttcgactttctatcagtagatgcccgaaactaaccaaattgcctcgccttatttccctagtgcatgtgtcatttcattacggtgttgaactgccgaccttctcagaacttccatcactggagtcactaaagatcgaaggcttccagaagattagatctattagtttcccacatcaattgacaaccttgaataagttggaaattattgactgcaaagagctgttatcaataaatgcctattccttgtctgtttcaaattttaaagttgtcaggtgcctaaagcttgatttggttggaagttcaatggaagaccatatcagccacaaagtggttaatggaaggaatatcctgacaaggaagcatatggtgctaaaaactttgacccatacaaatctcttggatgatggcagcaagtgggaaaagtttggagaaaagaatatatttggctacatattcccaaggtgagaacataatgtgggaatgtagagagactactaaaattttagactgtttacatcagtttcatcttttgagttgccttttg

SEQ ID NO: 36802 - DNA, 3313 bp, Zea Mays
ccgagaccccgacccaccccgcctcccccgccgccgcgctcgcgctcccccgcgacagccgccatacgccctatctccgccgtgcctgcgcctcctcccccgcccgcccgagacccgccaagtttcccttccttgcacggcgagatccaccatcggcgcccccttccctggcgagccacagccgtccatgttcctggccaccggcgacctcccttctctagcccttggcggcgagccaacacctcctcccatggctgccccccagaccccagtcccgtccgcgcatccgctcttccgtcagcgacgcacctattctcccctctctccccgacgtcgcccatggcgtggacggcgacctccctcaccctgcaactctgcacgtgtaagggccgtgttgcccgcctcctttccccacaccggcgcagccccctgtcgccgcggccccttccccaaacagcacggcaccacatgctccccctgccgcgcccgcactctccttccccaaataacacggccccacatcgctggttgcctcgcctcgccggggacccagcacgatggtcagggagctggtgggtgggggagacagggaggagcggaggaggaggtcaagctcaacatggacattgtgttcgtgacgctgccttccccaccgacaccaacgactcactccagaacccggatctggggcccttcctcctcaagccatggtattgggcgagggtggcgccgcctcgcgtgcttgagttcgccgagcgcgccgccagggtgctcgagcgaagaggtgagggcaccgagctcgagctcgccatgaatctccacatcgctgctggcatccactgcggactcagccaccaagccctgacattgtagccagtttcttgcaatcagaacgaatgccagttgatacaagtttgtggcagagatttctctgacacgccaatcagtcttcgatgcgaatgcttgttgctcatatggacttgtggttgtgataatgagttcatctccgtgcacatttgtcgtccttgtggttacagcagttaactgagtagtctctcttgactgcaaaacaagcaatctgttgcctctgctgtgatggtggagcaatttcagcgccaagaatgatatctcgcattttagattgtgtcagtgcagaagtattaacattgtttttctttgcataatcagaaaggatgaggtcccttagtgcacactcaaccttcaaccactgttcatcattcagagatggccatatatgatgtgtttcagtaataattgttttgtcaggtttgagcaacatctttgccttctcattattcacatgaagtgcacgtagaataagcacaatgtgggagaatgttgtgtatgatgatatacttttcaaccaatcatcatatatattataaagaaccatctgtggttcagttgccttcagtataagatcaccaaacttctcaatcttcaagcaagcctggaaaggaagctgcagctcactgcccttaataacaatgttagggaagtcaggtagatggacctccaagggatccaacatgcccttccttgtcacaacaatttgctttggctgctcttctacaggaagagatcgaaccaatgcagcaacctcctcagcggttttccacttggccagctgcccaagacgcttttgccccgcccatacacttgtgtggataacctgcacattattatccatactcagtttaaacctacctatgttcagggttttacagaaaaacaaaatcacatgaaaactagagcagaaattcgaaaagaacaaaccttaagaaaaagttgacccgttcttggattgaaaaatgaaaatagcaccattaattggtttggtggtcaagttaccctaaaatgttttgtgaatagtgactcgatacacatttgtatcatccacgaaccatatgatttgattgctgaatatctctccatagttctgtgaagacaggtatggttcatatattcaaatatccaaacctcatttggagttgtgataccagcaacctttgacatcgattcaagatgctactggagtgttattcatttgttcctgacagatgccactgcacaaatggacgttgacacgttgtagtgatcacactgtcacgagagctgagcaaactacagcctgcaagagctacacgcatgcttgaccacatcatggtggagaatgcaagtgttaaagttgcattgaatcgcattgccgttgtttctgtcctggatgcacataccctgtcagtgatgtcttatgaagcttggaggctcatacatctgtttctgttggctctctctagctatatgcagtggagctgctaatatgcatgaagtttgggctaggtgagcttcctctttcacttttcaaaccagtataggtattggccgatgtcaagaagacaaggccggcgacgagaggacgacagcgtgcaagaagagaaggcccatgttaggcgcaactatagggctcaaggtcaatcagttgtggtcacacttttccatttttacgttcagctaaactgaccccctgtctcatggtgcaactgtgcaaggataggcaacaagtgttcaacaatatgtctgtggatcaattgacctgcatttcagcttttagttgaggatcaaaatctcgtgtcgttcagggccctcggtagagagacattaatgtgtcggcaccgtggatcgtcgcagttgtgggtcactgtaacggcactggtcacaggcaccatctgcctctgttcgtcctcctctattggcctcctcagcacctacagggtccagatggaaaagtttctataatacatatgtaacaaatacatactccttgttcaagagatcgtaagcaagattgtaaacggtatccaacgcagaagcacctaatatggttacagagtattactgatgggcttacctgcagactgcatgctactactcaaggatgttgttgcaaatgagttgtggagaaccgtagatgcaaatggttggagagcatcttctgcaccacacatctattggcctcacataccagctgaatctgagagcaatgggtacttgtgtgtccggtgcaacggcggcttgaccttacaaatcagtgttgtatgactaatataaaactctctctctctaaagtagcatagttcaccatgcaagttttgtgtattcatggcaacatatctgaaagatttaagattacttctaccttgattttgtagatatgaaatgttgttgtcattgcacgaatcattaatgacttgattttgctctctatatgctatcttagaagtttcagagttca

SEQ ID NO: 36803 - DNA, 2335 bp, Zea Mays
cgccaaattaaacttgaccacttcctctctctctcaactccaagtcttctctctctttctctctattctttccatccccgcttctcggaagctcatcagccatggacgacgccgcgggagaggaagaagcttcgatgttcgagaccagccatgtccttggcgccctgctggcctcctcgccgctgctggcgtccgcctgggaccgctgtacgaccgccacagccgcggcgcccgggttcgtgcacggagaggacggcggcaaggtgtacgtggggttctccggggtgcaggccgcgctgtctgcggcaggcgcggcggtggccggtggtggcgccgacgtcttcgcgccggtggggctcggcggggacgcggcggggcggatgttcgcgccgctgctcgcggccgagcccgactcgtccgctgctggggagccggttgccgtgcaggcgctggcgctgcagtgcttcttgaaactctgcggtaaccctgatttccagatgcttctgaatgagatcaggggtaaggcagtcatgttcacgggccactccctcggtggcgccattgccaccctcgcggcgctacactacctctgcatctcatcttcaagctcaccatggtcacctgctgctcctgtcctgtgcgtcacctttggaagcccgctactaggcaatgaggcactgtccagggcaatcctgcgtgagcgctggggtggtaacttctgccacgttgtctcacagcacgacgtcgtcccaaggctcctcttctgccccccggacgccgtccctgcgcatatcattgtcggaatgcaactggatcaatggccggcccggactcgccacacaggtgcggtgaacacggtcaccacacgcatggcggacactgacaagaacgcgctccagcagctgatacagacacacatggccgctgtggccatggagcagaagcttgctactcctgagacgacaggtgggagtccttaccggccgtttgggacgtacgtgctgtgctccccagaaggtgcggcgtgcgtggacaacgcgaccgcggcggcacagatgctgtacgccaccttcgcatctcggagttcgcccggtgcagagtccccggaggccgcgcactcctgctacggcgagctcgtgctgaaaatgccacagcacctgctcctcaagagatgcctgcgtgtggacgacacgcgtgccacgcccaactacgacgacggcgtctccctcgcactggaggcctccggcatcgacgccacggtgagggcacacgccatggaggcatcgacagcgcggcagtggctgaagacatcgaagcgggcagggcggcggccgagcctgaactgcgcttgcctagcgacgcagcttggccggatcacgcctctccgtgcgcagatcgaatggtacaaggcggtgttcgacgcggagatggggtactacgacgcgtttaagcagcgcaggtcgcccaggaagtactccaaggtgaacttaaaccgcatgaagctgggccagttctgggacggcgtgctcactaagctcgacgccggtcagctcccccacgatttccaccgccgcgccaagtgggtcaatgctgcccgtttctaccagctcctggtcgagcctctcgacattgccgactaccaccaccaaggcctccatcggacgagcgggagctacatgacccacggccgggagaggaggtatgagctgttcgacaggtggtggcaggagaaggcatgtacgggcgctggcggcgacatcacgtcctccatgttggcagcgtcggcgagcagccggagacgcagcaaatacgccgggctcacgcaggacccgtgcttctgggcgagagtggaggaagcgagggaggagacggagagcgctcggggcgagcgcgacgtggcggagctggcgatgaagctggaggagctgcaagagttcgagcgctactcccgtgagctggtggcgaacaaggaggtgtctgttgacgtgctcgcgccgcagtcgagctacacgctctgggtggaggagtggaaccagctcaagctcagggatgaggtgaggacactgttgctccagttttgagctgagttgcaaacagctgatgaatttgtagatagctggtgggcattctccaaatggttcagaagtacatgaatcatttgatcattgtccatggatgctactatatagctgattgtaaatatatctaaacctagaaacattgcagtggattacaatatatttattctttcatgggtaccttgatggcccgatactgattcgaaaaagctttcgagcaaggaggcttgaaaacagctgaagttcagatatggatg

SEQ ID NO: 36804 - DNA, 1659 bp, Zea Mays
gacggccggcctgccgtgtacgctcgattcgggcgagagttaatgcgtgaaaagccacgatggagagtggccgaacctttcggacagccgcgcgtgtcgttagttgatttcgagctgcctctgcctctgcttctgcttgcttgctgcttacttcggggcagcagccgtcccggcgatggactggtccttcgcgagcaagccctgcgccgccccggcgctgatgtcgttccggtcggcggcgagggaggagccttcgttcccgcagttctccgccttggacggcaccaagaacacagcccctcgtatgctcacgcaccagagatcgttcggccccgacagcacgcagtacgccgcgctgcaccgcgcgcagaacggggctagagtcgttccggtctcgtcgccgttcagccagagcaacccgatgttcagggtccagagctcgcccagccttccgaacagtaccgcgttcaagcagccgcctttcgccatcagcaacgccgtggccagttcgactgtgggttcctatggcggaacaagggatgcggtgaggccaaggacggcacaactgacgatcttctacgccggttccgtcaatgtgttcaacaacgtctcagctgagaaggctcaggagctcatgttcctagccagcagaggaagctcagcccccgtggcctgtaagccagaggctcctcctactctcgctccagcgaaggtcacagcgcctgaggttcttctgcctgcgaagcagatgctgtttcaaaaaccacagcatctctcgccgcctccatccagtgtccctggcatcttgcagtctgcagctctccccaggagcgcctcatctagctctaaccttgactccccagctccaaaatcttcggtcccgttagctgttcctcctgtaagccaggctccgccagcaacactgatcgccactacaactgcagcagcaataatgcctagagctgtccctcaagctaggaaggcgtcccttgctcgattcttggagaaaaggaaggaaagggtgacaactgccgcgccttacccatcagccaagagcccactggagagcagcgacacgttcggcagcgggagcgccagcgccaacgccaacgacaagtcctcgtgcacagacattgccctctccagcaaccatgaagagtccctgtgtttaggggggcagcccaggagcatcatcagcttcagcgaagagtcccccagcaccaagctacagatctgatcgtgccgtgcccagtgttcatagatttgtccaggctgaccgatgcagaaaaccataagaatacttttttccactcaagaggaagagattactatcgatgccgttgttgtttaccgtgatgctgttttgccgtgttaggttactgtactgctggtacagatggtagtgccccccacccacctaactaacaagagagctgtcacttgcagactcttgatttttttttgccatttctcttggaaatgaactcagatgtgttattctagcagtaatcaaattatacaggcatacaaattctgcgccatttgtatggccaaagtgtaatacacttgttcttgaattatgaacctctctcaagctgcagaatgcaattctcgatggtgttctcataatctcattggcagcatgcgtgtgtacacagt

SEQ ID NO: 36805 - DNA, 3006 bp, Zea Mays
atacccgactccgatcttccaccccgctgccgcctgccggcgtgcgtgacccgggtcccattccatatccggtgccattttttaatactactagtctcgttcgatcggaatcggcttcccgtcttggctgcatttttctatccccgcgtggccgcgtgtagtcctagtctctcgccagcaccatcatcatcaatcacggcggcgaccccgccccgcctcgatcgcccacgctgcccgactggaaccggtaatccacttcgctgtgccgcctcgctcagatcccacgttggctgttgttgttgctctgctctcctcggccgggaaaggacgctgctgctgctgctgctaggctgacagcgacgacgagggggccatggctcagatcttgctccacggcacgctccacgccaccatcttcgaggccgagtcgctctccaacccgcaccgcgccaccggcggcgcccccaagttcatccgcaagcttgtggaagggattgaggataccgtgggtatcggcaagggcaccaccaagatatacgccaccgttgatctggagaaggcccgcgtggggcgcacccggatggtctccaacgagcccgtgaaccctcgctggtacgagtccttccacatctactgcgcgcacatggccgccgacgtagtattcaccgtcaagatcgacaaccccatcggggcctcgctcatcgggagggcttacctgcctgtcgaggacatcctgggcggagacgagatcgacaagtggcttgagatatgcgatgagaagcgcgagcctattggggacagcaagatccacgtgaagcttcagtacttcgacgtcggcaaggaccgcaactgggccaggggtgtccggagcaccaagtaccctggtgttccttacaccttcttctcgcagaggcaggggtgcaaggttactctgtaccaggacgctcatgtcccggacaacttcgttcccaggatcccgctcgccgatggcaagaactacgagccacacaggtgctgggaggatatctttgatgccataagcaaggcccagcatctgatttacatcactggctggtccgtgtacaccgagatcaccttggttcgggacaccagcaggccgaaacctggaggcgatgttactcttggggagttgctcaagaggaaggccagcgaaggtgtccgtgtccttatgctagtgtgggatgataggacttcggtcggcttgcttaagaaggatggcttgatggctacccatgatgaggagactgcaaattacttccatggcacggacgtcaactgtgtcctgtgccctcgcaaccctgatgattctggcagctttgtccaggacctgcagatatcaactatgttcacgcaccatcagaagatagtagtggtagaccatgagttgccaaacgagggctcccagcagaggaggatcgtcagcttcgttggcggaattgacctttgtgatggaaggtatgatacccagtatcactccttgtttaggacacttgacactgtccatcatgatgacttccaccagccaaactttgagggtgggtcaatcaagaaaggtggtccgagagagccatggcatgatatccactcacggctggaagggccaattgcttgggatgttctttacaactttgagcagagagatacctggaatgttcagctctttagatccattgacggcggtgctgcttttggcttccccgagactcctgatgaagctgcaagagctgggcttgtgagtggaaaggatcaaatcatcgaccggagtatccaggatgcatacataaatgccatacggagggcgaagaacttcatctacattgagaatcagtacttccttggaagctcatatgactggaagccggaaggcatcaagccagaagatatcgattgtcttcacttgattccgaaggagctctcattgaagattgtcagcaagattgaggctggggagcggttcactgtttatgttgtggtgccaatgtggcctgagggtgttccagaaagtgcttccgttcaggcaatccttgactggcaaaggagaacaatggatatgatgtacactgacatcacacaagctctcgaagccaatggaatccaagcaaaccccaaggactatctcactttcttctgcttaggtaaccgtgaggtgaagcaggagggagaatatcaacctgaggaacacccagaacctggcactgattacatccgggctcaagaggctaggaggtttatgatctatgttcatgccaaaatgatgatagtggacgatgaatacatcatcattgggtccgccaacatcaaccagaggtccatggacggtgccagggactccgagatagccatgggcgcgtaccagccgtaccacctggcgactaggcagcctgcccgtggccagatccatggcttccggatgtctctttggtacgaacacctggggatgctggacgacgtcttccagcgccccgagagcgtagagtgcgtgcagaaggtgaacaagatcgccgagaagtactgggacctgtactcgagtgatgacctggagcaggacctcccgggccacctcctcagctacccgatcggtgtcactgccgacggcaccgttactgagctgcccgggatggagaacttccctgacacccgtgcccgcgtcctcggcaacaagtcggattacctcccgcccatcctcaccacataggctgcaggctgcaggcagcgccatggcttctctgtttgtgtttgagatactgaaagttcagatagcagtgtttttatagttattgagtgataataagtgcattgtgcatggtgggacgataggagttagagttgttcataaatcataactactatgtactgcaccagatgacgagattgtgttgccccttgtctggtgtagcttgtgtagctttctgcgttgcagtgctgtttgtaaaggcgacttcagagttcagaattaaaacatggttgttttttcaaaaaaacaga

SEQ ID NO: 36806 - DNA, 1335 bp, Zea Mays
agctcgggccccggcgccgctggacgcacgcggggctccggctatatgaagccacctcggctcgggccttctcctcccagcatccgtatccctccatcagtccctcgggccatccctagcttcatcccaattcttgttcgtgcagctgctcgtggcagcctgagaccaggcgcgaggatgctggcggtgttcagcggcgaggtggtggaggtgccggcggagctggtggcggcggggagccggacgccgtcgcccaagacgaaggcgtccgagctcgtcgcgcgcttcctggggaccagctgccccgccgccgtgtccgtgcgcctcgccgacctcggccacctcgcctactcccacgccaaccaggccctcctccgcccaaggtcgttcgcggcgaaggacgaggtgttctgcctgttcgagggggtgctggacaacctggggcggctgagccagcagtacgggctgtccaagggcgccaacgaggtgctcctggtcatcgaggcctacaaggcgctgcgggaccgggcgccgtacccggccagcctcatgctcgcgcagctcgccggcgcctacgccttcgtgctcttcgacgcgtccaccaactcgctcctcgtcgcgtcgggcggcgacgtgcccctcttctggggcgtcaccgccgacggctgcgtcgccttctccgacgacatcgacgtgctcaaaggctcctgcggttgcttctactctaatgcccttggaggattgaagtgctacgagaatcccaagaacaaagtgactgccgttcctgcaaacgaggaggaaatctgcggcgcaaccttccaggtggaaggggctacggtgctcacagcgctgcattaggagatgaggtgtcttcctccgtctccaggcctggactgggggcaactgtacatggtgcctggtggtgtaatgtaacataacggcaatggcatatgcagctgatcctggtctgcctgtatcatctcctcccacccgtaaagagaagttctttctgccgccatcgccatggtcagtcagagcttctctgctatagctgctggatgtgttgtgtgttgcgtctgtatcgtctctagtttgttcgacttacgtggaaacctgagatcagaccgggtatcgagcggctgcttgcatggatggaatgctgtaatcatctgtagtgacaactccattttccttgtcagactgtggcgcatggtccttctgtgcctcgtggatggatgcactgcgattgttgatgctgacttcgcattaacccctctgcagcctatagcctgcagaagggagactaccaccgctcatgtcacaccagtaatctcc

SEQ ID NO: 36807 - DNA, 1109 bp, Zea Mays
tagacatctaagaaaaagcgtctcgcagagggagggagatcgagtcgtccaaagagaaagaaccgcaacaagcagtccacgcgcgccgcatctcggccttcggggtacgatctggtaggatcaccggtacacatgaaggctcctcgaggttcgttggatgtggaagacccttcgcgtcataaggaattcttaatggagtttgcatcgtgcaaggctgcttgcggcatgggagggagccctgcatcatgtcagcttgggtatgttgctcccaaacaaatcgctatggtcccgcgtgcatatagagccatacggggttgggattcgtgcgtggggacgacttatggggtgcttgccagcgacgtccgccgtgggggcactgtgctgccatatccggcgcttgggggaggaagaagaacatgcccttgccgttggatttagatggacgatcaagattagacagagaataccttttcgtagtctcagtcttgcaccgttcatcgcgagaccgagggctcttatttgatcagtggcgtggagagatatgaggcgctgatcttagactaagggcctgtgtcgtgtaccggttcactggggtagttcatctaatctgggccttagatcctaaaatggatggcccagaaccgagcacgttgaagtcgcgtggtatttttgcagtatgagtcctcggggttttccgcaattaacccgtagtcctgtgtagttcatatttcattacaaacggccccagaactttatgaactagaccctgtctttaataaaaattgtagctgccatccacagggttgggaaattaaaatctaaaatgattttcaggatagaataaaatatggtaaacatagaaaattcacaactttctcattctgagcgcaatttgatccattcaagttgcgttagcttcacaataatgttgcctacgcctccataacattactttatcaaataacatgttgtcaaaaataaatattcatttaacctatgcttagtggattaaatcttctaaacaaagttaatgtatccataactatagtaagactaaaatataatccctagtcaagttataaacaagattaaagatcaattagttattt

SEQ ID NO: 36808 - DNA, 2250 bp, Zea Mays
cgagagcccgagaccgcccaggtgcccaccactccaccagccaaccctagagcctctccagtctccactgctcggccgccgcctgccgcagcccgccgtccactggtcccgcctcccggcgtccgctccacgcctccactgctcccggcgtccgctccattgctaccatcgtccggcgttctgctcctgcgccctccctttgattcgttgccagttgtagtgtccgggcagatttgagctgtggcagcaagcaaggattgacgaagcgtgcgttcccatcgcaccaccatgggctacacagagatcgacatccacccctctgggagcggcaaggtaccgaccccctgcccttacaactcctagagctctacccctcacgctgaccttagggagacaggatggtttgctcgcctactagaggacatgctctgatggtgttccctctgctaccatttttagttcttgattgtaaagtgtatgttctacattttgaaatagaactggattgtgcatattttgttctacatgtaaagtgtatgttctacatgtaccttttagatcgcttgcaatatgatttattttaacacatatttgaaatagaactggattgtgcatattttgtaaagtgtatgttctacattttgtaattcgtattattcatttttcctttagtttttctctttctacaactcctgtctctttacaatcaaatttcagatgtgatagatattagtatgaaagataaaaactagaatgctatgcctgtcagaggagctttcttcagtttcagaacacacctctccatctttcggtgcttggtggatcaccgtctaaacgatccaccaccagaaccgcccaaccccaagataggcagctccatctcagtcgttgtacccgttcaatggcgagctggtggcagcgatgtaggagatgatccatgccgaggtgcacaagtacatgttagtggacggcacctgccaaagatacaccgtttctactgtttttcagttggagaaaacatttaagacaacattttcatcgtttgttctccatatggggcttgtttcacgccacttgaaggaagaagggaatggtggtgttaagttcggacaatacatctacacatcttggagcatcggcatcaatgttctcaatcttctcaaatttcaaattatactggtcattactttgaccattagaataaaatccctataaaacgtggccatgcaatcactggttgtaaactgatgggcagaatgttgtaggatggattggctcaagaactaatatagcttacttatgacaatgtagtaattcatgaagttattgttccttatgttcatggagtttgttctgctaggtttttatgcttttaatttctatttccttaacgaaacctcaggcaccttaaagacagcttggatgattggtttcatgaacagctagagaacttggatgatgattatcttgtgtttgattgccctaatatattctcaaatcatcttttcatgctttagttgtttcttaatagttgcacagtttcatctcactcatattcttgccacttacatgtatgtgacaaaacagacaatccgtcttttttattgcttatggcgttgtgcattatacatgtccaccaattatatacaaataccatttgtgggttacctctggtgtgtttaggtattcctcagattcctgacattttttctgtctttaaatgtcatatcactattaaaaaaattgatttttgttgtctaaaataccacaactacttttctaggtgcgagctgcaatcaaagttaaggcattagtcatcatttgcttcacctcttctggacaggctgcaagggtgttctggacaaagaaagcttgtaccttaaaacaagaggatacaagaagctggagtggttgtctaaaggcttttgaactgcttgaagcattagtgtagctttggtgattttgtgactgatcagctctggagcagctagagtgatgtagttgtgggcttttgaacaatagctggagtgatatgaaacattagtgatgtggttgtgggcttttgaactgcttcaagctggagtgatgtcgctgtgttgcttttgtgactgatcatctctggagcttttgtgaatgatctaactagctatatgtaaatgatctagttgtgaatggtattataattgtgatgattttgtgaatatataattgtggtgcttttgtgtttatgtgatggatctatgactggta

SEQ ID NO: 36809 - DNA, 1304 bp, Zea Mays
gctgagtcttcttccatggatgctggccgtgctgccctctctgattatcctcatgcccggccgcggtacaacagcaacatccatgaaaccccttcgtgtcgtgccctcgatgtgctcgatgaaataccgcagcgagctccgccccgaatctgcgcaaccctggccttgttgtcgacctcagtatgctagatgattatgtgaattggagggcatggatcaggatggatcacaaggtggctttgatgaacccatctcgatagggacgacttgatcaagtgtcaggattgttgatgctcaccaagcggacgtcatctaaccacactaacctagtgtatcccaggcaagccccagtgcatttgccacctccttgttgttataaaatttttatcacttatatgctgcattaggtgataggagttgagtgatgaaacacttgatgcattgccattccttggaatttgattaccttccttgctacctgttttacaaagagaactaatgagacttagctctgcttagaaaaactaaaagttgtttcttttaaaaaagaatgatgtggaacactgttatgggctttttgtttaaaaatcaaagcaaacttatagtgatgattccccttcggccgaagtgggttcatcattcgaaaagagtacccctgtcgggtaccaaaaatgggaaaatggttggaataaatctagaccagacgctgagcaggaaaggtcgcccgtctgtgtcgtttaaggaccgcaccgaaagtaggcttgctgatctaggaccctttaactggccacatgcctcatcatgggtaagcttagcctcggtcgaaccaataccagaatagctcgcacgcactgggagcggagagatggcgagagtaacatgtgcccacctggcaagtggttggatggtggggtgctgtgctctcgggtcgcgtgaacccgttctggtcttgagaaacccgtgggcgagttgacatatgcaagggttaagtgctacatatgtcgtgtggttggagatcctcagctgagtattaattgattcagatcgccgttacttctcggacatgaagactggatcactgccctgcatcgtagataacaagtgaaattaaagttgataaaatgaagctagtgtaggacaagtaaatgttgtagaccaagcaaatctagattcaggaaaagtacttaatttgtgaagtaaaatttttacataaggatccactactagtaagcttttctgcgaaaatgagtctttgaaatttgataagctttaccttgattcccgataaaccagcatacccttga

SEQ ID NO: 36810 - DNA, 1395 bp, Zea Mays
ttcaatataatgatgcgcagttctcctgcgtgttcgagaaaaaaaaggctgcttattacattgtgagatgtcggttcctaatatcaagacgaacgtggagatgtagtagaaaattttgttattgtatcattacagacgctgcaccccgagctgccttgtggactcacagtttgctgttcttctatttttcaatgaaaagctcttatggattcaccatgtcgtccagagtttgaaggtagcgctgaaaatgagttcattgagagaaatcagttgcagaagtcagaacctaacaacgacctggtacctggatttcaacatcctaatactcgccaaggagtcaaagctagaaccttaagctatgatgatctggtacctggaattcaacgagctgatggtcgccaagaaatgaaggctagtaccttgagctatgaagatgagcttttccgcaaatttaagatgggcagttcagtccctgaaatttagccagtaaatcaaacaccattgtgtacccatgatctggaaactgtgagtaacaatgcaatccatgctggagttagtaagaatacaagtgatgacagagttagtaagatgacaagtcttgatggagcggcaagtgtccaacctagcagagaagtggaaatgagacccagatctgcacgtccaagccagtcaaccgaagtggacaattcaggttggtctgtggaaactctgaaggaactcttagacttcacgccacaggagataaccaaggccatatccgcgactgagagtaaccgtttgttagcatctgtcgccattgctttgctggtggttctttcgaactagggcttggacatcggtggtgccatcaccagagtattggttggtacaaggccacttctatttctcattataaccaacatcaccattgtcttcacattgttgatggagaacaaagaccccaatgtgaaaagcaggcccgtcggcgccaacctgggttctgccgatagcttagggcagatgctagagatcggtttgctgctacagaaagccctaggtgctctgctgattgactgcagcgtttgcgctgttattatgatctgctttcttggattctgagggagcctaggtagaagttccgcagaaatctttgtaactattttgtcccgtgctctgtactgcatcgttctgctactgctattcaattctgtatcatctcactttggcagagttttaatttatgtactccccgttttctgttttctgagcgtatgcagttaattaaaccaggtcaactgttttagccagtattttttggtaaccttgtatattgattatttattatgacaaagcaacctcttatacagttttaccaacgatgaatataatgtcgactgtgtgcctactgcctagtct

SEQ ID NO: 36811 - DNA, 1942 bp, Zea Mays
aagaagtgcatgtgcataaacctctgctccctccgactccgacctctctcgtccgtccctcgctctcgcaaaagctccgctctgcttgtcgcagtgtcccttgtctgtttcccctcgccggctcgccgccaccgccgcatccacttctgcgccgcggccgcccatattcctccgagcgcatcttctcctcgcattacagcaccgtaaagccgcatcatttccggatccctacctaggccgaagccgcagctcccaatggcggccgcctcgtcgttgcgtgtcacgtctttcgccgccacatgccctagagcgcgggtgggatctgccggcctcggatctgcctgatgcacggctggagctttgaagctttgctgacattggcggtggttttccctttcttcagcgcccgggggccttgctcgttgctgcggcggggcggacagtgcagatttcagtatgtctttcaagattcagctattgtcctccattgccatttttgcttttgccttgcatcttcacccttgtgtgtccactgagtttcgccgtgagctctccagctggaccactggcatagctacgtggtatggcgatgctaatggcgccggaagtgaaggtggtgcatgtgggtaccaatatgctgttgaccaaccaccgttctcgtccttgattgctgccggcagccccttcatctatgactctggcaatggatgtggctcttgctatcaggtggtatgctctagcaatcaagcttgctctggttacccggtgactgttgtcatcaccgaccagggccctggtggtggcccatgcctgagccaagcaagcgatggcatgtgcatgaatgagggagcccactttgacatgagtggaactgcatttggcgccatggcaaagcccggaatggccgatcaactccgtgctgctggcctgctacaaatccaatacactcgtgtgcagtgtgaatggcctggagttgatgtaaccttctctgttgactccggctcgaacccgaactatctggctgtgctcatcgagtacgaggactgcgagagcgatctttcagccgtcgacatcatgcagagctcagcagggcaatgggtgccgatgcagcattcgtggggtgcaatctggaggctcgactctggctctgctcttcagggcccgttccacctccgcttgacgttcagctcaggccgggtactcatagccagcaatgccatacctgcaggatggaatgcgggtgtggcgtaccgggcaggcggagtggcggtgactagggccaggcccaggagtggtggcagccaggccggtgaggctgctgctggaacatttagaggtttggtgtatcaccttctgatgtttgtggtattggcgttgtgaattatgatgcaaatgcatctttggtagtttagaggtgtaaatttaacaaatttaggactacccagggattttagatgtgcattttgatgttttcttgtagctgaggtctgagaggggggagtgatgttaacgtttttgttgtggttgagttatcagcatgcaactgatcaggttggatggtagtccttgcatgtaaatacacatttggtgaaactgtttaggttaagtctttagttcctttatggaagagatgtcttctttctagctttttatttgatttcgaggtgtttttcatggatcgaataccactagtcattgagttagtaaacaaattgtttttctgacagtattgagttgaaatttgttgtttcgagttaaaagattgagtttgtaaattacatgagtctttaaacaaatgctttgaagtacaaagtgagaatcctacttttcaatttttcatctggagagtcttaatctcaggtttcgtagtagttttttgttactgtactgtagcgcagtgcagtgagaagcgtaactacatatctgatctctgtagtctaat

SEQ ID NO: 36812 - DNA, 1621 bp, Zea Mays
gaaacgaaacagcagttgagcttatttactttttcgaagaaaccacaaccaaacctcggctgctcggtggtcggtgcccaggtgcgccgattatctccatcaaagccgcgcatcccgctgcccccttactcatcctccccgctgctcgaaggagagccaaatccagagcgccgccgcgatggcctcccctgacgcggaacagccggcgccgacggaactcgagcggtggcgtgacctcgacatgctcttgtcccgccctggaaacctcgtggaggccactttcgatcccagccccggcgattgaagataaagagatagagttctacagtcagttccacataattgtcctaggtctggattcaattgaagctcgaagctacatcaattctgtggcttgtggtttcttagattatgactcaagtgacaatccactccaagagacggttaaacctatggtagatggtggaactgagggcttcaagggacacgctagagtcattatacctggaacaacaccttgctttgaatgcaacatatggctttttcctccacaggttaagttccctttatgtactctcgccgagacaccaagaactgcagctcactgcattgagtatgctcacttgatcaaatgggatgaggttcatcctggaaaaccttttgatggcgatgatgcagagcatatgcagtggatttattcagaggctttaaagagagcagagcttttcggtatttctggtgttacatattctttgacacagggtgttgtcaaaaatataatcccagccattgcatcaacgaatgcaattatatcggctgcttgtgcattggaagccttaaagcttatttctgggtgcagcaaaagtgtgtcaaactatctcacgtacaacggtctggaaggaacacacattaaagtaactgagtttgtcagagacaaagattgccttgtatgtgggcctggtacccttgttgagctggatacgtcatctactctttcagatttcatcaagatgcttgaagagcaccccaagttgcggatgtcgaaagccagcgtgacgcacgaaggtaacaacctgtacatgcagtcaccggaggtgctggagcagatgacacggccaaacctgagcatccccatgtttgagcttctcaaagaggtcccatacaccactgtccatgccacgggcatggcagagaacaacgggaaaaaagtgtcctcgttgaggaagctccgtgtggccttcaagggcatcgaagacgcctccaagatggatacgaccgtgagctcatgatgccggtcgtcgtcgtcttgttgctaatttcaagtctcccaggaaagatgaggattaacccaatgtttttggacaggttaagtgtagttttcgagcgccatattacaaattgaaatgtgcgcctgatactgttcaaacatgaagaaatttatcgtagatgatactatggttttgtgagaatctacttcttggtgtttcgaatcttgctcgacaagtaaattaaatttattgtgcgtattctgagttttggagcgtgtacgcggtggagaatgtaagatttatactagttcggacagaacgttcttactttcagtcattgtggcttatgctat

SEQ ID NO: 36813 - DNA, 2175 bp, Zea Mays
atggagttatcctgtgcaatcaagcagattggtttgattcagagagtgatcgattgggtatccctgtgcaaggaacttattgagaaaaaaacatctcctgaagcaacaaaagccttagaattgatctccaatgcattgcacatatgtccatattcagacagcctcaaggagatgaaggcagaggcattgctgatgctacgaagatacgaagaagtgattcaactatgtcaggagtctgtaaatccgactgaaagaaagccagctttattcaaagataatggagaaccaaagaattccagtctctttgaacaaacacacttctctggaaggtattggcggccctatctcatttgcaagtcttatttcctttcaggcaagctggatgaggctgtcgaattattaaagaaacatgagcaagtcacacctgtcaaagaaagtgacgtgaacacatatcaagaaaatttctcatcattgtcagcgattataagagaactactttcccttaagctgcgtatcaagcactcggtcaagttactgatgcaatagctgattgttcacttgccatggttcttgatacaaattaccccaaggcaatttcaagacgagccaccttatacgagatgataagggattatggacatgctgctaatgatttaaggaagctaatctcacttcttgaaaagaaagtcaatgtgtctggaatatcaccaaaagcttttaacaagcataaagatatcaagcaagcacatgcgaggctttcacacatacatgctgaagcaaaaaacgatacccccctgaatttgtatttaatcttgggagtggagccatcctgctcttcagcagatattaagaaggcataccggaaagctgcattgagacatcacccagacaaggctgctcaattattagtaaggaacgagaatgctgaagatggattttggagggatgttatcaaggaagtctatgcagatgcggatcatctgttcaaaacaattggggaggcatataatgttctttctgacccggacaagcgtcaagagtacgactttgaagagaatctaagaaatgctcggagagtatcgagttcaaggagcatgcgtaggtcacctgaacataactacagcgacagaggctttaatccacggcagtggcagtcaagcagagcatcacgttggtacagcaaatcagacgattactggtaaagaaggcactacggcgtggtcatgtggtgagaagcaacttttgcaactatgtcatgtgtggagcaaatgcctccttgcaccaaagatgggatgggatgcacctgccttcccttaggtgccggtgctaatgcaccagccttgcagtcagcagctttcctgtttgtttgctgcgtttctttttcagaggatggaaatattaggattgatcaattggggatctgggatgattgcttgacactggtagcgtcgtgacttgactagcacaggaaatatggaggattaggaagtggtatatcaaatagtcttttgttggcctggtgatgtctgaacactgactgcttgggagtggctggcatgatggtatctgctctgaagtcaaaacactgagaacaacatcaaaggttagaaatctgggtaaagatgtcagtttgtccaataggtacaggcattcttttgctgaatgcatggcccgctgtcgtaagtttacagcagatcagctgaaagaaaaagagacaggctcttctgtttggcgcgtgcgcgtgcagttttgttctgttgtttccttattaccaaatgatgtagcgttggaaagagtgggtacatattgtgactgcccaatgttgaaatctcgtaacatttatttattctttattactagacttgttagcctaatgttggaagcattttgagataatcaaggttccttcaaagcaagaagaggatctggttatggtaccgtttcgtttgtaaccatggtaccgtggagattcttttgattcgattctcgattgtgctagttcaaagttcttagtggttaaaaaatcagaaatatttgaagcttttagcaggattttggctttttttcacataaaatcggattataaggggaaacgagccatatgtgaagtgcatgttctctcatgttgcttatgataaaaatatttggatgacttgaacccgcccatggtttttt

SEQ ID NO: 36814 - DNA, 1766 bp, Zea Mays
tttcgaccagaatccgccaccagcagctcctgctcctccgggctctccccctccgcggctccgcccggaccggctcgcagctggccggcgccaggggctccctcgtggcctcgcccaggactccaggaggccccctggcctccggctgcgctccgtgtcggtgcccggtggctccgtttgctcgccgactgccattgcgtcagacgccagacagcggttggcgacaatgctgcagcaggaaatatttggaccgccgggacggtttgcaaattttaggagtatgtagtaactcagaggagtatttcattgtaaaatggcagcagaattgaaatgttgctgagaatatgcagatccagccgttgcgatttgactgagaatttgagatacagcagtctattagattttcataagcctgtctgactgtgtcaaataaggccaattcttttttatgactaattgacctacaaaaccctgtttatattgaacttagtatcatccccactcatgatgaacaccccacaaacttaacccaggagtgcgcaccacgcctccatgcgcccaagccccaggactgcctccgcggcgtcggcggcgtgcaccgtggctccaccctgtccctgatcagaattccgatgccgtggggtagttcgattattattctgtattctgatctttggtaattgattgttcctaatcttgatctttgaattgaattatactctctcatagtgtattagtactgttaataatgcgtgcctagtctttgaatctaggctatctcatgctgtgttggtattgataaagatgcgtgcctgtgtttgtttttcgattttattcacttcgacataaatagtgaagctattaacttaatggttgtcatcatcgattgtgaggattaagctattattatggtttccgttactgatcgctggattagctttgtgtctcatcctgacgttttcttgctgctggatgtcatttgaggtataagaaatattgagcacgagctgaagagattgagagaggtattcatagagctgggtaggaaacaaagctgaataaggcattttcccatattcatcacttattttgtagatatgaattgctatagactgtgttgtgaattttctttcgtcgttgcgttagcaacacattgattttggcgcatcgtccgccactgctaacactgtccatattcttaggaattggacgcaagctacagcggagggtcagatccaattcttccttggattctctctctatctagatcactgaagaaccaatggatacagggatggcaagggcagacagcatcatttctgaatagttcttaatctttttatcttttgggggggtgggggtgggcggcatctctaagctttggcttttgaatatgatgcagcaggtagctgagtactcaaagaatcaacaaagtgacaagcacacacatatatgcttggacacaaaagaagctagcatatgcagaaacagaacacacatgtcactttgctttgatctatggactagtgtgattcatctctctttttgtctttctcacacacacacacacacactgtacctctccctttctcttctatcagtcatttcgttcttcaatctgtgtggctatcttctactagtgccgccaattcaacttaactaaggagcttgctgaaggactcaacacacattgctacatcatgcgtacggaggcacgatgcgtccatgtccgcatacttctgctgttctgcgtccacaagaatcgg

SEQ ID NO: 36815 - DNA, 1441 bp, Zea Mays
gactatatgcttgttgtgcacatgggagggagttcttgaaactgtagctagaagagtaacaaagaagaatgaaaccaaagataacaagtcatttccttttaaggaggtcttcttggatcgatctgagcaagaagatgttcccacattgattgatcggaaggacaatgtttttatcatatcaaacccaaagtcaaaataccctgtgctgcagctggaccttagattgatatcagatcttgttgttgttatcgtgtctgctacatgtggtggaatcgcttttgcttgccttgggcaacctgatctataattgggcctggaggttttagctttgtcaatgaaatggtgcaagttgaaacggtagcccagtttggtgtgatatttctcctgtttgcattgggacttgagttttctactgcaaaacttcgagttgttcgtgctgttgctgttctcggaggaatgctccaaattatgctgttcatgtttctttgtggtattttggctacactatgtggaggcaaaacaaaagaaggtgtttttgttggtgtgcttctctccatgtcttcaacagctgtggttttaaagtttctgatggaaagaaatagtatcaatgctcttcatggccaagttacagttgggacacttatattgcaggattgtgctgttggtctgctgtttgcgcttcttccaattttgagtggtacatctggccttcttcacggagttgcatcaatgacgaagtcgttggtggtattgataacgttcctgaccattctctctatcctctcccgcacgggcgttccttggtttcttaaactgatgataagtctgtcatcacagacaaatgaactataccagctggcagcggttgcgttctgcttgttatttgcttgggagattcggcttattttctggcttttaccgaagtacccatcccacttggaggatcgctggcatttgctatccacaacggcataaccaagaactgagcattgctgcccttttgccacccacaactacttttcccttgaacacgcaggagagctgctatttgccaattacctataagccagcgtacaagctgggttgccaaacaacaacaacaacaacaacaacaacaacaaagcctttttgggctagagttgaaatccaacaaaaaccacaagtcaaggactcaaggttgccaaacaaccctacaactttgggtctgtttggcaacaatgtttctcaaaaccatggttttacaatactatacttcgcaagggtttggagatcttgggctccaccaaaatgctgttttttcatttggttggtggcccaaaatagatgttggacagttgatcgcttggcaaaaggggattgaatcaccctatcagatgtcctttatgtgaccagcaaggggaaaccctgaaccacttgcttgtgaattgtgtcttctcaagga

SEQ ID NO: 36816 - DNA, 683 bp, Zea Mays
actggtgcggcgcggagcgaggacgacgtcaccttctccaccccccgcccctgcccctgtgtgggagtaggtgtagccgcgtaagcggcagcggcgtaggcctcagctcggctcagctgccgcctcgctcgaaccagaggagccaagcagaggaagcgaggcggagatgtcggcggggctggtgaccgacgaggccaccgtggggcggctgtaccggatccggcgcacggtgatgcagatgctgcgtgaccgtggctacctggtggtggaccacgagctcgccaccagccgccgcgacttcctccgcaagttcggcgagtccttccaccgcgaggacctcctcatcaacaagtacaagaagaacgacccatccgaccagatatatgtcttcttccccaacgatgacaaggtagggatgaagcacatcaagaagtacgtcgaaatgatgacgcacgagaacgtctccagagctgtgctggttctccagcagaacctaactccgtttgcgaagtcgtttctcatagagctggagccgaagatccatctggaaattttccaggaggccgagatgcttataaacatcaaggaacatgtccttgttcctgagcatcaggtgctcacaaacgaggagaagaagacgcttctggagcggtacaccttgaaggaaactcaggccaaagtga

SEQ ID NO: 36817 - DNA, 1823 bp, Zea Mays
gtatttgcgtatctgacggttaaaaggctaggctggagcaatgcacgtacattctggtcgatcgtcgatgaggccggcgccggagacaagcacgcggcggccgcagctgcgtcgccgtcgtccagtgccattggtgacggtggccgtgtctttggcgctcatctcgctggcgtgccttcctgtcttcgcggatgcaagcagagcgctgcaccgcgaccgggaggagcaccggaggcagcaccaccgcacggaggacaagaagagccgcgtctcgctccctcccgacgctgacggcgactctccgcccgagcctccggactccggcggcgcgccgccgcctgccgacgacagcgactgcggcaacgtgttcgacgtgagggcgttcggcgcgtcgggcgacggctcgtgcgtcgacgacgacacggccgcgttccgcgcggcgtggaaggcggcgtgctcctccgactccgccgcggccacgctgctggtgccgtcggacggcgtgttcaccatcgcatccaccatcttctccgggccgtgcaagcccgacctcaccttccaaatcgatggcgtcctcatgccgccggacggcccggcgagctggccggcgacggacagccggaaacagtggatagtcttctacaaggccgatcgcttgacgctggcgggggaaggcaccatcgaaggcaacggtgaggagtggtgggatctgccgtgcaagcctcacaggggtccaaacggatcgacgctgcgcggaccatgtgacagccccgcgctcatacgattcttctcgagcaatgacgtgacggtatgcggcctgcggatcgagaacagcccgcagttccacctcaggttcgacgactgcgagcgcgtgcgcgtcgacggcctcttcgtcagctcgccggcgtccagccccaacacggacggcgtccacgtcgagaacaccaagtccgtccagatcctcaactctaggatctacaacggcgacgactgcgtctccatcggcgccggatgctccgatgtccacgtcgagaacataacatgcggccacggccatggaattagcatcggcagcctgggtgtccacaacacccacgcctgcgtgtccaacgtcacggtccggaacgtgcggatactcgactccgacaacggcgtccggatcaagacgtggcagggcggcgccggcgcggtgtcggcggtcgagttcaccggcgtgcagatgcagaacgtgaagaactgcatcgtcatcgaccagtactactgcctcggccacgggtgcgccaaccagacctccgcggtgcgcgtggccggcgtcgcgtacagggacatccacggcacgtacaacccgcaggccggcgcgcccatccgcctcgcgtgcagcgacgccgtcgcctgcacggacatcaccatgtctggcgtcgagctgctgccggccggcggggacgacggagcactgctcgccgacccctactgctggaacgcgtacggggtcatggagacgctcacgctgccaccggtgtactgcttgctggagggcagcccggagtctctccaggatccgctcaccagttgctgagatgagatcgttttctttactaacaaagatttctctcctgagacagtcaacgctaatacactggacattctacatgtgacaaattacaaattacgcagacaatgtgaatttctgaaatggcatgctcccagcaactgaaagttgagccgcaatgtattcaagagagtgaaatacgcactcgagtcctcaaaaactgaggatggatagatactcttcctcatccaaataaaaatacgccggcataagg

SEQ ID NO: 36818 - DNA, 2289 bp, Zea Mays
tcccccgcggaaggacgacgacgcaactggcagtcaccgacgcgacgcgggtcgtctcctcagccctcctgttcagcctcctcgccagcgatggcttcgggcgccgacgccgcggcgctggtgacctccggcgccgacgagtgggcagcggcgtgtccgccgctgcggcggaacctgcagctgctcgcgcctgacgaggttgagctagcaaaaatgctgttgaatgagggccagattcacctatttgaacactggcctgaaccaggcattgatgacgacaagaaaagaggcttctttgatcaggttcgccggcttaattcaagctatcctggaggtctggtatcttacatcaagaatgccaaaaaacttcttgcagattcaaaggcaggaaaaaacccatatgatggtttcaccccttctgtgccttcaggggaaattttgaacttcggcgatgacaattttgtttcactggaagcagctgggataaaagaagcccacaatgctgcatttgttcttgtagctggagggcttggtgaaaggcttggttacaaaggaattaaggtagcacttccccgggaaacaacaactggaaaatgtttcattcaacattatatagagtctatcctggttttacaagaggccagctgcaaaacggttgatgatgggtgccaaaaaaagattccatttgtcattatgacttctgatgatacaaatgcactaactatcaagcttttggagtcaaactcttactttggaatggaaccatctcaagtgaaattgctaaagcaggaaaaagtagcttgtctagctgacaatgatgcaaggcttgcattagacccaagtgacaagtacaaaattcagacaaagccacatgggcatggagatgttcattctcttctttattcaagtggcttgcttgagcaatggcaattccgtctgctttaggtgtcagtgccaccaagggttacaatgtaaattctctcgcagttcctaggaaggctaaggaagcaattggaggaattaccaaacttactcatgttgatggtagaacaatggtcatcaatgtagagtacaatcagcttgatccactccttcgtgcaactggttatcctgatggagatacaaattctgagacaggctattctccataccctggaaatataaaccagttgatactggagcttggaccatacattgaggagctaaagaaaacgcatggtgccatttctgaatttgtaaatcccaagtatactgattcgaccaagacatcatttaaatcatccactcgtctagagtgcatgatgcaagactatccaaagacgttgccaccctcaacaaaagttggattcacggtgatggatacatggcttgcttatgctcctgtgaagaataatcctgaagacgcggctaaagttccaaaaggcaatccttatcatagtgcaacctcaggagagatggcaatttacagggcaaacagccttattttgagaaaggctggtgcgcagatagctgaccctgtcgttgataccttcaacgggcaagaggtagaggtctggccacgcgtaacctggagtccacggtggggtctcaccttccagagcgtcaaggagaaagtgcatggcagctgttcagtttctcagaggtcagctttggtcatcgatggccggagtgtcttcctcgacggactttcattggacggcacccttattgtcaatgctgtggatggtgcagaggttaaagttactggtcatgtagaaaataagggctggactatccggcatgtggactacaaggacacctcggagaaggaagaggtcaggatccgtgggttcaagttcaacaagtctgagcagctagaggtgaactacaccgagccaggaaagcatagcttgagtgcgtgaaaagaaaacattcttgacctgactagcttcgtaccaaaatggaaatagctcacatctgggtcgcctcccagattctgggagggaggccaatgccagcgtagctgaaaccgttcttctccttcccccacgtacaacaaggagcaaagtgcttcaccaagcactcaacattctttatgtatatcttgtacagaactcctcttcagtgcaatcagagttcattgtttgtttgggatctgatgtttatgttacaattttttattttagaaaacttggcactgaatcaagtaataagtgtggtagtgtgtagaagtatagtaacgggctataagcctacttatgtggcattttttgtctgtgtggatgagagacattaaaaagtggaggtggg

SEQ ID NO: 36819 - DNA, 2537 bp, Zea Mays
cgccgcttatcatgcgctggcgaaggcgattgagcgagttcagcggctaatagattttcagttttatttccgggagaatgcggggtggcggcggggcttcctggctttcgtttcgcggcgtggtggtggaggaagaagaggcggtggtttcggcgccggaaaagccaatgcggcgggggcggcggaggtggggagcggaggtggacgacggctactcgccgagctccacgggcggcggcgggagcagctgctgcgattccttcggctgcgactcgcctttggccgggttcgtgcgcccagatggtgacccagacacagatctggagacagatgggttggccacttccacctccagtgcctttaccgagcggcaggacgacgaagcggaagaggcgctgtacggggtgaaggaagaggagtgggctcagatacaagaaccagccaagaatccggcattccgtgccaccccagaatgccacaaacagcggtaccggacggatgctgctgttcttttgcatggtaggaaggggtcgaaacagcggccggcctcacttgacctcggtagccctgggttccatggagccacgttttctccaagtttcgtgattggtggtgtggggttgatgaacaaaggacttggagcatcagtcatcaggtcagacgtgtttcatagtcctgggacgccgaactatccgcgccaccgtgcatcagtgttagggtgccataaagggtggagctctgagagagttccacatccttctaaaggaaataggcggtacccaggcagcagcatggcatttccttacagcaatgggaggacattgccctcgaaatgggaggatgcagagaggtggatcttcagtcccaattccagcgacgcgcttggaagaactacggttgctcatgctcggcgaccgaagtctaaaagtggccccctggggcctccaggaagacttggtggacagtattcatctgtttcttcagtgtcattgcttgataatgggagagctggacctattacagcaaattcaccttttgcggctggagtactaatgccggaacatgtttgtgaaggaaaaagtacaaatggaacctattcaagtagaccaattggtaacgaaatcaacattggaagaggagtcaaaatttgtccactgaatggtgggtctcatcctgttcgaacttccagagttcgccagcgattagattatgcagtcgaatcatctgtttcattgcctagcacgcaagaatctgtccaagacgagcaggttgaaatcacagaagattcagcttctactattgcttctataatttctagaaaagatgctgcaacccagaccagtccagagctaagtggtcaaagaaaaatgtaacacggtcgtctaacaagaattcaacaaacataatagagtggagcgaaaagacagtggaatcaaaatcttcgtcctggggctttgccaaagcgaagtgcatttctaagattgatagagaggacacagaaattactgcatgggagaatattgaaaaagcaaaagctgatgcagcaattcagaagttagtgattaagttagagaagaaaaggtcatcttcgcttgataagattttgaacaccctcaaatctgctcaaaggaaatcccaggtgatgcatgagcatgagcgtgatgcagtaacagcaaaccaagatggaaaaggctctaggaaggcaaaaaagagagcacaactcagcaagaatggccaaatcagttcactgagtggctgcttcacttgccatgctttctgatacatgtaattccaaaattgagaatcaggatccgacaaattccttcgcattccatgcaccaccttcatgttccccacatcaaaatctgggtgaagttcggagatccatcacatatcagtacataatatgatgatcccacagctggagattagacagagatctttcgaagatgctagctgcaggctccagctgctatgatagggacaatgccaaggggacaaataaaatgcagcacgaaggaaaggaggaacagtactgcgtacaccccatgtgcccgggtcgatgcctcctttatcattgtgctctgccttgtagctaggcactgtgaggctctgattgcaatcttgttgccaaagctgtatggatcatactaagagcaattccattgcacccaagggacagcaaaatcttgaggtacgaggagaaatcatgtcctgcttgtgcgtgtgactatttgagtgctctgctgggcgctggaagggaaccacgccccgttgtctcttttgtttggtacagtgctttacgaaggtgccatcggggtgactacttgcatttgcttttcagcagcgtcggtgtgttgtgttgtgtgtacctcttctctttgggaaactgagatgttggtttggcctggaaacttcggaatatcatatacagggacgaaaataatcatcactatgacgatttgttgtgggtgtcattttacggcagttattcatctggaatgctagtggcctttttaacatattcttcacttgcc

SEQ ID NO: 36820 - DNA, 2457 bp, Zea Mays
cgcccgcatcccgccccgcatcccgcgaccttcttcctctgctgcctcctgcccgcatcctgccggcggacgcaccccgccccgcatcccgcgaccttcttcctctgttgcctccacgggagccttctcacctccacgcgtcgttgcgtcagatccgtctgtcgctagagaaaaccctacccaatgaccacatgcattcttactgggacgacgccactattggcgcagaggagcagatatggcgcatcgcatgtactccgtcgctgtcctcctcgaatccgcctctaatttctccaacgccataggcaaggagatgcctgcccaccgccccggcaccccccgccctcgccgcgcacaccccaagccccgcggatcacagtcgcctctaccctagcgggagccgcgcccgcacccacattacccgcacgatggcaagaggcagcggcacaaggccacggcgactcctcgagcagaggaacccgaccgagcgcagcaacgcaaatcttcaatctcaaatccgtgctgcgagaaaagtttcactcctctggctgctccttgtgtgtgtgtgtccactaatgcgttcagcattgcaactgctgctgccaaatgctgaggcagcagtatacataactggttcaatttgtgcagcattcgttgccaacatagatggtcactctgataaaactgtcaccttcaatgggaggatgctcagttggaaaaagttagattcgcaggttttgagaccgaacctatatgtaccaccaaaacaatatcctaattgcaagtaagtgccagtgccagtgcgcagcagtctgtccttgcatagttttgttgtgggtacctaatggcctcgtctcgctcttcttggttcggttgtgttatgctactagggaaggtgaccttcctctcatcatcgcgattgactagcaaccaatggccctgataggtgttatgcaagtgtagggcgacatcactaatgctcggacaacggatgtggcatttcgatggatgcaaagcagacttggttgtttgcgatggaggcttcggatagtaagatatcatatgagtgcaagagaactactctcaccattaactataacaaattttgtcaccaaaatttggtggctggtggatctacttaagaatcaaaagtcagacaaggtggacatcaccatccaaccggaggagcaggaagccatgaatgatgttctagcagccagccatgaccgcgtccacgtcatcaactttgacatcaagcaggggctacagtggccgggcctcctccagaaaaagaggaattgaagcagtatctgactcgaacatttttgtagaaaacttggtagaaaaagaggaattcctgcatacattttcgaaggaatgtgaatatatcagaactgcagtgacaaatggtagtgccattaagcatgatggctcatatgaatcagatcctgcagttgagattgttcgagttgaactccaaggtgctgctgcatttcttttattctcgtctggttccacgcctatatatattggagaacatggatgggaaatgcttctggtagtaaaaaaggcaacacaagaggctggttcaaaatttgaactgctaggttttgcatctgtgcataacttctatcattatcctgagagtattcgcttacgaatcagccagatacttgtgttgccaccttatcagggtgaaggccatggtcttggtcttcttgaagcaatcaattatattgcacagtctgagaacatttacgatgttacaatagaaagcccttctgattacctgcagtatgtgagatcatccattgactgcctctgtttgctcatgtttgatccgatcaaacctgcacttggtgctattgtctcgtctctgaaggagaccaacctgtcaaaaagggcccaaagtttgagaatggttccaccggttgacctgatggagactcagccagaggatctcaggacgcaggagcaacagctcaatgagctcgtggacatccaaatcgaggagattgatggggtcgccaagaacgtcacttcacgtggcaaggataagatggcagagctggcggttcaatgaatctgggtgaggttcctacttcaaacgatgttaaaatgttgtcgtagcttatctggtgaggtctcttttacgagttggcttcttggtagaaagggaatgtcacggcataggcactgagtagattgtcacgacagattattatatacttcaattctggaatatttgatggaaatgctattttagattgcttggtaagtgggaaccgcctcaaatcacagaagtagaagcagcttccgattcagccggaaccatttcttcaaaaatgttctattatagaataaacaaggcttaggagatagaaaacattatttacaatataaatatgtaatattattataaatgtaccgactcaaataaaatgaactggtattgaa

SEQ ID NO: 36821 - DNA, 4052 bp, Zea Mays
ctggcatgtggcgcctttcgacgcgcagtttgcacgacacgcccgcacacctagcagtccagtcgtcgcatcctctccgggctccgggctccggacttccgtttccgctgccttctccggttctcccctcaccccactagcccccctgctccgtttctctccccgcccacagctcgaacgccaccaccttcattgtccgcgcgcccgcggctttcgaaaccctagcaccgatccccgtcgccagtcgatcgcagacgcttggagacgttcggggcccatgacgagcggcctctgagcgcgcgagagactagactgctgggtgtgctctagctagatccgaggggcttccgccgatggcgagggcggaggccaactgggagcggctggtgcgcgcggccctgcgcggggagcggctcggcagcgcctacggccagccggtcaccggcatcgccgggaatgtcccgtcgtcgctcggcaacaacgtgcacatcgaggaggtgctccgcgccgccgacgagatccaggatgaagaccccaccatcgccaggatcctttgtgagcatggttacacgttagcccagagtttggatccgaacagcgaagggagaggagtattgcagttcaaaaccggtttaatgtcagtgatcaggcaaaaactagcgaagaggggaggtgctgctattgaccgaagtcaggatattgctaaattgcaagaattttacaagctttatagagaaaagcataaagtggatgagttgattgaagatgaaatgaagctgagggaatctgccgtgttcagcggtaaccttggcgagctagaacggaaaactaggaagcgcaaaaaagtacttgcgactttgaaggtcttatggtcagtaatagaggatatgacaaaggacatatcaccagaggatgcaaacaaattgatatctgaagagatgaaaagggtcatgcaaaaggatgcagcaaggacggaggatgttgttccatataatattattcctctagattccttgacttctaccactaatgcaattgtgaattttccagaggtgagggcagcaatatcaactctgcagtactatactgatctgcccaggcttcctggtaccttttcagtccctgatgctaggaattcagatatcctggatcttttgcaatgtgtatttggttttcagggggataatgtgaaaaaccaaagagagcatatcattcacctactggcgaatgaacaatctcgtgtgggaaaactatcaggaaacgaaccgaaaattgatgagggtgccgtgcatgctgtgttttctaaagcccttgataactatatcaaatggtgcaactatctgcctcttcgtcctgtctgggataacaatgattcgttgacaaaggaaaagaagttgctatatgtgtgtttatactacttgatgtggggagaagctgctaacgtgcgatttattccagagggcttatgctacatatttcatcatctagcaagagaattaggggtgattctgcagaaacaaactgcagagccagctgaaagctgcaattctggtggtggcgtatcgtttcttgacaatgtcatttatcctttctatgaaatcattgcagcggaagcagccaataataaaaacgggcgtgcaccacattctgaatggagaaattatgatgatttcaatgagtttttctggtctcataagtgcttccacctacgatggccttggaacctgagcgacccgtttttctcgaagcccagtaggaaatataagggcttgctcagtaggaatcatcactacggaaagacatcttttgtggaacataggacttttcttcatctttaccacagctttcatcgcctttggatgttccttattatgatgtttcagggactgactatcattgctttcaatgatggtagttttgacaggaagaccatattgcaacttcttagtctgggtcctacttatgtcgtaatgaaatttattgagagtctattggatattctaatgatgtatggtgcctattcaacatctcgtggatctgcaatcaccagagtggcatggcgattctgctggtttactatagcttcagttgcaatttgctacctatatatcaagacacttcaagatggcacagagtcagcaacattcaagatatatgtttttgtaatcagtgcatatgtgggcattaagataattttcagcctacttatgagtgtcccttgttgccatggtttggctgaggcttgctatcgctggtctgctgtacgccttgttaagtggatgcatcaggagaataattatgttggaagaggcatgcatgagagtccccttgactatatcaaatacgccactttctggattgcaattcttggtgcaaaattttcattcacctattttcttcagataaaacctcttgtagaaccaacaagaactataatcaatttcactggcctgcagtatgcttggcatgattttttctcgaagaataatcataatgctcttacaatcctttctttatgggctccagtgctgtcaatttaccttttggacattcatgtattctacactgtattgtctgctatttatggatttctccttggtgcacgtgatcgcctgggagagattagtactgtcgaggctgttcacagattctttgagaagtttcctggagcattcatgcatagacttcatgttgaggttcccaaaaggaagcaactgctatcttctggtcaggaaatagagttaaacaagtttgacgcatctagattctcccccttctggaatgaaatagtgaggaatttaagggaagaggattatattaataattttgaactagaattgcttttgatgcccaagaatgacgttggagttctaccgattgtgcaatggccagttttcttgcttgctagcaaggttttcttggccaaagagattgcagaggactgcaaagactcacaagaagaactttggttaaggatatcgaaggatgaatacatgcaatatgctgttgtagagtccttccatagcatttatcatattctgacgtctatactagagaaagaaggccgcctctgggtggaaagaatttatggtggtatccgagacagcatttcgaagcggaccatccaaagtgatcttcatttcaaaaaactgcttaatgttattgccaagcttgttgctgtattgggaatactgcgaggtacgacggagtccagtgatttgaaaaaaggtttggttaatgctattcaagacctatatgatgttgttcatcatgaagcgttttcggttgatatgagtggccacattgaagactgggatcaaattaatttagcaagggctgaaggtcgcctcttcaataaactcaagtggccaaatgatcccaaattgaaagacttgatcaagagattgtattcacttctgacaattaaagaatctgctgcaactgtccctaaaaatttagaagccaggcgaagacttcagttctttacgaactcactgttcatggaaatgcctgttgcacggcctgtttcggaaatggtctcctttagtgtgtttactccatattactctgagattgttctctacagcatggctgaacttcagaagaaaaacgaagacggtataactacactgttttatctccagaagatttacccagatgaatggaagaacttccttactcgtatcaacagggatgaaaatgcagcagactctgagctttttggcaacccaaatgacatacttgaactacgtctatgggcttcttatcgtgggcagaccttagctcgaactgtccgtggtatgatgtactataggaaagcccttatgctgcagagttatttggagaggatacaatctgaagggttggctggttcagctgataggcattttgagttgtcacctgaggcgcgtgctcaggctgatttgaagtttacatatgtggttacctgccaaatttatggaaaacagaagggggaagggaaggctgaactgcagacatatccttactaatgcaaaggtacatttaatttatttatgctagagatgtctttg

SEQ ID NO: 36822 - DNA, 3460 bp, Zea Mays
gtgtttgtgaatgcaaaatctagccagacagctgaggaagggtgaaagcctccttgttcctgtagactgcagtgcgaggaggaggccgccgcatcctccccttccaaaccactccactccggtccccatcccacctgcgccagcttcgtcttgctttgagctttcgcccgccggcgatctgctagctatctcgctcgcacgtggtgcctgactgcctggtggcggtggccatggctgccccgctgggctttttctgcatgctgctgcttcttcttcttcagctgggccactcttcttgtaacaatgtgtacattgtgtacatgggggcgaggaatcccgagctgcacccggcgctggtccgggacgcgcaccacggcatgctcgccggccttctcggcagcgagcaggcggccaaggacgccatcctttacagctacaggcacggcttctccgggttcgccgccgtgctgacggacagccaggcggcgcggctcgccggttcgcctggggttgtgcgagtggtgcggaaccgtgttcttgacctgcacaccaccaggagctgggacttcatgcgagtggatccatcgcattcggctggaatcctcccagagagtaggttcggtgaggattccattatcggtgtgctagacactggaatctggccagagtcggccagttttagagacgacggcatgagcgaggctccgcggcggtggaaagggcaatgcgtcgccggggacaggttcaatgtttccaactgcaacaggaaaataataggcgcgaagtggtacatcaaagggtacgaagccgagtacgggaagatgaacaccaccgacatctacgagttcatgtccgcgagagacgccgtcgggcatggcacgcacacagcctccaccgccgctggtgctctggtagccggtgcaagcttcaggggactcgccggtggcgtcgcaaggggaggggcacccagggcgaggctcgcggtctacaaagtgtgctgggccaccggagactgcacttcggcagatatcctcgctgccttcgacgacgcgatacatgatggcgttgacgtgctttcggtgtccctaggccaagcgccaccgctccccgcgtacgttgacgacgtcctgtccattgggtcctttcatgctgtcgcgagagggattgtcgtggtctgctccgcaggaaattctgggccttattcagagacggtgatcaactcggcgccgtggctcgtgaccgtcgctgctggcaccattgataggactttcctcgcaaagatcatccttggcaacaatagcacctatgtgggtcaaacactgtactctggaaagcatcctgggaatagcatgcgcatattctatgctgaagacgttgcatctaataacgcagacgatacagatgcaagaagctgcactgcaggatctctgaactcgactctagtgaagggaactgtggtactttgcttccaaacaagggcacagagatcagctgcagtggcagtggagactgtcaagaaagctcgtggcgtcggagtcatcttcgcccagttcttaactaaggacatcgcgtcttcattcgatattccctgttttcaagtagactaccaggttggaacagctatactcgcatacaccactagcacgagaaatccaacagtccagtttggctcagcaaaaacgattcttggagaactgatgggcccagaagttgcatatttctcatctcggggtccaagttctctgtcccccgctgttctgaagccagacattgctgctccaggtgtcaacattttggcagcatggactcctgctgctgccatatcatcagccattggatctgtgaagttcaagatcgattcgggaacctcgatgtcctgtccccacatctcaggagttgttgctctcctcaaatcaatgcatcccaattggagtcctgctgcagtaaaatcagcacttgttacaacagccagtgtccatgacacatatgggtttgagattgtatccgaggcggcgccctacaatcaggcgaacccatttgattacggaggcgggcatgtggatccaaacagcgctgcacaccccggtcttgtgtatgacatggggacatctgactatgtgcgcttcctttgctccatgggctacaacgtctcagccatcagctccctggctcaacagcatgagacctgtcagcacacaccaaagacgcagctgaacctgaacctgccatccatcagtattcccgaactgaggggcaggctcactgtgtcaagaacggtcaccaacgttggctcagccttgacgaagtacagagctcgtgtggaagctcctccaggagtggatgtcaccgtgagcccctcactcctgaccttcaactcgacggtgagaaagttgacgttcaaggtgacattccaggccaaactgaaggtgcaagggagatactacttcggcagcttgacatgggaagatggcgtgcacgccgtgaggatccctcttgtggttcggacgatgatcagtaagttctatgccaattcatgagctggtgggtgtttgtgtgtactgtgtactaactttcgctcaccaccggtgacggtgggacagataagatgtaacctgctaatttgtcccaattctaatggcattggtgattggttggggttccttgactagaattcggttactgattattaagagaaattgaatctttcttttgtttgtaataactcataacttcctcctgttacacaacaaggaggctgaattgacaaagcatcttaatctagcatataacacagcaggaaaacaagagaactgtaatgtctcgagtgctaagaattggtaccggcgtatgtgaatctggtgagacgccagcaatctaattcagttcagagcagaagaggtcattacacatgagaggcgcacttcaggatttggcaccttctttgggcttggtatcagcagagtcgtccttgccgccggagcctgaggaggccgcgcgcgcggcgagggccttgtcgtacgcgtcgagctcgtcgaaatatatgtcccagacgcagcgaacgcagccgctgccgcagcagtcgcccgggagaggcttctcgggcggcagcggcgttggcgcgggcgtgggagccggcgcggcgtcgggcttcccggtgccgccatcgcaaggggtggccgaggccatgggcgtttcgggcgggaggtagtggcggcggcggaggagaggggcgcgtcggcccgggcaggaaaggtaggatcgggcccgggacacggacgacggcgcccagcatacagcccctcgctcgtcgaaaggggaggggaggggacggtcgcggaggccaagaggctgcgtgattgggacgcaggagaatccaactgccacaaggcaactcggacgaaccaattggcaaacgacacatcgtgctcggttgattggttggttatgtagtcatgttgag

SEQ ID NO: 36823 - DNA, 3342 bp, Zea Mays
cgggcgcagggcacacggctagagcctaaaagggagggagggggaggcgcgcgagccgccaggacctgagagcggctgctgctggcgaatcgacctcctgggcccgggaagagattgggtactgtagagagaccgggtagagatagagaggccaggatgagagtggcggtggtaggcgccggcgtgagcgggctggcggcggcgcacgagctggcgaggagcggcggctcccgggtgaccgtgtacgagaaggaggactacctcggtgggcacgccaggaccgtggccgtcgaggacgccgacgccgccagcaccgtgcagctcgacctcggcttcatggtcttcaaccgggtaacatacccaaacatgctggagtggtttgaagggctcggtgtagagatggagatatccgacatgtccttctcagtgagcacggaattgggggccagcggcagcagatgcgagtggggcagccgcaatggcatctcaggactcttggcacagaaaagcaatgcactcagccctagtttctggcgcatgattcgggagatactcaagttcaagaacgatgctctcaggtacttggaggaccatgaaaacaaccctgatatggaccggaatgagactctcgggcaattcattcggtctcatggatattcacagttcttccaagaggcttaccttaccccgatctgtgcgtgtatatggtcatgcccatcgcaaggagtgttgggattctctgctttctttgtgctctctttctgccgtaaccatcatcttcttcagttgttcggtcgcccccagtggctcaccgtgaagggtcgttcgcactcctatgtacacaaggtaagggaggagttggaaagtatgggttgccaaattaaaaccagctgtgaaatcaaatctgtttcaagttctgagggaggtttcagggttacagtgtttgatggttcagaggagacgtatgacagaatcatatttggtgtccatgcacctgatgctctaaagattctaggagctgaagcaacacatgaagaattgaggatcctaggagcttttcagtacgtctacagtgatatatacctccactccgataaaagtttgatgccacggagtttgtctgcttggagttcctggaacttcctggggacgacaagcaagggggtttgtgtaacctactggctaaatctgcttcagaatctacaagcagaccttttctggtgacgctgaatcctcctcatgtcccagaccacgtctttcttaaatggtacactagccaccctgtcccatctgtggctgccgcaaaggcttctcttgagcttcatcacattcaaggaaacagaggaatttggttttgtggggcataccaaggttatggtttccatgaagatggactcaaggctgggaaagctgcagctcaagatttgcttggtaaggagagtgaccttttggtgaacccaaaacagatgatcccatcgtggtctgaggctggggcgcgtcttctggtaacaagatttcttggtcaatatgtgtctgtcggcaacttggtcttgcttgaagaaggaggcactatgttcagttttggtgaagtaggcaaaaaatgccatgtgaaatctgtcctgcgagtacatgaccccatgttttactggaaggttgcaactgaagcagaccttggcttggcagatgcctacattaacggttatttctcatttgtagacaagagagaaggtcttctaaatcttttcctgattctcattgcgaacagggacgcaaacaagagtagtagcagcgctgctggtaaaaggggttggtggacacccctgctattgacagctggggttgcctccgctaaatacttcctgcgtcacatagcaaggaggaattctgtctcacaaacacgtcaaaacatctctcaacactatgatctgagtaatgaattcttctctcttttcctggatccatcgatgacttactcttgtgccatcttcaagacggaggatcaaagcttagaggcagcccagctacagaaagtttgcctcctaatcgataaggctaaagtggagcgagatcaccatgttcttgagattggctgtggttggggcagcttagcaatccaattggtgaagcaaactggttgcaaatacactgggatcacattatcagtggagcaattgaaatatgcacagagaaaggtgaaagaagctggattagaggaccacataagcttcatgttgtgtgattaccgtcaaataccaactcagcgcaaatacgacaggatcatctcttgcgagatgatcgaaggtgttgggcacgaatacatggacgatttcttcggctgctgcgagtcccttttggctcaagacggcatatttgtcctgcagttcatctcaatcccagaagaacggtatgaggaatacaggcgcagctcagacttcatcaaggaatacatcttccctgggggttgcctgccttcgttagcccggatcacgtctgccatgtctgcagcatcaaggctctgcatcgagcaccttgagaatattgggtaccattactacccaacgctgatacagtggagggacaacttcatggccaataaggatgcaattttggccctgggcttcgatgagaaattcatccgtatatgggaatactacttcatatactgcgccgctggtttcaagtcacggacacttgggaactaccagattgtgttttctcgccctggcaacgacaaattaggtgacagcggtatacactccttaagcaagctttctggcagctaataatgcgaggatctatatatatgtggtggtagctggatcagtcggagcctacacacctgaacttgagcctttttatttgtgatcgaattggacacgcagtgctgtgtacacgtcgctaactaactgtacttgcagcggcggatcattccattgcttcgatccaatttgacgtttcatcactttctgtttctgttggcgcaacgtaactccaatgattaaccttggcacatggccggctgggacgcaggagagactcgagcattcactttcgctggatatacatttgtgtattgtgtccagtctccagactccagcgctgtatgatgagctcaagaacgtagatatattgtcgtcagagtaagacaccacggtaccaaagtgctaggaaaaatcagagatatagaaagatagaggagcgcagacctaaaaccgctggatcagagtatcgatatagctgtatgcacacgtacaatataaagaggtttggactcttaagcataataccctacgtcatctatgtggtgattggttaggtgcaaatgtggatacagcttagact

SEQ ID NO: 36824 - DNA, 2066 bp, Zea Mays
aacgactcgactgtccccaatccagtatcgcgagaagcgctacgcggccggcgaggcgctccccccaatatggtgcgcgtcgtcgtctccaccctccccgccctccgtccgcttctccgccgtggctctctgctaaaccataaacccctgccccgctcacgccttcagccgtggccgttctgcacgctctcgtcctcgcccgccgccggcgcgcccagcgccgcggtgaagggggaggaggttgcgttggacaagcaccttacccggtgcgcggcggcaggcatagcaccgttgcgggtggcggtgctggtgagcggcggggtggatagcagcgtggcgcttcgcctcctccacgccgccggccatcgctgcaccgcgttctacctgaagatttggttccaggaagatttcaggaatttctggtccgagtgcccatgggacgaggatttgaagtatgcacaagctgtttgtgacaagattgatgtgccattggaggtggtccacctatccgatgaatactggaaccatgtggtgagtaagcttcatttgagcctttcccccccatagatttgcacacaacactttttagagcctttgctttgagaagaaatactgtgaatttgatatctaggtatcacatatgatcaatgagtatcgctgtggtcgtacaccaaatcccgatgttctgtgcaacacgagaataaagttcgggtctttcttagaagccattgaaaatttaggatttgactacatagcttcaggacactatgcacacgtagtacatccttccgctgaaaataccgaagcgccatccgtactacaattatcaaaggacaagatcaaggatcaaacctatttcctctcacatctatctcaatctcagcttagaaggcttcttttcccactaggatgtattacaaaggatgaggttcgcagactggctactcaaatgggccttcctaaccaaggtaggaaagactcacaagggatatgctttcttggaaaggagaaaaggaaggaatcatactggaagctgagtccggagattacctagggatacaccgtgggttttggttttatacaattggtcagcggcaaggattacggcttcctggaggaccttggtacgttgtagagaaagatgttcaaaacaatgtggtttttgtatcaaggaattattattcattggataagcggaggcgcacatttcgtgttggatcactaaactggtttgataattgtggacctggaaacaatgagcaactcaaatgcaaggtgcgacatagccctgaatttcatgattgcactttggtaaaagagcgtagtgaagaaaatggggatgctttggtggtgcatctggctgaagatgaccagggcttggcagctggtcagtttgcagcgttctatagtgaaaatgtatgcctggggtcaggcataattttggattcatgggacaagatgagcttccctgtctgctcaagggcactcgaaatcgcaaagttggcggacaagtcgagcttagggaagccaataagaatcgtgaacctggaacatatcgtgaaacctgaacaacaggaggaaatcaaagttgcctgacagattggtgccgtaaccttctcctagctccgccagctgcccccttcaaatcaattcatcaatcaaccgtatcgcaggccctggaaatcgaaggatgaggggtcttctagaatctaccgatatatacccccagttggaaactccaggtccttcttggaaggatgatatagtggaatatggcatgacttggtgcgctcgtgttgcagaggaacgatgaagcttcgtgcgtggatagggttgatctgaattaactgttgacagtgattttacgatctcgcgggaaagcaacacaatagtttgggcacgtcctctcctgagtggaatgatctggattcagtagtagtcagtggcacttcattaaaactaatacagggaaatcgtgacgttgtatgatagtggtaagatattgtattgtgaattttgacgataatatcggtgcgtgattgtgccactggatttgttcatcagta

SEQ ID NO: 36825 - DNA, 4991 bp, Zea Mays
gggagaggagagccgcccgcatccgcgcaccgcaccgcaccgcgccgcgccgttcagagagggagaggaggggacgcgaggaggaagaagaagcaggcaaacagcagcagaaggcagaagccccgtcccatccccggcagccccctccatccaagtgatttcaagtagccaccgagaagcggagaaggtgaccgcacctcacgcaatttgcccctgcccgtcgattccatcgcctcccgccgtcccttccctcctctagggttgtcttgtgggtgcccgtgcttcccaccctaggggcaggtccagggccgggccttctcttcgccccgcctccgctgctcttttctttgctgctagggttaggttagggttcgacgctgtggggaggggcatcctcctccctcgccgccgccgccgccgccaatgcctcccggcggtaggcgcggcgccaagcagcgctccaactggaccagggaaccccagctaggcgaccttgtcctcgccaagatcaagggatacccgtcctggccagctaagatcagcaagcccgaggactggaaacgtaagccaacgccaaaaaagttcttcgtctgcttctacggcaccggggagattgcctttgtacctctggcagatcttgaggaatttactgagaagaaaaagaacgatctgttagatcgagctcttaaagttcaaagaaaatatgttcaacaatttaatgttgctgtggagcagatctgcaaggcttataatgaattgccaaaaacatctgaagccgcaaatgtagcattgcctgatcagagtgaaaagactacagagcacctggtgaggtcacctgatattggtgggactccaggactgggacaaatggaagatgatccccctactgattgctcaagtacttcagggcaagggtcagggaccgaggaggatgtcaaagatggtggtcatgaaataggtgataattctttggcagttcctcaaaagaaagcatctttacaacaggatcctaagcatcccaagacaaagaagtctgctgcatcaaagtctggttttgacatgtacacagaacaggagcattcaccaacatctctgcgggcagaaaggcagattgaagaggtgaaaattgaagaagagagctgtcatctagaaggttttgttttggaacctaacttggaggtggtttgcgcccttgaagtgccaaagaattttaaatccaacaagctgttgaggaatgctgaaagtaaggaaaatgagcatgttggtgttggtagtcctactggaaggattgctgttgaggccgcatctgatgttgtattaaacatgagtgctgaagaagagagcagagaatttaagaagtcaaaaatcatgacaaaacaatcactgactactggttcagagaaaagggataataaaattgtccatggaaagcctgacaagcaattgactggaaaatcatctgcagggttttctctcaatcagaaatctctgacaggtagcgggcagcacaagatggacagtagtgctgatacacgtccggcaaagaaggcaagacttatggacagggctggtgaaacagataagacagttgccaagagtgagacgaagttaaacatcaattatgaaaatcataatgctgtgaaacatgagcaatctactgctgtggaaacatgtaaaaacacaattcttaagactggtatcggtgatgatagggcacggaagtcaggtggtgctgtatcacccatatcaaagcttcattctgagatcatggaaccagcatctggttcttctgtaactcagtctactgttgctgattctcttaaaaagggttccagcaggaaggaggatgtctcacgtgttgataggaaattggttaaacctaagagaagagcgtgtcgttttgatgatgacgaggatgaaggacagcaaacaccacttcatagaacttctgccaaatctctctctacgcatatagtcccaactgagaaaccaggtagtcggggaaattttgcttcgcatgttggcaacgcttctggaaaaaaaccaggccctgccagagaagagaaatcaagaagtgttaggatgtcacctgtgaagcatgagccagttttttcttcaccgagtcaggataaagtgcatgctagacaccagttaatggggagaaatctgatcacagggtcggttgagactcctgtcattggtaacaaaatgagcctggttgatggcaaatcctctgctcaagtaaaaatgccggcatgctctgaggtgaagaaacttcatagtacttctaaaccattgcaagtaacatctgggaaatcccattcccgaaactatcctgcttcagaaaagatcgccttggtgcccaagtcagaagaaacaaaggctaaatctaaaccagctacatctgttgagcataaggtggccaccactttgtcaactgaacggactgggaagcgggaccacctgaaagaggaaagatcaagttctgttgataaagcagcttattctgaacctaaccctgactcggccaagtcaataaaacatcttattgcagctgcccaagcaaggaggaaccttatggcttctgctcttgcaaaatttgatgggtcttcgactgataatagtgctattacctctacatcatatgcaattgctcgtgatgctttggagggaatgatagagactttatcaaggacaaaggatagtataggccgtgcaacacgccatgcaattgagtgctctaaatatggcattgctggagagattgtcgagcttctcatacagaaattggagaacgagcataatttgcatcgcagaattgacctcctttttcttgtggattccataacacaatgttcccattctcatagaggagttgccggggcttcatatgttcccactgttcaagcggcattgcctcgtcttttcggtgctgctgctccacctggagctggtgctcgtgaaaaccggcgccagtgccttaaagttttaagattgtggcttgagagaaagattatgccagaagacatactccgaaagtacatgggtgacattgagcaatgcaacttttgagctttctggaattttatcatcaaaagtgtttgaagatgatgaagacttccctcaaaacaatgggtcatcatcatttgtttcacggcctgttgaaggtggtgtcatacatgaaactgaagataatattgctccagcatctgttgaggaacacattattagagtagaacatgtagctactgatgctgctatggaagatgctttagagttacttggcaacaaccaacagactcatggagctgtcattattgaacatgactctagtcaaggtccaggttcagagcaggcattgatcgcccagaatgagcttccccctctacctgatggccctccaccacttccatcagattcaccaccacctccacctcctttgcctccttcaccaccacccgctacaccgccaccaccacctccactctctccagcttcaccacttccgccaccacctcccccactaccatctggaccacctcctcagcctgcaccaccacctctgccaacccaggacccacctcttccttctattccgctgcctgtttcttcatctccgttgtcattgggttatcagcctccagcgccagagtacttcatgacgcccaatggtaatcaattggcccagatgacagtaaacacatcaattcaagctattggaaatacaacaaccttcattcctggtggaccagttaatggacaagctgcagttaattttgttacttcaatgccggcagaatttggaaatactagcgtatttatggcgcaagcttctaatggtaattaccagtttcggccaactggtgtaccttttcagcaagggaatttcagtgcctttccatctgcacaaacacctccagttcatccccattctcgtatggcacacatgaatcccatgggccaacaagctgttgcacctccacacaatccttatgctgcacagtcctttccaaacagtcagagccattatccatctgaagaacattggcggatggcatctggtaacttcagtccagatgaccagcataattggatagcaagtggcagatcattaccttgctcagaagggccatttgtgcatgatggatattcaagatcaaacattgacagatcttcaatgaatcctatgaatcatcaacatactgttctgaatcatttgccatctggagcaccactaccaggccatatttctcagatgctaccagccaggtctgatatgcacactcttaattgctggaggccctcttgatagagttgtaaactgaacttcttgtttgtgattttgacatggaaagctcagggcattggaggcaatttgaattgagttcaacaactggtggctgttagtctgagatggagatgcacttgccagggtttaacgatgagatctgtcatagtatgtggaatggacattttacaatgtaactagtcctgacaacagtatccagcagacaatctctcttagtgtgagctcatcttttcacatgacgcaaatgtcctccagttttttagatgttgcttccagtatggatcaggacagcgaactgttcctatgctatggtagtaaatatcttgtgcagatacattaattataaatagaggtctggtagtaaataccaggaactggtatcatcaaggcattttgtcacggtgcctatgctatggttcgcttttttctcttaactgttgtgctcaatttgcgaaattcatttcaaatttcagttagctaatcacatatattctcaacaaccgtattttatgtttggtgtttagactagaattgtgcttagacaacatgtacatcactgagtttagatttaagagcggaagttagttttgattctgttaggacggcgaaatatgtgctgatatttaagagctctagtttattcttgtttccaaagactgctgatagcgttggttttctaagc

SEQ ID NO: 36826 - DNA, 4227 bp, Zea Mays
gcgagcgcgggccatggccgagtccatccataaatacccgccctccagcttcccagttcccactcctctctcctttcccctccgcttccgcagacggccaggccaacgcaaccgctcctgccatccgcaccagtccccccctcccctccctcccggactcacccggccgccagcggggtttggccgcttcctcctcctctgcggcgggagcgggacaacagacacaggggcacagaggaaccggcgcggggcggcgcaatgggggacgctgcggcggcggggaccctgcacaagagctacttcgacgtgctggggatctgctgcccctccgaggtgcccctcgtcgagaagctgctgcggccgctgcccggcgtgcgcaccgtcaccgtcatcgtcccgtcccgcaccgtcatcgtgctccacgacgccgccgccacctcgcccgcgcaaatcgtgaaggcgttgaaccaggcgaggctagaggcgtccgtgcgggcgtacggcggtgggtcggacgggaggcaggcagccggcagcaagagatggccgagcccgtacgtcctcctctgcgggctcctcctcgtcgtctcgctcttcgagcgcctctggcctcccctcaagtggtgcgcgctggcggcggcggccgccggcctgccgccgatcgccctcaggagcttcgcggccgcgcggaggctcaccctcgacgtcaacatactcatgctcatcgcagtttccggggcgatagctctcaaggactactccgaggctgggttcatcgtgttcctgttcactacggccgaatggctggagaccagggcgagccacaaggcgactgctgggatgtcgtcgctgatgagcatggcgccacagaaggctgtcgtagcagagacgggggaggtggtggcggctcaggacgtcaaggtgggcacggtgctagccgtcaaagccggggaggtcgtgcccatcgacggcgtggtcgtggacgggcggagcgaggtcgacgagagcaccctcaccggggagtccttcccggtcgccaagcagccggagtcccaggtctgggccggcacgctcaacatcgatggctacatcgctgtcaggacaactgccatggcggacaactctgccgtcgctaagatggcgaggatggttgaggaagcacagaacagtaggtcccgaactcagaggctgattgatacgtgcgccaagtactatacgcccgctgttgtggtcatggctgcgggggtggcggtggttcctgtggtggtgagagcgcacaacctcaagcactggttccaactggccctggtcctgctggtgagcgcgtgcccgtgcgcactagtgctgtcgacgccggtggccaccttctgcgctctcctgacggccgcgaggacggggctcctcatcaaaggaggggacgtcctcgaaaccctggccaggatcaagattgccgcctttgataagacaggtacgatcactcgaggggagttcagcgtcgaggagttccaggcggttggcgagcgcgtcactacgccacagctcctttactgggtctcgagcattgagagcagatcgagccacccaatggcgtctgtgctggttgattatgcccagtcgaagtcagttggacccaaatctgataatgtcgccgagttccaaatcttccccggtgaggggatttacggtgagatcgatggggaaggtgtgtatattgggaacaagaggattttgtcaagggcctcatgtgaaacagttcctgacatgaaagatatgaaaggagttaccgtcggatacgttgcctgcaaagggcagttaatcggagtattcactctctcggattcctgccgaactggatcagatgaggccatcagggagctgaggtcgctgggcatcaagtcagtgatgcttactggggatagttctgcagcagcttcatatgcacagaaccagcttgggaacatacttgatgaggttcactctgagcttcttccagaggacaaggtgaggatcgtcgacgagctcaaggcaaagcatggcccgactctgatgatcggcgacggcatgaacgatgccccagcgctggccaaggccgacgtcggagtctcgatgggggtatctgggtcagcggttgcgatggagacgagccacataaccctgatgtcaaacgacatccgccggatcccgatggccgtccagctggcgcggaggacgcaccggacgatcgtcgtcaacatcgtcttctcggtgatcaccaagcttgcgatcgtcgggctcgcgctcgccgggcatccgctcatctgggcagccgtcctcgcggacgtcggcacatgcatgctggtgatcatgtacagcatgctgctgctgagatcggaatcgaacggcggccggaaggtgaagaagtgctgtgcctcgtcgcagcatgggtcacactcacacgccaggaagaagcattgtgtctcccaccactgttcagatggcccgtgcaacaagtcgacggcaggctgttccaaggaatcgccgtctgctggtaagcatgcttgcagtgatcatggccatgcccacacccactgcaaagagccgagcaaccaccggccggaaaggcatgcctgtcatgatcacggccacagccataaccactgcaaagagcccagcagccatgtggttacagaaaagcatgtctgccatgaccacggcaacacccatagccactgcgaagaggcaggcaaccagctgctgcttgtagagagccacggttgcaatgaccatggccatgggcatagccatgaccgctgcaaagagctcagcagcccgcgcttcaccagcaagcacgagtgccatgaccatgagcatagccactgcaaagagcccaagactccgtgtgctgacagtgaggctgcttgccatggccatggccatggacacgaacatcggcactgcgaaggggacagccactcacacgctacaggtgagcatggctgccatgaacatgatgcgcacagccactgcgaggagcacggccattcagacaccgctgttgagcatgcttgcgagcatgagtgccatggtgagcaccaaactgtgcacgctgtggaaacacaccactgccatgaccacgaccatgagcacggacagcatgagcttggggagatcgaggaacctgagaaggactgccacgaccacagccaccactgctgccatgagcctcacggcaaggacaaggtcgcggccgagccagttgaagaggtcacgatctcaatcgctgccctgcccaaagacgaaggccaccaccacagcgaggaacaacacaatggggagcactgcaggaaggcgaaagactgcggcggcggcggcggcgctgctcccaccgactgcgctgcgagcaagaactgctgcggcgtcaaaggtggagacgcctgctcgagcgtgcaggccgcgcgtgctagggagaccggcccgtgctgccggagctacgtgaagtgccccaggacggcggcggcgagcaggagcagctgctgcggccacagcatgctgaagctgcccgagatcgtggtagagtagtagtagtactgtagtagggtggaaattccaccgtgggagaagggtgtgcacatatgaacaagcaactgtgaggtgagtgtgactcgccggcgtaaatgtagactaagatcgccggtgcagggtgtttgatctagtagtctagttactatataggtttgctggagaaaaaaatgatgtaggattttgactgagcagagcagggggtctgaaaggtggaaggaagggctctgcttggttttcctgcacactgctcctctgtttgcgtcttctgtggcggcggcggcaatggagactgtcacagacgaaggatgtcatgtgactagtgccggccggggccaacactaatattcaggaactatccatatccatttcggtcccttttaaaatgggagtttctttttctatctcctacgttttctattttagaataaattgatttatgtgactgcgattgcgttttagaataaattgatttatgtgactgtggctatgaaattactgggttctaaaatttctgtgctacggcccgatcgtgaaaaaaaaatactgggttctaaaacggcccttcgaccttaggggccgatacagaattagagagtaggaagagccaagcaatttatcaatactataaagtgaaggtatatacacacgcgtagatgtgtatataga

SEQ ID NO: 36827 - DNA, 2085 bp, Zea Mays
ccctgcccaacaacccactgacccaaccgtgtgactgtgtgagtctgactctgatcgctgccaaggtctcaagtctcaacgcgatgttgcgaggaagctgtggcccacctgcctctcttttttctaccacaccggcacacccacaccttcccacaaggccggaggtgagccccgcatccgcggccaagtacccatgacgacgaggctgacagcgacgttgttgctctccagaaccctcgtccgccgcgtaacctcgcgaaccccgacacccctcggccctttcggtctcgaaccatccgcaggaatccccatctcctggtccagacgcgcctcctcgaccgcctcgggagatcggggccaggaaccgccaccggccatggattcgcctatcaaggtggtttctcacctggggggcggacgaggaggaggagggggagagggagagggagagggagagggaggggccgcagcgatcgacgcggggaagtcggcacggaggccgctcagcctgtggcccgggatgtaccactccccggtgaccaacgcgctctgggaggcgcggtccagcatcttcgagcggatgatggacgctgggaacggcgcttcctctgccgagcagcggccgcagactgagctgctcgtcaagacgcccgcgcagagccggaccagcatcgtgtacaagttcgccaccgacgacatcctcagggagcagtaccgggacccctggaacgaggtgcgcatcggcaagctgctcgaggatcttgacgccctcgccggcaccatcgccgtcaagcactgttcagatgaagacagcacaacaagaccccttttggttgtgactgcttccgttgacaaaatggagctgaaaaagccaattcgtgtggacactgatttgaagatagctggcgctgttacttatgttgggcgttcatcaattgacatacagattgaagtgactcaggttgataaagcagatggcgataatcagtctgatcccattgcattgaccgctaacttcacctttgtcgcacgcgattctaagactggaaaatctgctccggttaaccgcctttcacctgaaaccgaaagagagaagcagctatttggagaaagtgaagcacgcgataagatgagaaaaaggaagagagaagaacagaagggaggactcgaaaatgggatacataggctccgtgccgaggccgagaggctggacgtgttgctcgcggagggccgtgttttctctgacctgcctgctttggccgatagagatagcatcttgctgaaggatacccgcctggagaattctcttgtctgccagccccaacaacggaacttgcatggtcgaattttcggtggtttcctgatgcaccgagcatttgagcttgccttctcgactgcgtatgcttttgttgggcagagaccttgtttccttgaagtcgatcatgttgacttcttgaaaccagtggacgtaggggacttccttcgattcaaatcatgtgtcttgtacacccagcttgacaatccagagcagcctctggtcaacgtcgaagttgttgctcatgtaacaagacctgagctccggaaaagtgaggtctccaacaccttccatttcaccttcacggtctgtagtgacacgctgaagaacgggttgaagattcgcaatgttgtcccctcgaccgaagaagaggcgcggcggatattggagcgcatggaggcagagggtttatgcaactaatctttccgcagatccacttgtttcggagttcggacgtgctttacttgatatatgtctcacttaccgttccacggtaccagctaaaacggggggatttggcgacgatttgagcagcagccagcagctatcataacacgccggcaatagaacggcatagctgtagctccatgcctccatggtactatttgtgattttttttacagagaccgcatgttgcgtataataacatactcctcgagactcaaaatgttcttttgagaaagcatcaaagcactatcgtttttttttatttgctcttgaaatggacggcggccgttcccatgactccaagaaccatgagtcccttttcc

SEQ ID NO: 36828 - DNA, 2927 bp, Zea Mays
ttttgcacaaggtcatttttctctaagcctctcattgtcatgaatcaactcactatcaacatctttgctttctatgaaaatgtttcctttggtggttgcatccctcaagtatttctttaatttcttattttcaagagacacgacctcaaaattttttcaagaaactcttcatgatggctagattcatcaactatgcttaaatcatcataagaggttgctacatcaagcttaataacagggttaatagcctcatgtgtgtcaatagataaaagctcataggcaacaagaagattatcatgatgaactttattttttgtgtaatcctcttttatcttgacaagcctatcatatagctccctacttgtttcattcaacttttcatatttttcttttgcatctttaagggaggtcctaagctcattgctaatggatgacatagttttattttcttccttcatttcatcactagctttgacaattatgtcatatttagcaatcaaggacttattttcatctttaagcttgtcacattttgccttagattttctaatgacttgagtatattccttaagcaattcggctagctcatcataggtaggggaagcatactcgtaatcactatcactaccacaatcaacatcactaggatcatcattttgtaccttccgttcacctttagccataaggtataggtgtgtaggggatgatggtgatggtggtggtgatgagaaatcaacggcgatggcggcgaacttttcatcatattcttcgcttgaggaagagtcgcttgtagatttaatatcagtgagccaatcaccaacaatgtacactttcccacctcttcccttgtggaacctcttttgtttgccatcctttttgttgaaaattttcttttccttcttctcatcttcactttcatcattttcttgcccttgaatttgtttttcttgggcctggtgcattgatgagaaagatggccaagctctccacaattgtagcaattcatttccgagattggttttctcttgctactaggggaaaaacttttctttcttgaatcaaatgtgatgccttctcgatttagcttcttcaacaatcttgttgttttcttcaccatcaaggcaatattgacatcaccaaggtcatcatcacttgaaatatcttcttctactagaactttcgttttgcccttcttctcttgatttgctttgagagccaaatctttcttcttggaagaagagccatctttgtcattgaagtgcatgtacatttcatgagcattgatctttcccaatatttgagatggcgtggcagtagaaagatccatttggtgaagcacggtgacaatgtggctgtaattctaggtgggcaacacactgagaatctttctcacaacatctggtagagagatttgtgtgaatcccaagccgtttacttcgactacaagaattttgagccatgggtgcatatcatttgcattttcattttgaagcatttcaaaagaatttatctttctcatggcaatatgatatctctcctcatgctcactcttagttccttcatgtaatacacaaatgtccaaccataaaacatgagcattttttatgatttctcactctattgaagatatccttgcaaaggcccctaaaaagagtgtttttggccttcgcattccgtttctcataattaacttcaccgaagagatttgtgggatctctaggttgggggaacctttgggtagcggcgcgatagactccaatatctatggcctctaagtaagcttccatacaaattttccaatatgaaaaatcgtcaccatcaaatatgggacaaggttcatccccatcggacatcattactctagcggtaaagctaaactaggagcaacacgactttaataccaattgaaaggatcataatgcccaagaggtgggtgcattgatcttctctaaattttcttgcaaaagattaaaccctaaacgagagcctaacttcacccaacgacttagatagatcacaaaatctaggaaactctaagcaaaccataagtcgtcatggggtgtgtgctcaaaagtaaatgcgaaaactagagaaagggctagaaaactcctctaatttttcccgaggtatcggagagtcgacactctccactagtcctcattggagcactcgcgcaaggatatcgttcccccttagtccttgctccagagcagctacaacctgttctaactcaggtttttctaaatcgatttcgattccaattcttttgtgggctattgagtgacacctagcactagttttgagtgagtacatgcaccgacactacactagacatctcttggtcaaactacacatccacaacccctctttatagtacaaccaaagttaaaataaaagtcctaactgtatagtaagtgtcccacagctccttcgatacttaggatagatagaccatcatcttttgatttgccttttcaggcgtcatttcaagtttcatctaagggattgttttcaccttttggaagcgcaattccatgcattgtgcccgaacttaccacatactctgtaaaacacatgttagtcacaatattcttacgttgcattaatcactaaaattaactagaggcctagatgctttcaaatgcacaaatgcaaaagtcctagacctacgccttctctttctgtctcttattttcttcgctactcttggtagagtggtgtcgcatcccgagagcaggaagatatcaaccttgtgtccccatgagttttctaggaaattgccatatccacgtatccatatcctttcgatattgatacgcttatctatatcctttctgcttaagttgcctgagttcacaacacgtgttttatttgtggctgcaagtcattgatttattacaagattcatgtaatcttgttgattgagg

SEQ ID NO: 36829 - DNA, 1274 bp, Zea Mays
agatagttgtttaaaagtcaaaatccttgctggtggccgagggctgggaactttcaaaaagcggactgcaaggtggtgtccatattgttaaggctgaggaagctgaattgattgcaagtaaaatgttaggccagattctgataacgaaacaaactggtccagagggaaagattgtgagcaaggtctacttgtgtgagaaactatctcttactaatgagatgtactttgccatcacccttgataggaaaactgctggtccgctcattattgcttgcagcaagggaggaaaacactatagttgacctcaatgttcaaaggatggccagaaagccaggaacagaacttaggcgttggcgattggcatctccctcccctaagccatggccaccgggcggcccgtacgactcgtgctggatgcctccctcctcctcgacccctcctccaccagggaggcggcggcggtggctctgcggcccggggtagaggagctgttgcggcggttgcgctactccaacctgaatgtggcaatctgctatgcagagggcatgccaactaatgagtcaggctttcttgaaaaggtcgcaagctcacacttgtttggctctatagcacttcttgcgaaaagtgggaatctttctctaactgaattaatgttagaatggagccaaacaagtttatgtttttatgcgacttcaagagttgacaaaggtttaagttctgagctccagaatcagaattggagagttctttctgtagctaatgaatgtagcatagaggttcctggtgttttaaatgttcaaaggcttcagcagttgcttctcaccttggctactctaataaaagggaactatgtgactcatctgttctggtgattggatatataatgaaaatattctgtgaggaagacttcgcaaggagatgtggttctgtcacttatgtgaccgttgtcgtgtatggagacgtgtatggagacgaggacaagccagcgcttataatgtttacagagatgtggttctgtgactgttgccgtgtactcaggctttatttcaacaagatttaaatatgagatgtagagtgattgatgtacatcacttcactaatcatgaaatctgtagaaggcgaaactactagccatatatgatatgcataatccgtgtggtaaacattatcaatatcacacaaattatttctaatgggttttgaattatcatagtgattgttgtcgttccgtttttatgtttcatacaaattttttactcccgtcgcaacgcacg

SEQ ID NO: 36830 - DNA, 3814 bp, Zea Mays
ctcttcgttagggtttcgcgcctcttctcaccgtctgcctactactagggatagacctccggcaaggcctccctcgcgccggcggcgtcagcagcggatatgggtgttccggcgttctaccgatggctggcggagaagtacccgatggtggtggtggacgtggtggaggaggagcccgtagagatcgagggcgtcaaggtgcccgtcgacacctccaagcccaaccccaacagcctcgagttcgacaacctctacctcgatatgaacggaatcatacacccctgcttccacccggaggacaggccctccccaacaacatttggtgaggttttccagtgcatgtttgattatatcgacagactattcgtcatggttcgcccccggaggcttttgtacatggccattgatggtgttgctcctcgtgctaagatgaaccagcagcgctcaagacgattcagggctgcaaaagatgcagctgatgcggctgcagaagaagaacggttacgtgaagagtttgaaagggaaggcagaaagcttcctccaaagcagcaatcacaaacatgtgattcaaatgttattactccagggactgaatttatggctgttttatcagttgctttgcagtattacatccatcgtagattgaattatgatcctggatggaaacaaattaaagttattttgtctgatgccaatgttcctggtgaaggggaacataaaatcatgtcatatattcgtggccaacggaatctgtctggttttaacccaaatacgcgccattgcctgtatggcctggacgcagatctgatcatgctagctttggcgacacatgaagtacacttctcaatactgagagaggtagtttatacacctggacagcaggataaatgcttcttgtgtggtcaggtgggacatctagcagcaaactgtgaaggaaaggtgaaaagaaaagctggggagtttgatgagaagggtggtgctattgttcccaagaagccctatcagttcttgaatatatggaccctgcgggaatatttagaatacgagttcagaatgccaaacccacctttcaagattgattttgaacgcattgttgatgatttcatcttcatgtgcttctttgttggcaacgattttcttccacatatgccgacgctagagatccgtgagggagctattaatttgctaatggcagtgtacaagaaggaatttccctcaatgggtggatatttaactgattcttgcacgcctgatctgagcagagttgagcacttcattcaagcagttggttcatatgaggacaaaatatttcagaaaagagcacgtttgcatcagcgtcaagcggaaaggataaaacgggaaaaagctcaagcaaagcggggtgatgatctggatccccatgttagggatgaccttattgtacctattcaacgttttcaagggtctcgcctagcctctggggctgtacctgtgccatatgagcagaatggatcccataaagacaataaagaaaggaatagtcgagctcggaaagctgcacgagtatcaacgtcaggttccagcattgcctcagccttagttgaagctgaaaatgacctcgaagcccaagaatgtgaaaacaaagaagaactgaagtcaatgcttaaagatgcacttcgcgagaaatctgatatttttaattctgacaatccagaggaggataaggtgaaacttggagaaccaggatggagggaaaggtactatgaagagaaatttggggcaagaacacccgagcagattgaagaaatacgcagagatgttgttctcaaatacacagaaggattgtgttgggtaatgcactactattatgaaggggtatgctcatggcaatggttctacccttatcattatgctccgtttgcttcggatctaagtggattgggccaacttaatattaaatttgaacttgggacaccattcaaaccttttgatcaacttatgggtgttttcccagctgcaagtgcccatgcgctaccgctacagtatcgacgattgatgaccgatccaaattcaccaataattgatttttatcctacagattttgaagtagatatgaatgggaagagatattcttggcaagggattgcaaaactaccgtttattgatgaagatcgtttgttggctgagataaaaaaagttgagcatactttgacgcctgaagaagcaaggagaaacagtatcattggaggaatgaatggatacataacactttgcagtggggatccatgccctcctatctttaggtctcctgtggacgggctggaggatattatggacaatcaagtgatatgttcaatctacaatcttccagaccatcataagcacatagcccagccgccagttggtgttatcatgcccaagaagattgttgaagccggtgatctgaaaccacctccagtgctgtggcatgaagatagtggcaggcggcctcatgataatagcaacaggcaaaacccatctggtgccatatcaggccgtcaacttggagaggcagctcaccgacttgtcataaacagcttaaatgctcagggtagggggcaacatagtggcacatcaatgccatatcgaactataatgaatggcttgcatcatctggatgtagcgtcccctgtcagcaatcaaggcatgcgtccacaagtggggcagtctgccggacctcctggttggtatgttcctaggggtagtgtatcaaatggtcaaccaccagcttatgcatcatcaggatcaggtcattatcagtatgaaagttcggggcattcacaatatgaacaaggtaaccatggaaggcaacaatctcacccatatgcaagagatggcttccatgatacacgaggaagggttccacctgcatatgggtaccagcagagcaacatgtatccatcgggtcctggattgtatgggcaacctccatcagcatatcctggggttcatggtggaggctaccaaccccctccatatggcggaggccagcagtggcagcaacaatcatatagttcgtatgccgtgcgaggcccctacggaggcaggccaccacccacaagggctgattcagggtcacagcaaccacagaaccgttatggtgctttagacagaagtaacaaccggaggccttcatctggatacagaagataatagtttgtgacccagtttatgttataactcaaagtttgttatcagtaaagcttcgagtaactcagctaaagcataggcggaatagtctgctaagtcttgtgaccttcaagcagttagggggtggccatcaaagatattgggaggcaaaatttgtatgctagtgcagactttcaggtactagcggttttgatcgccattgaagcagctaggtttgcggcatctcagaggttttgtgaagcaagatttgtatactactgttatcaacgggccatcaggtactggtggctggtcgccattctttatctgtagctgccatttgtttagaagatgtcataaacggccctggggtttaaataggtcccattgagaatatttttgaaggacgtttactctgagacttgacaagttttgggggcattttgatatcagataaatgtatgcaggagtgcagttttgatgatgtgtgtattccaagtcattaattaaagtgtgacgtgtctattgccaggcgaggaaggaaacgttacgctttgcacttatcccgttccaaattacaagtgatttcaagaaaaaaaattcagctttcttggagagtcctaaattactacctccattctcaaatattatttgttgttcgctaatt

SEQ ID NO: 36831 - DNA, 3899 bp, Zea Mays
ctgcccatggccatcccggaggacctagaggggacctcgggcgatggcggggtgacgaatcgcgggagtagagggcggcgaaaaggcgcggcgaaggggcgcgggaggggcaggccgcggagcgccgacagatcctttccgccgccggcgatggctggggtggcggtcggggacagggtgctcagggagaggaggcacacgaccaacgttttctgcgagcgcgacacggatgttgacgatgagtgggctaatttctatgcggaaaggttttgttctcaaatttggccctgtataaatcaaaacctcaatgcccttagtaaatttgtttttgaccttgtttacttgcaactaccacttgtgcagcgattatccattcgtgtaatttactcctctcttgatgatgttgagacagttaggtccaaggactcaaggagtggcgatgttttacagactgcaaaaaagaggaagaagggaggtgcagggaaggtttctgtcacaaaaaggtcgaaaagagagggtgaagaacaaaagaaggcatcaccctccaaggataaagattgtgctgaaactaatgggaaaaggaagatgttgactggggataatgccctgatgtgccaccagtgccagaggaatgataaagggagggtggtctggtgtaattcatgcagaaataagcgcttctgtgtgccatgcattgaaagatggtatcctaacttgtcagaagacgaatttgctgcaaaatgcccatattgtcgcaagaactgtaattgcaaaggatgccttagaatgagaggggttgaagagcagcctccaaagaaggaaatttctgaagaaaatcaaatctcttatgcttgcaatgttgtgcgcttgttgcttccctggttgagaaaactgcgacaggagcagatggaggagaagaaattggaggctaaaataaaaggtgttttggtgaatgagatgaagttggaacaagctgaatataatctagatgagcgtgtctactgcaataattgcaaaacttctatagttgattttcacagaagctgcaagtactgcttttatgatctgtgccttgactgctgtgtggagatccgcagaggtgagattcctggaggagaagagataatgagagtaaagcctgaagatagaggccgagcatatctttttggtactactaactcaaaggatgggagtaaaaggttctccatgaggaggcacagctcatccctggagaatgagccttccaatgtagtaggttctagtgagggggcaaataactctctggagctgtggaaagcagaaagtgatggtagcataccttgcccaccaaaggagctaggaggctgtggcggttcgattttggatctcaagtgtttttttccagaaaagatgctttcaaatttagaagaacgagctgacagaattatgaggagcgaagtatttgcaaaagcagtagccaaaagaagtgaccagtgcccttgttatgaccattcaggaaacataagaactcaggacgtgcgagagactgcaaatacgaaaggctcaagtgataaccatctctactgcccagttgccactgctatcaaggaggatgacttggcgcactttcagatgcactggacaaaaggcgaaccagttattgtttctgatgttctgcatttgacttctggtctaagttgggaaccattagttatgtggcgggcattgcgagagaaaaagactaatggtgacgtagaagatgagcactttgctgtcagggcattagattgccttgattggtgtgaggtcaggagttatatttcattgaatgtttgagtgcatcctgtgaccttttatatttatgtatatatttaaatgtttccgtttgtattcctcttagatgtgctgttacttatttttgtagacttccctaggtgcatttagagagatgttcatttccctagctgatttttgtagacttccctaggtccctttgtgctctgctgcatatctttgtcccatgctgattttcatggtcgtacaactcttctagaagatttctttattaccatgacaagaaacaggacatgctctacaagtaaagtacaatgttgaattatcaatggatttgaattctatttcaattttgatggaattgtgttacctgtatgcatgcagatagactgctcacagctctgttgtcaacagaacgcatcacatgacacactggcctgagatgcttaagctaaaggactggccgccatctagttcttttgatcagagattgcctcgccatggtgctgagtttatcagtgcattgccatttcctgagtacactgatcctcgatatggtccgctgaatcttacagtcaagctacctgatggtgcattgaagccagatcttggaccaaaaacttacatcgcttatggattttaccaagagttaggcaggggtgattctgtgaccaagcttcactgtgacatgtctgatgcggtaaatatattgacacacacagcacaagtgccctatgcgcgttatcaacttgagaagatagaggaaaccagaaagaaaatgaaagaacaagatcttcaggaactttatggtgtttcagaactaaacctatcatcaccttttactgattccaggaatataagtgctgatgaaatgtcaaagacctcatgtaactatggtttggacgtcaatgatgtaccacctgttaataatgaatctgaggtacaaagtggggcaggccagtgttcagattacattgacaaggatagaagttatgctgggatgcataacggggagagaaccggtggtgccttatgggatattttccgaagagaagattctgacaagatacaagattatcttaggaaacatgccacggaattccggcacatcttttgcaatcctgtgaagcaggttattcacccaattcacgatcagactttctacttaaccgaggagcataagagaaagctcaaggaagaatatggtgttgaaccctggacgtttgagcagaagcttggtgaagcggttttcattcctgctggatgtcctcaccaagtgaggaacttgaagtcttgcattaaggttgcgatggactttgtctccccagaaagcgtcaacgagtgcatgaaactgactggagagtttaggcggcttccacctgatcacagggctaaagaggataagctggagatcaagaagattgctcttcatgctctgaaccaagtagtaaatttcttggatccttcctcggagtggtcgaagagttggtttgcccaactcaagaacaaaaaaaaggctggagctgaagaacaggagaagcctaaaaggaagcgtggccgcccatgtcgcaagtccaacgatgaagctgctggcgataggcacagaaagaagggcggccgccaaagaggtcggaagaggggatacggcaagtccaaagatggcgctggcgctgttgatgtgaagcctcctaaaaggcagcgcaatctcctgaaaggctctggcaatcgtgtaggtggttgattgtttcactgctgactgggaagatggaaggcgtaagggctgtaccgacccaaccttgacgtggttattttggtaccaggttgtaagtgtagactctagattgtagaatagaccaggcatttcgtcacccctgggcgccattatggcgtcttgcttttgttcatatgtggcgattgccggttgacaccgttttggaagaataatatgctagatgctcgttgtaccagactcttcatgtagcgggctatggtgaattgctgttcagcatgtctgatgctgatgttggtaattgacctgaatagatgtggtcatttgaactctctggattctgattttacatatccaatccattggctgaggctgagcattcttagttgaaaaacga

SEQ ID NO: 36832 - DNA, 3920 bp, Zea Mays
ggttgcattcggaccgtccgtagcgcccagctgacctctaaacccttgtctccctcccccaagtgaatccgtgttgtacctctcgccgccgccgtaccatcgcccgaaatcctagccccattcaccgcctcgctcggaatccaagccccattcggcgccgccgcgaccgccggacaggaggtcatggacgacgtgtgcgaggggaaggacttctccttcccggagcaggaggagcgggtactcgagctgtgggcgaagctcgacgccttccacgagcagctccggcgcacggagggcggtgaggagttcgtcttctatgacggcccccccttcgccactggtctgccccactacggccacatactcgccggcaccatcaaggacgtggtcacccggcaccagtcgatgcggggccgccatgtctcgcgacggttcgggtgggactgtcacggcctccccgtcgagtttgagatcgacaagctgctcggcatcaccaaccggcagcaggtgttcgacctcggcatcggcaagtacaacgagacgtgccgcagcatcgtcaccaagtacgtctctgagtgggaggccatggtcacacgtacggggaggtggattgacttcaagaacgactacaagaccatggacctcaacttcatggagagcgtctggtgggtgtttgcgcagctctgggagaaggacctcgtctataagggcttcaaggtcatgccttacagcacaggatgcaaaactgcactgtcaaactttgaggcagcactggactataggactgttcctgacccagcggtgatggtatccttccctattgttggtgatatggacaatgcagcttttgttgcatggactacaacaccctggacacttccaagtaacctagcgctgtgtatcaatgccaatctcatgtatgcaaaggttagagacaagtcaaatggaaaagtatatgttattgcagaatctaggcttgggcagttaccagttaaggccaaagcttcaggaaagaagcaggcaccttcaaagggaagcaatgctgaagctgctcaggatggtttggataaggaatcatatgagctgctggtaaagattcctgggccatatttggttggcttaaaatatactcccctatttgattttttcattgaactacaagagactgcctttagagtgattgcggataactatgtcaccgatgatagtggaactggcgttgtccattgtgctcctgcatttggtgaagacgaccatcgtgtttgccttgctgctgggatatttgagactgctggacttgttgtcgctgttgatgatgatgggtgctttattgaaaaaatatctgattttaaagggcgatatgtcaaagaagctgacaaggatatcatcagtgctgttaaggataaaggaagacttgttagtaaagggagcattgaacactcttatccattttgttggcgatcgggtactcctcttatttatcgggctgttccaagctggtttgtcaaggttgagaagattaaagaccaattgctggaatgtaacaaggagacttactgggtgcctgactatgttaaggaaaaaagatttcacaactggcttgaaggtgcacgtgattgggccattagcagaagtagattctggggtactccacttccactgtggatgagtcaagatcgtaaagaaattgttgttatggattctatcgaaaagcttgaaaaattatctggagtcaaggtcactgatcttcaccgacactatgttgatgatattacaattccctctaagaggggacccaagtttgggacgctcaaacgtgttgatgatgtttttgactgctggtttgagagtggatcaatgccatatgcctacattcactatccatttgagaatcgagagctatttgaaaagaattttcctgggaattttgtggcagagggtttggatcaaacccgtggatggttttatactctgatggttctctcgacggcactgtttgggaagcctgcatttaagaatcttatatgcaatggccttgtcttggctgaggatggtaagaaaatgagtaagagtaaaaagaactatccttcaccaaaagatctcattgacgagtttggagcggattctctgcgtctatatttggtaaactctccagttgtacgtgcagagtctctacgattcaaacgtactggtgtctttgctgttgtgaaagatgtcttcctcccatggtataatgcgtacagattctttgtccaaaatgcaaagagactggaagtcgagggtcttgcctcattttctccgatggaacaagcggtacttctgaagtcatccaatgtgttggatcactggataaactcagcaactgaaagtctagttagctttgttcaccaggagatggatgcatatcgtctttacacggttgtgccatatttggtaaaatacattgactatcttactaacatatatgtgcgcttgaaccgcaaacggttcaaaggacgtactggagaagaagactgcagaatttctctctcaacactctaccatgttctcgtaacaacttgcgtggtgatggctccatttacaccattctttactgaagttctttatcaaaatttgcggaaggtatcaagtaaatctgaggagagcattcacttctgcaagttcccttccacaactgagagatgagcgtgttgagcaaagtgtaaataggatggtgaccatcattgatcttgcacgtaatattcgtgagcggcataacaaagctctcaaaacaccactcaaggagatggtggttgtgcatccagacaatgactttcttgaagacataactggtaaactaaaagagtatgtcatggaggaaatcaatgttaagactgtcactccatgcaatgaccccttgatgtatgcttctctgcgagctgaacctaatttcagtgtgctgggaaaaagacttggaaaggacatgggcaaagtatcaaatgtggtgaagaagatgactcaggaacagatcttagacttcgaaaaaagtggagagatttcattcttcggtcattgcttgaagctagatgatattaaggttgtccgacaattcaagcgtcctgaaaacgtgtcggagaaggagattgatgctgcaggagatggcgacgttttagtcattttagatctacgagctgaccagtcattgtttgaagctggagtggctcgagaggttgtgaacaggatccaaaaattacggaagactgctcagcttgaacctgctgatccagttgatgtgtattacgaatctgtgggcagtgacaaaaacacactggaagagattttgaagtcacaggatcagtatattagggacgcacttggttcaccaattatgccaaaagaaatggcaccaacagatgatgtaatacttggcgaggagtctcacaatgtacatgacatgtcatttgtcatatgcattgcaaggtccacccctattcttgcaccagatcttctttctcatgcctcaggcaaaagcaatcatgtggaggcgttgagagtatatcttctgtcaaggtctctttccagattgaagaaccagttccaagctggaaagggcatgattacagttgactgcatcgaaggttatccaccggtcagtttactgctaggaaagcacgttttcctaagtgcaggggatttttatctggctagtcgatcctagtttcgtttgctgcatcccaattttgagctgcttcacccattgttttgccgcaatcagcttaaaacagcttggttccatttatgcatctcaccaaagtcatgtattcagtaaaggtgaaagtctcaatgtatgctaatatgctatagcatgacatgtaagctaagattttcaaatacctggctatgggttcccataggtgatagcatgtttgtttgcaatctct

SEQ ID NO: 36833 - DNA, 1298 bp, Zea Mays
attggcatctatctgtttctccgtatgcagttgcagtacattggctacagtgtcacggactcgcggtgagccccacggaggaacgggctacccaaactcgccggattcctacctgtcccggccaacccacctcgccgaaccactccaccaaccacgaacctgaaaccctagccacgcccatgagcgacgacgcgaccgccgccgcgccctcttcgccgtcgacctccccttccccatcctctgcttcctcatcaggcgcctccccgtcgccttcctccccgcgcaccaagcgccgccgcaccgaccggtacgctctcggtttcgagttcgccccgcgactcgcgccctacgaactccctgaggaaccgctccccgacaagcacaagcgctcctggcccaactggacggagcgctccaccttggctctcctcgacgcctggggcgacagcttcgtccgcgcggggcgcagcatcatccgcgccgacgagtggctcgaggtcgcccgcctcgtgtgcgccgccgtgggccgtcccgcggggtatttctctgatgcgcagtgccgcaaccgagtggacacgcttaggaagaagtttaagaaggagagggagagagcgcgccgtgccgcgcgccgctccggtccctccccttccaaatgggtttattacgacaagatggtggcaattctgtgcccgaccccgcctccgctgccgaccctgcctccgcctgcccgtccccctccgctgcctctccagttgctgcctctggtcgcaaagcgccgccgcgacaggcagccagcgcggcgctttcagtgggggatgaaagctcctgagcgtcttcttggtggtgccggagacgtcgtaggtcccagggtttcagggtcaggtgcgaagttgggtgaacttggaccgcagaaaaatagtgctgttcaagggaagcggaatggtttcatggccctcacagagtcaattcagaagtttgaggaggcttttgcgaggatggagagtagcaagaggcagcacatggtgaaggtggagcaaatgaggagggatttgcaaagggacctagatgcaaagtggagggagatattggagaaggcgcaagcggagattggtcgccttagtaatgaggatggggatgaacatgatgtggacgaagatggggatgttggcgatggtaagagattggagggtggtgatgagcaaaacaatggtgctatggatgcttctccttagcatatagcctagatgcttacaaaatgagggcatgggcgtctcccaaacattatatgttctgtatca

SEQ ID NO: 36834 - DNA, 769 bp, Zea Mays
aaaaaaaagaagagaagctaagagcttgggagttcagctccaagccgttcgacgagagagacgaccgaacccggccggaaggggaggagcgggaggaccgcctgcgccgtcggtgagttgctcaagtcagcaaactgaacccgtccggattcgtgcgccgccgagcacccctcgacgccagcggcgatggcagccgacgacgtgcgcgagctcctcctctccaccacagccgacgcctctgacccgtccacgcccctctcagcgcccgacctccgcctcctcatcgaccgcctacgcttttgctccgaccgcctgaacgcctcggccctctccttcgctgcctctaaccgcggggtcctcgctaatgctctcctccgcgcagcctccgccgccgattcctccgcctccctcgagtcttccctcgactccgcgcttgccccgctcgcctcctggcccgacctctccgacctcagggcccttgccgaccgcctcctcgctgcccgccgcgagctcgctgagcgccaggagcacctagccgctgcctccatgattgcctcgctttcctcccgcctccgcgaggcccgtgccgcagcgagcccccttgacgcggccgctgccatcgctgaactcaagaccctcctgatcgatctcgagcgatctggatctggtcaagacgacccggtcgtatttaggctcctcaggagcgactgggagcaacttgtcgatgagctgcaagttaggctttcgaagaatgtggaggagtgtgtgg

SEQ ID NO: 36835 - DNA, 3687 bp, Zea Mays
cgagaagagaagtgagaacccaaagccagcaaagccagagcgagcgagggagcaaggaggaagacgcaccaggacattgacgagccgcggtccgcagcagcagctcccagcttcatcccccgacccggagccccagcactggtgcagcaggctcgctcgccgccgccgccgccgcgtgaagtgaggcgcgcccccccgcggacgctgacgctgggacccgcgcctgctgggagtgggcccgccccattgatgggcgccggcaggcgccggcggcgagggaaagcgtgaggacgaggagggccggcgggctccgcacgaagcaggccgggcgagcctgccgccgcgccgcctagggagggcgccgcccgtctttgcttgtttgctcgcaccgtcgcacgtcctgttccagtaccaggccagagagaaggggggcgggactgcaggcggcgggccgcggaggagctagggttctctctgttctcactctccctgcgtcgccgggatggcggttggggacgcgctgcgccggctctgcgaggaggtcggctggtcctacgccgtcttctggaaggccatcggcgccgccgaccctgtgcatttggtgtgggaggacggttgctgcggccacgtgtcatgctccgccgggtctgaggctcctgaagctgggtgcgagctgggcaccagtgtgtgcacgcttgttaggaaggtcatgacctcgcaaattcatgttgttggtgagggtaccattggccgtgctgctttcaccggaaatcatcaatggattgtccatgatcctgccaatgatcacaatctcagacccgaggtttctgctgagatgaatcatcagtttgcagctggcattcagactattgcaattattcccgtgttaccacgaggtgtactgcagctaggtgcgacaagtgtggtaatggaaaataccaaccttgtgctccagtataagaacctgtgttctcagctaaacaatcggtcgagtatggcttcatcgtcatctgttaaaaatgatttgaaccagaaaattcagtcacgccctttgaatggcctcacgagtatacaccctgcagatacacgctcaaagttttttagtggacccccattgacatatcaacaatgttatggtcctgatggcagaactgtgtctagtagtacattggcaaacatgggcagtaatgcttcaatgcttatggttgcacaaagaaatggccaagtgggtaaagaacacattgtatatgctcctgacatgaggttcagaccacaaaacccttactgtgacaggagagttgggagtaacacccaaaatagtgttgtgagctctggttttatctcgtctatctcagcatcaatggaaaggcatccattaatgaccaacaatcgacagttagaacaaggaaacactggagaaccatcagattccagaagtgttctcttgaaatctctcgcataccataaccctttagtgcatgaaaacacaaacatgactttgttgcatggaagaggccaggtgccaggctttgttaatggtcatgggggttttgattttctcccagaaggtactagagtagtcaagagtaacctgtatggcagcacaacaaatcaaattttagatcaaatatgcagttctacttctgggatgaaagggcacggaccaactatttcatataaaatcccccaacctacccaatttgttggaaaaacggagagttccaagagagagacatgtcaagcttctgttgctctgttgtctgactctgatattcaggtttctagtgtcttgaaaacagccatttcccaagagaatcagacgagtagatctgatcttattggctcaaaaaaggctaatgaagtgcatgatcctactgatgcaattgttcaagctgtcaagaatatggatcgccgcagactcccagacatatctaacgagagatcacccccattccttatggatcctgctgcagaaagtgatttgtttgacatgtttggttctgaatttcatcatttgtgtcacaatgtggataatgatcttacctggaaagctgcaaaacctgagaattcaaatagagatgtacctgaattctctgatcatcttggttcctctccagccttcaattcagtggatgacgagttcccttattctgggatcttctcactaactgataccgaccaactgttggatgcggttgtctctaatgccaatcctggtggcaagcagatatctggtgacagcgcttcttgcaagacttcagtgacagatattcctagcacttcgtattgtcgcttaaaagagccaaagcagtctgaatcatctgctcctcctttgctaatcaagaatgagttagctgtttcaaattttgttaaacatccatctttcccagaaaaggcagcggatggctgtctttctcaaaataatgcaatacagaaatctcagatacgcctctggattgagagcggacagaacttgaaatgtgaaagtgcctcagcctcaaacagcaagggcgttgatacatcaagcaaggctagtcgaaagaggtctcgaccaggagagaatcctaagccacgaccaaaggaccgccagcttattcaggatcgtataaaggagctccgggaactcgtacctaatggggcaaagtgtagcattgatgccttgttggagaagaccattaagcacatggttttcttgcaaagtgtgacaaagcatgcagataacctcaaggactcaaatgaatctaagtatggataaactccaaacagattcttggtggtgagaatggtccattaaaagactacttcgaaggtggtgcgacttgggcctttgatgttggtagtcaatctatgacgtgtccaatcattgttgaggatcttgatcggcctcgtcagatgcttgtggagatgctttgtgaggatagaggtatcttcttggagatagctgactttattaaaggactcggattaaccatcttaaggggcgtcatggaagcacgcaaaaataaaatctgggcacggttcactgttgaggccaacagggatgtgactagaatggaaatcttcctttccctaatgcgcttgctggaaccgagttatgatggcggtggagcaggagagaatcctaataacaacataaaaatgccccttggaattgtgcagtatcccgttatccctgtgtcaggtcatcttaggtgagccagctgcccagccagcacaaagatcacaggacaggaggcatctttgaaatgctaagagcgggaggtcgacccacttctgccatgactagcattatcaacccaggacgagcgggaatctcgtggcatgcagtgcatcgtccctgcagtgtgcattcggaaagcctaacagtagaggggaatggagacatggatagttggttcggcgggtgatcattagacgatcgatgttttgactgtataatcttaactgttgctgatgcttttgccttttgttcttctgcatattagtgaattttgttatgttcttctgctgaatggaaattctgagttgaattgtagaccttgttcagttgtttctggtactagctcgaagtcggagctctctttttcttaccgttcctgtgtgattactaatgagaaactagttttactgtttacagttaaggttctctttgttctcccaaattatcgtggacctattgaaagcatc

SEQ ID NO: 36836 - DNA, 2355 bp, Zea Mays
cgacagtcaaataacaagggctaagaaaatattttgctcagtctgttgaaagtgcccttaaacaaaaataagtatctctgtagacaacaatgcataatgaaatcaaatcgaagctttcattcttaaaggcttagcagcacattcagaagtatcctactcaaatagatagaagcaaagcataataagcacattcagggaaccaatttggtcttgatatttttgaaccagtagttgggatgcagagaaccaatttggtccaccggaaccactaacaggggaagatgctccagccaactttctagacaaataaagatcagccatgtcgtcgtcatcatctaataattacggaagcacatctctcacctggcaaatagagaacagttcccagccaactttctagacaaataaagatcagccatgtcgtcgttatcatctaataattgttcaagctcatatctcacctggcaaatagagaacagtttgtgattcctatcacaagaaaaacggaagaactgatccacaaattctacatgtctctctatgtttcatgcatgattcagtcaacctcaccaatcctgtctcgccctctcggcgtcttttgcttccccgggccacatatctgtccatcatggccgacaccgccgtcgccacaaccacggtctgctccatgtgcagtgacgtcggcttcaccaagaagctcttccgacgagggtgggacgcaagtccgatcgcgcttgcagaagggcgtctagttacacgagggcgacaggggaggccgtggcaaggaggaggcacacgaggccacgacgaggaggaggagcggggcggctagccaccgcaacggggatccatggtgcacgcaacagggcgtagcagacgggtggatttgggactgaaggcgagcccatggcgttggcggctaggggtttagggtttgggtgttcgtcgtggcacagccgcacaggtggtttacgtggaatgcttggagccttggactgcggactcagtcagtcactcacgctccgttggcgggaagcagggtttcatttcccgcgcttttgcccgttctcccgccaggttgctccgcctataggactccgctcctttgagctcccctcccctcgcatcgcatcgcatcgatcctcccatctgcgcacccgcaagcctattcgccgcacctcctcaggtgaccgggaagatgatgccgttgagccaaaccgacttctcgccgtcgcagttcacctcctcccagaatgccgccgccgactccaccacgccttccaagatgcgcggcgcgtccagcaccatgccgctcaccgtgaagcaggtcgtcgacgcgcagcagtctggcacgggcgagaagggcgctccgttcatcgtcaatggcgtcgagatggctaacattcgacttgtggggatggtcaatgccaaggtggagcggacgaccgatgtgaccttcacgctcgacgatggcaccggccgcctcgatttcatcagatgggtgaatgatgcttcagattcttttgaaactgctgctattcagaatggtatgtacattgcggtcattggaagcctcaagggactgcaagagaggaagcgtgctactgctttctcaatcaggcctataaccgatttcaatgaggttacgctgcatttcattcagtgtgttcggatgcatatagagaacactgaattaaaggctggcagtcctgcacgaatcaattcttctatgggagtgtcattctcaaatggattcagtgaatcaagcacaccgacatctttgaaatccagtcccgcaccggtgaccagcgggtcatccgatactgatctgcacacgcaggtcctgaatttttttaatgaaccagcgaacctcgagagtgagcatggggtgcacgttgatgaagtactcaagcggttcaaacttttgccgaagaagcagatcacggatgctattgattacaatatggactcggggcgtctttactcaacaattgatgaattccactacaaggcaacttaaccgatttgaaggctgatcgcaatggcaggaccgagatgtcaaatttacaaggaccctgagagagggaggtgtattaacgtgaaccaaaagcatcaaactttttgatctagaaaacaaatactatatctaggtttgaaacaacataaatctacttgtatttttttcaaagaagataggaggagtaggaggtgctatgcactgctcctcgtcgttgttggactgtagcttgttggcccataaagatagatagcgtgcagcagtgaaatggcagaagctaccactcctccctttctttcccttcattcccacattctgctgcctggtccgacccttca

SEQ ID NO: 36837 - DNA, 395 bp, Zea Mays
tgcgatcgtctaggaatctcatgatggtgccataggatgtatactctttgtccttagcacttcctttttctttcacttttagagtttatgctccttatgtcttaacaattactgaacaaacactgagagcaaactttgttagtaactgtcacacctgggttttaggggtccaaaacccgggcatgaaataacaccaggtgtgctgggaccaagtctcacacatatgatgaatagtggtacagaaacgaatgtcacatctttactatgtagtatgagttctatacaaaataaataaataaatacatcataaggagacaacgatccagcaacccaaagttgactggtcggcctagacctctcatgaactcgtcacagcatcctccatgcgcctcatc

SEQ ID NO: 36838 - DNA, 1439 bp, Zea Mays
gtacaaggactatcattttaactcttggtgtagtcataatcacttcgattggtttgtttccttacaacatttattcataccaaattcctcaaaataatgctatcccaaagactctggtttcttgaaccattctgcagtttttgtctcactacttgtatctacgttttttatctttattatttgacctgtttcaaactatcagtccatctcaatctatattagttcttgaaggaatagtaaatggttctattgatggaaattggaattgagaatacatgccttgacatatataagaacctgtttgttgtttgatgaactaggaaataactaaaaattatttggacagagacatcacaaatggatctgatcacaaatcacaaatgtgacaagcttgctaaggtgaaactgctgaagatgttgtatgactactatgccgcgggcacatgacatcaattgactcaaggagaaaagagaggcgtcatccaaaattctgagtttgttcgctctattagagtccagaggcggtactgggcgaggagctatgctggatggataaggtttaggagagcacaaccaaatgcagcccattacgctccttccctttcatctgtctgcgcgccttcactttcatctggcactgggagttcctgtacatagacttgtaaaagctgccgactcagtttcggtatgcctatctaaagggttaggcgcacccatcagatcagttgttgttggttcagaggccttcatcgacaaggctagaattcttaggaagaccctaggcggtgggatgagacaggttggatttctttgtgctgctgcttatgttgctgttcgtgacaccgtgggaaagcttgcggatgatcacaggaaggctaaagccttggcagagggcctgacgaaaattaaacagttcacggtggattcatcttcggtcgagaccaatatggtgttcttcgatatcgtggatccacacatttcaccgagcaagctatgccaagtcttggaacaacgcaatgttcttgcaatgccagcaagttcaaaaagtcgctatttcgcaagatcgtcgtggccctattgggaacggagatgctcttaatgaagtaggaggaccgaccaatccaactagcaacagcaggcagggagtggatgcgcctgctagaagagtgctagctccgcgcatacgctcgctcgacaaacgtgtgttgttaactattgtatatagtgttataattactgtcctttattcttgatgtttgttttgtagttgaaactcacattgttttttcatttccatctcgattttgtatgccgtgaccacgaaagactaaatgttttcttgcggtttctaaaaatatagctctctattgttgtgattgtgtgccgtcgcatcgcacgggcaatgacctagttctaaatgaattatgtttgtatgctgc

SEQ ID NO: 36839 - DNA, 1049 bp, Zea Mays
agaaaaatggttctttcttagtgtgacacggacacacttgctcgtccacatcccttcctccagccaccgacctcccaaggatgcgctcttgccgccggcctcccaaggatgcgctcttgccgcccctcttctcgcgccgccgctgccatcgccatgtcgaagcgcgctacgtacgctccgtcctccattcgctcccgacgatccgactcgttcgtttgttgctcctttcgcttactgccagacctagccggcttctgcgttgaaatggatgaactgccgcggtctcatacattttctgggatccagaaatttcggacattgtgatcttctcggccccccaggacttcagagtatggatctcttggaaaggcatcgcgcaagagtgatgtgttcagctttggaatcatgctttttgaagtcttcactgggaagaggcccacagatacgatgtttgagggagaactgagcattaggcagtgggttcaacaagcatttccatctcagcttgacactgtcgtggacagccagctgctgcaggatgccatttcttcttcagccaacctgaacgaggttttgcccctaatatttgagctcggtttgctctgcacgactgattcacctaaccaaaggatgtcaatgagtgatgtagtagtgaccctgaagaagatcaaaatgaactacaccaaatttggcatcagcaaggacacaatgtccttccctgcaattgatcacgcttaattctacatgtctagtttcttcggttctgcagtggaacaactgcatcagctaccttttactgtatttttttttttacaaaagttgtttcttggataactcttagtaatatatgggcatattactattgtcaggtgtgaaataagtttctgtaatttaaattaaaagaaaaggttgcgtgacattcatgtgcctgaacagagatgtcataattttatagtttgatcttttgtggtccattacgacccttaaacgttaagggattgttttgttcttacatgttcctattttgtaaaattatttgtggcacactg

SEQ ID NO: 36840 - DNA, 1819 bp, Zea Mays
tgatgacatttggaatctgattacttctttacaccattgtgacattagttgactgtcatttgttgctttttatttgagttgcctggattgaattagtctcaggacagacataggataggacctaagatcgcattagcaaaagctaaaatggtctaggattagaagtgttataccaaatcttccatgaactccagatagcccagagtcttttataatgccacacacaaagctttcatgtgttggaaaaaaatcataggtcaaccgaactaagttatcacaacatttactcaaaccatatcagaaggcacatatgcttacataaatttcattttagttgataccaccggtcctgggtttcatgcttacaactagaaaagggttctattttttcagattatgaacataccatggaaacatgaagcagggttttacttttatatatgctagcaattgttatctgttgtgttgctttacatttctgttacttactcttttgcaggtaaaatatacagactgtggagttagtcctcaggatctacatcatgtattcacaaagtttgctcatcctcaaagtggaggaaaccgagggtttaatggtagtggtcttggccttgccatatgcaagagccatcccggtttctaggattccatgtcgtcccatgagaatataacgaaggaaacaagaagcacattatagaagtagcaagatcacagtacatatcagcatgacattcatgaagccatcccggtaaacgagagccctggaaataacaggaattaattcaggaaagtacacgagcaagcacccgaggtcaatgagcttacctccattgacaatggagataggaaggaatatcatgaagagaaatgaaaggagagattaaaatcaaagggattgagctacaggagagttgcagtctgtcgttcttttccatgggtgtgattgagactgaaacgatgggtaccagagtgaaggagtcgaagacagttttagtagagaaagagctcgaactgatcgacgagcctcagattcaagagagccctccagttcgtgcattgttgcatgatgaggtggattttgctgaatcgtcacttgctattagagaatctgacattcccgtgaagaaggtgctgataatcgtgacaatcacttttgtttggccacaacagccatattacttgaagcccatgttttgaaagctgtattggcacttcttctatggttagtggtggaatagcccgaacagtcctatgaaacagcaaaaaatctgttacagtccacttaggtggaagaggagtcactacttatagaaaaagcttgttcctagaggtggtttctcccggcaatgcagaatcttgaagcacgtctaaagtggcttgatgatagttctaaatttcaactccctgtcattaccaggtgccagataggctgctggtcgattccatcctgaacaagttgcgccaaagattacatgaatattgcgtgccgagatctgtcttcagtaatgcgatgccatcctgaacaagttgcagcgacaattaggataggattttcccacgctttttagtcttgtgtattccttttatgctcttcatctttttttctcattatatccaccaattagatagtcatgtagactttcttttaggcgcttttgttttttatactttgtgttaccttgcttttgttttcatactttgtgttaccttacagatgtaaaaacgctcccctcccgtacattgcactatttatgaggaaaggtaaaatagcgtcatttagctttttcagtcgaggaaatgcactaatattttgtcgaat

SEQ ID NO: 36841 - DNA, 282 bp, Zea Mays
caccatggccgagctggcactgggtcaccggagtccgagcgggcagtgtcagggccgagtgcttgtaaaagagtggtagccgaggggttttagcgaagatgtcagagacacaagcaacagtggctgggagctcggattattttaaccagagcgcaaggtcctttgggcaagatggccaaagcgggcgcgggctcccgggtttgggccagctttgcctggttgttgggtcgcgccagcaatttggggcccaacactgttgacagccttgtcttttcttttatc

SEQ ID NO: 36842 - DNA, 2341 bp, Zea Mays
tttcgttggactctccgccgggcgccggagaggcggggaccggcgagtccaccatcccattcccgtaccacccgcttcttccaactccaactctccaaggcgctgtgctggctgctggcctgctgctaccgactgccgcaactgctccgcatcccggccttgattagcagcagttacgcccgcgcaggacagcggccttgattagcgaagtattcctttgccctacctctctccctaccccgttccgacgcggcggccgttgagcacctgcccggaagctatagcttcggccatggcccaagatgccggcgacggcggtggggaactcccgccgcccgtaaagaagaagtcaccggcggaggaggaggccgagaagaggaggaagaagcttacacctgggagcttaatgaagggcattatacggtctgggagcggtgatgccacccctgcagagggcgatcaggttatacttcattgcactactcggacaattgatggtatcgttgtaaattctacaagaagggagcatggaggtaaaggaatcccactcagatttgttttagggaagagcaagatgatcctaggctttgctgaaggcttcccaacaatgctgaagggtgaaattgctatgttcaaaatgcagcctaaaattcactacgctgaggacgattgtccagttgcaactccagatggctttccgaaggatgatgaacttcaatttgagattgaaatgttggatttctttaaagccaaggttgtggcagatgatttaggggttgtaaagaagatagttgaagaagggaagggatgggaaacacctagagagccatatgaaataacagcacggataactgcaagaacagcagatggaaaagaaattattccgagtaaagaagaggcatatttcttcactattggtaaatctgaggtacctaaagggcttgagatgggcatcggaacaatgtcacacaaggaaaaggcaattatttttgtcagtagtacttatttgacgaagtcctcactaatgccacagcttgaaggccttgaagaagttcatttttacattgaactggttcagtttatccaggtgaatttccaatggactgccctcttcatgatagcctattaagagtgcattataagggcatgctccttgatgaaccaaagtcagttttttatgatacacgtgccgataatgatggtgaaccgttggaattctgttctggagaaggcttggtaccagagggttttgaaatgtgtgttcggctaatgcttcctggtgaaaaatctattgtcacctgcccaccagattttgcatatgataagttcccaaggccagcaaatgttcctgaaggagctcatgttcagtgggaaattgaactacttggattcgaaatgcccaaggattggactggcttaacttttgaagaaatcatggatgaggcggacaaaataaagaacacgggtaacagactgtttaaagaaggaaaattcgaacttgcaaaggcgaaatatgataaggtgcttagggaatataaccacgtgcatcctcatgatgatgaagagggaaaaatctttgctaattcaagaagttccctacatctaaatgtagccttttgctaccagaagatgggcgaatacagaaaatccattgaaacatgcaataaggtgctggacgcaaatcccgtgcatgtgaaagctctttaccgccgaggaacgtccttcatgttacttggggacttcaacgatgcaaggaatgattttgagaagatgattaccattgacaagtcatcagaacaggacgctacagctgccctccttaaacttaagcagaaggaacaggaagccgaaaagaaggcgaggaagcagttcaaaggactctttgacaagaagccaggagagatatccgaagttggtgtagaatcagacggtggaaaggatgcaggtgatgcaagagtcaatggtggtgaggcaacgagtgctgatagaggtgtaaacacaaatgacagtccgaccagcgaatcagagtacgccttcgaggaagagaggcccgggcttcttggcagcttgtggccctctgcgaggatgatcttctcgtctcttggcatgaacaggtgcgcgatactctgaggtgtccagtgtgtactgcggagacatccaaaatcatggcagtgaagaggaactgccccgaggtttctggtatttattagagtaagtttggatgtatggaaaatgaacagtgtgcaagatgtaaatgagaaacaatatgcagggaattttaatagctatctaggattcattatcttccacggcataaaataatttcccaggtttcttctag

SEQ ID NO: 36843 - DNA, 2830 bp, Zea Mays
aaaaactgaggaaagtatcttatgacttgcatggtacaatgtaaaatctgtgaatagttagttaggagacgatatttgataacccctcaatttcaaaattgtaagtcgtttggttttttctagatttatagttttactatctatatctaggtgcatagcgaaaactatatacttaaaaaagccaagacaacttacaatttgtaatggagtgagtacatattaggaaaaggtctcaacactcaaaaggatgctgctggtgaaattgctgctgaattacaaggtactccagacttcataattggaaactacagtgatggaaatcttgtggcatcgttgctatcttacaagatgggaattacccagtgcaacattgctcatgctctggaaaagactaagtatccagattcagacatattttggaagaatttcgatgagaagtaccatttctcctgtcagttcacggctgatataattgctatgaacaatgctgattttatcatcaccagcacataccaagaaatcgctggaagcaaaaatactgttggacagtatgagagtcatactgcctttactctgcctggtctgtaccgagttgtccatgggatcgatgtcttcgatccaaagttcaatatagtctctcctggagctgacatgtccatatactttccacataccgagaaggccaagcgactcacctctcttcatggttcaatcgaaaatttgatttatgacccggagcaaaacgatgaacacattgggcatctggatgaccggtcaaagcccatcctcttctccatggcaagactcgacagggtgaagaacataacggggctggtcgaagcttttgctaagtgcgctaagctgagggagctggtaaaccttgtcgtcgttgccgggtacaatgatgtcaacaagtccaaggacagggaagagatcgcggagatagagaagatgcatgaactcatcaagacccacaacttgttcgggcagttccgctggatctctgcccagacaaacagggcccgtaacggcgagctctatcgctacatcgctgatacccatggtgctttcgtacagccggccttctatgaagcgttcggtctcaccgtcgttgaggccatgacctgtggacttcctactttcgcgacgctccatggagggccagctgagatcatagagcatggcgtctcgggcttccacattgacccgtaccaccccgagcaggctgctaatctgatggccgacttcttcgagcggtgcaagcaagacccagatcactgggtgaaaatatctggagcagggctgcagcgcatatacgagaagtacacatggaagatatactcagagaggttgatgacactggccggggtctacggtttctggaagtacgtgtcgaagctcgagaggctggagacgaggcgctaccttgagatgttctacatactgaagttccgcgagctggcgaagaccgtgccgcttgcaattgaccaaccgcagtagcttgcgcaactgcgactgcgtagcacttggtacaagactgaaacctgaaggaccttcagtaatttaggcgcggcagacggtagccaataaaatgtgccggagctgaactggtttttattatgtacataatggcagtataacaaaattactgaaggcaggtgggttgcagttgtgtgttcgttactgtttactgtaatatgtcaagctgtcggctgcaatttctttgctggcaagccgcaggcactggtgaagtgctgataaatacatcatattctgttgacctgtgaagaaacttgttcaaggtagattccattgtactagctctgttgctcagcatctccttgtttgggaacattaacaaccagctctcacccctcaataaaatagtcgcatcatgtagctacagttttcatctcaaatccatgtggatcggataagtcaaaatccttaaatttttttttctaatagcatccaatctatatgccataggatcggaataaccctgaaccacatgtctgagacatgggagtgtcaaccgtgccaaacgattcaagaaagaagaacgcgactacaagctcattaaccggctttaaatgtgaatatgtcatacccccttaaccgaaattaatctacaattcgcaacgcaacgcgccgcgtcgttgccagtgtgccacacgggggggaaagaatggtgctaggcactgtcacacgctgatgtcgtaccgtggaacactctgcggtgcggcggcgcggcagagcgggcacgtcgtgctcactcggaaccacgcctggatgcactccgcgtggaacccgtgaccgcagcccagcacgagccgcgtagcggcctcgccgtccccgggctccgcaaggcacaccgcgcactcgaccttgccgtccgcgccgctgcgtgccgtggccacgggcaccgacaccgagagcgagagcggcgatgccgtcgttgcgcgaggcggtccgtaggccgccgccgcgtcccgaggcgggcaagacagcggccgagcggacgaggtggctccgccggtggcgttgcttctggttccgtgcttcctgcactgccagatgaagcgccacacgaggtagagcagcacgacgaggacgctgagggccgccagcgctgacgaggcgcggctggagacccgcccgtgcggcgccggcgcaatgccaccgctatcggtgtccatcgtcgacgagtatcgggctatcggcctaggctctggccacccccgttagctgacaaaactagccggtacgcaccagctcgcatagccggtatagtacgcactactacgcagtctatgcagaggggaagttc

SEQ ID NO: 36844 - DNA, 1605 bp, Zea Mays
gcggctacgaagggatcctcctgggaatggggaaccccctcctcgacatctccgctgtcgtcgacgagggcttcctcgccaagtatgacgaattggctagcaagagcaatgttgaatacattgctggaggtaatgttagtgcaaatgcatggattactgcttcatgattcattctctctcttctactatttgtagtgttcttttctttcaggagccactcaaaactctatcagggttgcccaatggatgcttcaaattcctggtgcatcaagttacattggttgcatcgggaaggataagtttggtgaggagatgaaaaaaaatgcacaagctgctggtattaatgcccattatcatgaggatgagaatgctccaacgggcacatgtgctgtttgtgttgttggtggagaaagttgagaaggcaaaatatatttacattgctggatttttccttacggtatccccggattctattcaacttgttgctgagcatgccgctgcaactaacaaggtgtttatgatgaacctttctgctccctttatatgcgaggttttccgtgatgcccaagagaaagctcttccgtacgtggattacatctttggaaatgaaactgaggcgaggacctttgctaaagttcgcggttgggagaccgagaatgttgaggagatcgctttgaagatctcccaattaccgaaggcttcaggaacacacaagaagattactgttatcactcaaggttgcgatccggtagttgtggccgatgatggaaaggtgaaaactttccctgtgatcctcttgcctaaggagaagcttgttgacaccaatggtgcaggtgatgcgttcgttggtggcttcctgtcccagttggtacaagagaagaacatcgatgagtgtgtcagagctgcctgttacgccgccaatgttgtcatccaacgttctggctgcacttaccctgagaagcctgacttcaactagagccatttcagaatttagaatctattggcatctggtctgtataattagtcgggttcgccttggtctgtttgcggcacattctagtgccaccgtacaggtcaaatgttcatgcgtgtaaggcgtgtcatggcactctacaaaagtgcattcgtgcgtcacctcttgcaagggaaaccagctggttgtaagttcagccatgggcacactcttgaggccacaatatgtgccagaaatggcagtgtaccccggcctgccccggcactcggatgcgtgcatgcctctcccggttacggactctttacagttgcatctaaaacaattcaaagcaccttgcggtgcatccttgaaaagttggggcacaatatggttatggaccacactggagctaattgctagcttgctctacagcctataccctataattcagcctacacccataatggttttttgaacatctcgagctgaattacggaacacagaggcggtcaaatacaacgagggcgggccggtaccgcggtcagctgcacagtgccgggctccactcgcgctgggcgtcgacatggcagaggacagcgaggaacatgtcctcgtcgcaggggaggcacagcctggtgtcggcggcggcgaag

SEQ ID NO: 36845 - DNA, 893 bp, Zea Mays
  misc_feature (893)..(893): n is a, c, g, or t
cgcgtctcgtctcgtctcgtcgccgcccgaccctcgctcgcctcttcccgaggtctccacgatattacatccccgatcgtgcccggggcttcgttccggtacgtgagggggtcggcgatgttcttctcgggtgacccgtcggcgcggcggcgggtcgacctcggcggccggagcagcaaggagcgggaccgcaaggtgctgctcgagcagacgcgcgaggagcggcgtcggcgccagggcctccgactacagaacacctccgccacgaagatccagagggaagaaggctttggaattggcacgctcagaggttcggaagaatttttgctcaacttttggggagcattgcgagcggatagagtggaacaacttcggaactaattctgactttcttcgtcaattactgtttttctttaatgcaaatgaagacaatgacatagctatactttgtcaaatctgcaacttgctgctgcaatatgttaaacaaggcggagatgttgtaactctctttactggtgtgaatggctcctcactgcaacctctcgttgctcacagagtaaaaaaaattactctcatctgtgtgcaagcagtctatcaaaagaggcatgattggggcagccaacttttgacaacacctggaagcacatcagtgccttctgtctcattactggaaactgtaggttgcttgataaatccaaaatttccttggaactgcaaagtagtaggttatcttcagcagagaaagatctattgcttattccgtggaattgtcatatctgtaccacaaaaggtcagaaattctgggcattttgatggtacatctgtgctggagcaagttctcatgcttgttgcttcacatgttggccatcatccctgttgttgtctgaaagtgn

SEQ ID NO: 36846 - DNA, 3268 bp, Zea Mays
cgctacttttgttctgttttagttaatgttggcaatcgatgcggtcggggtgaggaatctgtggggaccaaagcgagtagagagagagagagagagaggcggaaggaatggattcgttctcgtagagctagctgctcccgatctttagaattccgcgcgtcctccgagcgctccaagaacacgtacgccgtcgctggcttctcctatcggattgtggtccaggtcatctccccgttcgctggcttcagcagcagagctcttgctggcaaacaagtgatctttctacagttttagaagggcaggcctttgacactgggtttgctctcttctcatgttcgaagctcggagattatgacacaagcatgactggtccttgaaaactatacacggctttggagagatgggatgtgctgcttccaggttagaagatgaggaagccatcaagatgtgccgggacagaagggacttcatcaagcaggcactggagcagcgcaaccgatttgcatcttctcacattgcttacatcgagtccctgaagcgtgtttcaatggctctccaacggtttgttgctggagatgaccaccatgagctcatcttcgatacattcatctcccctgtcaagcaacagaagccagagacgctcagcctgccttatggttcatatgagaagagaaccattcatgtctcgagatacttgaggtcagggcctaacccatcagtgtcagttgaggagcacccacgaccggtggaaacagtccgtgttgagtcacattaccctatggacaatcacagtggcatggataggttcttacaatcgcactcctcaccggtggtatcgtcttcatactacccaccaccttataccaggccaagctacccatctccatcgtcccaggaaccagttatgaatacttctacctattacatgccttatgacaggccaagatatgcacctccatcaccccaggaggcaatgaggacttcttattatgcatcttatgacaggccaagctaccgaccaccatcatcccaggagccaccgaggaattcttatcatgtgccatatgacaggccaagcttcccacctccatcaccccaggagcaggaatcatcaccatgggactccttctggaacccattctcatcgctggacagctttggatatccccgccctcggagtagctatgacaacgtgaccaatgacgatgaactcgcgaggttacagcgggtacgagaggaggaaggaatcccagaacttgaagaggaagacgatgagtgtcaagagcatgtacaaatgcatagaaaagaagaacaagaagatcatgataatgcggatgatgatgatgaagacgatgaggaagatgacgatgacgaatgtgagcattcagatgagtatatggtttctgacgagggcacttgctctgtcaattttgatgctaatatgaagcaagaaacaaagggatttgaatccaaaggtattcagtgtactgaagcaccagaacctcgcaagacagtagaacttgagttaaaggcacacaagaaagaactgatgagaaacagagtagcaaatgcagaagaaactcctggtttcacagtatatctgaatcgaagaccagcaagcttggttgaggccatgaaggatatcgactgtcagttctcgggaatatgtgacgctgctcgggaaatctcagtaatgttggaggcaagtagagctcagtactcagcctcaaacgatctttctggtactgcttttatgatccaatgctgaaattactttaaagatccagatttgatacttactgaacatagctaggcttgtccattgtataatgcagcgaagatgctgaatccggttgcacttttgcgctctgtgtcgtcgcgttcatcgtcttctcgtttccttcttgctccctctagctcaatagatgatctctttgacaatgagactagcagctgttactctgaagaatcttgtagtaccatgtctggaagtcaccactctaccttagatagactctatacatgggagaagaaactgtacaaggaagtaaaggctggtgagcggttaagaatcgagtacgagaagaggttgacacatttgaggaaccaagatgtcaaaggcgaagaaccttcctctgttgataagacttgtgcagcattaagaagcttgcatactcggctgaaggtgtcaatacagacagttcagtcaatatcaacgaggattgaaattctaagggatgaggagctgcatcatcagcttatggagctgattcaagggctatcacggatgtggcgggccatggctgaacgccacaaagcccagaagcgcaccatcgaggacgccaagcttctcttcctccagcaccacccctcggccgccaccgccatctcccttggcccgctagaggctgcaggtcccccaccggctgccttggaattggagtccgagatccaggcgtggcgaggagcgctggaggcctggctgttcgcgcagcgcgcctacgcgcgcgcgctggccgcgtgggcgcgacggtgcctcggcatcagcaccgcggcgcggccaagtagccacgcgctgccgccggcgttcctggcgtgcatggagtgggggcgcgcggtcgacgcggccactgaggcgcgggtgatggacggtctggacttcttcgtcgccggcgtcgggtcggtgtgctcgggcgcggctgccgggatggagggcatggctgggcgcgtgctgtgtgctggcatggcagcggtcaccggcgccttggcggagttcgcggcggcgtctggcgacagctatgacgccgctgtcgcagctgtcgtcgccgcggcgcgtgcgccggagcgcgggaaagaggacggcgtgggacaagtgccggaacgctaggaaagtgctgcggcggttgctttgttggttgaccggcccccgtgacgtagagtggctctgctcaccttgtgatgacgatgggtagggtaggagatggaattaagcatgcagctacgtatgtagtcttgtgattgataagaatgctattacaaggctatctaattttgctagcgactgcttattatagtgtggtggtcctagaccgacaaatctaagcaatagcaacaattggttgtttgtgatacaagcacaagcgaatgggatggagtttgtttatgagagcaagaaccgctacgcgcggctacggggaaactatccgatacgaggaagacgaaggcttaccggtggcttcaaatgcggcttttcccctcgagccgttct

SEQ ID NO: 36847 - DNA, 2265 bp, Zea Mays
cttccacaaaccccataaccctagcaccgccgccaccatgtcctcatctccatcttcagtgaaccgccgtcccccgggcccgctagcgttggggctggagtccttggggaagaagatcagcatcggctggtctccgtcccgggcggcatcctctccatctcgtgtcgcacctacgcgaccccactgggccatggcttctttccccgtgacacctctgtcgggatcgcgagggatgcgttcaacacgttcttcagtgaaacgggcgcagggaagcacgttccaagggccctgtttgtcgacttggagcccactgtgattgacgaggtgaagaccggggcgtaccgccggcttttccatcctgagcagctcatctcacacaaggaagatgctgcgaacaacttcgcccgtggacattacacaggctcaaaatgttcttggaaacaaggggactgaaattgcaaaggttgtctcgggaagctgtgtttttctatcataaaactcttggtataaagttctcacgttaaaacttttggtgctttatccataggtagcacatcggcgaactgatgcggaggcgggcgtggaggcgctcgatgccgtccagcaatcagtagttgtcgctgcatcggcgacttctttcccccaccagcatggccgcgtgaatggttcagttctttccaaagcctacagcttctaggaaatcggatacgatcacccgaaaaaggcaagggggaaatcttcttatagatctgttccgtcattgtgacaatcatttgggagagaaacaagtaaacaacccttttttccataaaactccatctggaagtgcacgacagccactacagttgactaccgatgtaaccaagatgatgcaaaagcatcagctggaaacgccatagttgctgctactgagtaccatccttatatccttatttcctaattgttgtggtgcatgtacaagtttttttaaaacgaattccgaattggttattgctgttagaactcatctgagtgctaccttctcatatgctccttttttctctctggctgttatgttaaaggaccagatacaagtcaatcttcccttcaaattacaatttaattattttatatctggattctgcaagacacttcaaaaaaaaatataacaacatgtggtccctatgttatctactagcatgagccattgttccatgcagtttggtacatagtggcgcatattttgttacatttactttctatattcttagtatatttatagcctatatccccaaactatatcatatacttagcacacacccattgttataatccacgtgcgcatggcgcgcgcactttactagtatacaacattgttggcaacaggagctgatctctttattacacgatgtattggcttggtttctaatgtccactttcccatccctgttttcccctccttcaggacttctttagtgatcttttggtacatcgctgctgatacaaacagcctacccagactgcttttgtgaagcacactgctttctgagaagccatttgcagtgcaaggatgaaacttggtcagagtgtttaccatatggattggcagccccaaataaagctctggattgtcctattcccatgacaaggttgtgctcttctcctgcagtgaaaccaaaaaagaaggcgcgctactgttcttccgttttcatgtcaatgcaacaacagataagtggaggtggcactaccaattccttgatgtaccaggaatgtttggattgttgtattctgacattgtttggctcaacatattcaagttggagtgtcaggtctccaacaattaaacaagatacggaatctgtgtaagcaagagcattcataccttgttagcttccttctctctctctcaagatcgatctagagaccaacaagatcatggacttcttcaagtttgacgtcgataacgtggtcatggtgaccggcgggaggaacaccgggcgtgtaggagtgatcaagaactaggagaagcacaaaggcagcttcgaggtcatcgacgtgctgcttggagctttttgcatgctatgtctagttttctcctatttgttgtacaggaaaacatagaatggaattcaaatttggtggtcgcaaaagtgtggagacttgaattcatataaagttaggcttaacattagtgcaaacagttgtattttagtttagatttagagtacacttatgtatgccttgtttgacaatgcttatttatgatatattgaatggtacttattt

SEQ ID NO: 36848 - DNA, 382 bp, Zea Mays
ccagcgtccagcctccttggggcttgtacttgttcactgaatcactacttcgcgaggtcagccgtcaacgcatcagcagcaactagcaaggccgccaagcggcccaggacccaggccagctccaagcgaacaacctacgccatctgggctccggcttccagcatccaccagacgtccttagaatacggtgcagcgagcagcgagcagcaagtcaccgagcagccgagcgaccgccgagcacagggcaccaccaagcagccgagccaccgcccagcgccgagtcttctctggtaaattaaacaggcttggataaattagtgtttcaatttagagttttagacagattgcttgtagggatttgaaaagattacttgtatggatg

SEQ ID NO: 36849 - DNA, 415 bp, Zea Mays
atgacgcctagggaacttaacaactaccctcgaaaagatactctttacgtgtggacagcaagcgccagtgaaatagttgcttcagcacttcatgacaattgcaaagctgttcttgttggcgaaaggacttttggcaagggcttaatccaatctgtatttgaacttcatgatggttctggtattatcgtcacagttggcaaatacatgacaccaaaccacaaggatatcaatgggaatggaatagaaccggattacaatcgtcttcctgatttcaatgaagccagaggttacctttcacgatgtggaattaaagaattaagctgacagacgtttgcggcagatttcaatgaagcattatattctgaaggttctctcacgggtcagacgacctaatatgatagaattgatatggaac

SEQ ID NO: 36850 - DNA, 464 bp, Zea Mays
cccttcgctcgtcttcctccacggagcggcatatcgatgtacagtatccaaagctagaggaaatgggagagtacacaacctgtgttggtttgacttacagtcagggctgcatatggttcaaagagcggaggagaaaagagaggagggagatgggagccattggtccttagatggaaaggcaatttagtgcactgtaggggatgaaagtaaagttatatcacaagttctgttccccaagaattatatcctgagcaaaattttccgcaaggatgttccacctctgatagtgaatttgaccccctcccccaaaatgcacatggttgtaacagagacactacatgacatcattcctagaaccaaagaactatgaagaagagaaagaatgatttttttggtttctttgcattaccatacccgtgtttgcaagtatttttggtcatcacaaatgcaagttcttaccagtg

SEQ ID NO: 36851 - DNA, 424 bp, Zea Mays
gcatactagctaggtgggggtggggcgtggggggctggccgggacagcgtcgacgtcggcggcggggagcttctcctgaacgagacgccgaggtggcacgacatttgtcatggtgcgtcagcgcggtggctcgcgtggaaggctcctgtcgtactcctactatactcatgctacgtctggccgggtgaggggtcgctgtttttcgtccagccgaagctcggtcggtcgatggagggagccagcacacgtcgttgttcagtgttcggttcctaactcatcaccaccaccacctccatctcctcctcctcctctctccctctccctctcccggaccgttgaaagtcatatgagcttatcgatcggcggcatggtgtttacgtgtcccatgagagcgagttctctccgcttccaaccataaatcaag

SEQ ID NO: 36852 - DNA, 1217 bp, Zea Mays
gtcggagaggaaggagatatagagggtggaatcttttagaggagactgtaaaggacggatatagaggatgaatatagaggacgttgctggagacagcctaaggctgcctccaacaagagccgctaaaggctcatgtccgctaaatgtgagggactgtcaggtcccctacgtctccaacaaggtcctctaaagcgtcccctaaattatagaggatgtgccagagaccctaactgtggaggccgcccaccgtgcgctatccgcgcgacggatccaccagccgccgcgaggaaacttccgcctcctcctaccgcgcgctggcgactacatctcccggggccgagccctcaatccggcgtgcttcgtcgccggcatcgaggcaggtgggagacaagagggcttgcgagagcggacgcggagcatggcggaggagcagatcgaagaggcgtccatggccatcgccggacgcggagcatcgtggaggagcagatcgaagaggcgtccatggccacggcggcggccacgccgttccagctccagttcgacaagcccatcccgttccagggcaacggctggttcacggatgggcaagctaggccattgccccatctcaaattttacgatctacacaggatcagagagggagtcaggaaagaaggcgctcaaaagtcgggacaaaaatatctgagtgaatcggacctgcagaatgcggacggtcacccagagattgatcttgcgttcgtgctgctgctgccccgccggtcactgataaaaatggcagaatggaatccagagaaggatctgcttgctatggttactgatgactccaaggttctcctccatcgcttcaattggcaaaggctttggacaatctctctagggaagtgcatcacatcaatttgttggagccctgatggtaaaataatagcacttggcacataagctggtttgattcttttgcatgatgtggaggtgtgtatctggatgatgataaaaattgtcggtgtctattgtatctttgtatgaacattcgtttgtacttcatagacacctgatccagtgcctatcttctcttaatatttttctaattgcttattctcatttttatatcatgcttaaaccttatgagcgaactattaggagacatttaggggatacaggcctcaaggacttcttgcccaattatgttttcgatagaggcattttaatacttcttgaag

SEQ ID NO: 36853 - DNA, 2120 bp, Zea Mays
cgcgggcgcacgcattcctaggccgcaccgcgccaccgggacgggaagagcgtcccctgcaccggccatttgctccgctcgcgtccccgcctcctgcgcacgagacgctctccgctttttttttatcgacgagtttgagacagaccaaagaggcggaagaagcggggaagccgacgggcaacgaccggggcgtgaggcgatgtcgtggctccgcagcgcggtgcaccgcgccgtggaggcgagcgggggtcacagctccctccttacccgcaccgtccgcacctcccttgacaccgtcgtccaccatgccggccaggctgtcgcgggcggcgccaggctcatcaccgggagccggagttacaagagcgcgaaggtggcagcgaagaggctggaagaggaggcgctctcctgcaaaggggacgaacgggtgcagctgctgcgccggtggctcgtcgcgctcaaggagacccagcgcgcgaccacggcggtccgggagccgcaatttggggacaatccggaccagactgcgcccctgctggatttgtacatcgattacgacagcggtgcggagccgatgaactttttccatgtcttcctctacagtcaagccctcgagtgtgttgttctctccttgattagggaagccccaactgaggaagaagttccactggtctcagaagtttttggaatgtgcctttcgggagggaaggatgtgcacaatgcactcttaagtagtgtaaaggacctggcaaggttattctcaagttatagtgacgaagtgttggcaaaacgtgacgagctgcttcagtttgctcagggtgcgatctcagggctaaagataaatgctgacattgcaagattagataatgaaattactcagttgcaacagcagataaattcaatggatgcgctccatgctacatcaatcgtcaatcagaataaaaaagctcaaacagccactgagggtttcagaaaggcagtttctgaagttcggctttgctctagaatggaagaacttctattgaagaagaaatcaatacaccccggtgattcattggagactcattttgagaaggtagataaactgaaggttttgtctgaatcccttgcaaattcatctgcaaaagcagaaaagcgtatcatggaaaataggctacaaaaggaagaatctcttatcttccgggtcaccaaaacaaatgaagttagtggtatagaaaagaaaatacaacaccccatgatttcccattgaaacaaaaggaagacattcatatccatcattgcaattgcaaaagaaaaaaaatagcaggatgtgcaagctgttccaattgttttttcttttccaattcttagtccatgcaattgtctttatgcttctgcaatctgtctgattgatgattaatcaattaagttttgtaaaaggaattagttgctgagatctctggacttgaggagcaaaggaatcaactcgaggcagaactgaaaaaggtgaatactaaattgaaagttgctacagtgaagcttaaaaaaactagagaggaacgggaccaatttgatgaagcaagcaatcagattgtgttgcacctaaaaacaaaggaagacgaactttcaagatccatagcttcatgcaaagtagaagcaagtactgtcagtgcatggatcaactttttgaaagatacgtggaaattgcagtccttgtttgaagagctaagagaaaaacaggccaacgaagaattggatagatgtggactctgctttgcgaaattgatgaagtatcatgtttctgcatccatggaagagctaagcacttctattgaccgtatcaaaacctttgttgataacttgaaaatatttggtaacagatccgtgtcagcagaggatggagctaatggtccgtctaagcaatcaaaccctcgtagatatcttgaggaagaatatctccaaactgagaaaaaggtcgtagctgcattcagtttggttgatagtatcagagcaatatattcttcaaaccaggattactataaaacgagtttgtgcagaagggatgacactgaggtaaaaaatctgtttacctccattgacaatctgcggatcgagttcgaatccgtgccacgtccagtgct

SEQ ID NO: 36854 - DNA, 1053 bp, Zea Mays
cacaggtccacgcttccaccagcccactccccgtcgccgacctcacccccctcatggacggtggccgagccgcagccgtcggcggcgacccctctcccatcgctgctccttccaatcccccggcgctgagcagccggcccgtcgatgtctcctcgttcacccataccccgtgctactggttcctctctggcatcagaaagcaggccattctgatgatggatttatttgctgggattatcacgtgatatgcatccagtgtttcatggtacttcttgatgtgcatatggaagtctaggcgaagcaaagaagttcttgattttgtttgggatctggactccgatcttcctttcccttccccattgatccaatatgtttctgaggcgattcaaccactatcattcggcaattccagatatgcaagactcttccgtgtggttcatgctcctgtgtttcttcaatcgtttgcctcagacagaagccatatgaaggatcctgaggggaactggattcagttacccccaaaatatgaaccgatcgtggctgaagatggaaccaccaataacctcaatgagtacatcatgatgtctgtgggggacgtggcagacagagaaaggatggctaatgatgtttactgcaacaagcatggtgtggtgctaaatgaaacgatcttccctgaattcttcgcccagctgcctgctccacatacttagcaagcgatctttctgttgtgatgggttactctgtacacttcaatagtgcactcacaagattatgaattaaaatatatgggcactattggacacatggtgcctctaagtagcgtttcagatagatcctggcctgttttggaaagcaaaatgtggggatctcatagttctgttagcctagacatctgaaagcttcatcttgtcccaaataatgatgactaggtcatgtttaacggctttagctttctttggtcattgttcgtcgaaacttatatgaacataacacttctatgtgctcgttgttaccttacaagtaaatatgcaacccataaactttaaacttgca

SEQ ID NO: 36855 - DNA, 908 bp, Zea Mays
cggtcgacctggagcaaaagcggcgggtgtgcgctgcttggattgcagccattaagagagagaaacaagggtagaaggacgtgggtccattcgcgggtgagaattgagctcgtccgcaaccttcacgcagtgccagacaatggtgcatccttgcactacgcgaggactcgcccacggggtcactgtgtcggagaccgggtgcctcgttgtcgacgtcaagagatccggcgcgccaccagtctccgtggacaactacactggtgcctcgaaaacgccatgcggttcgtcgggaggatacgaacgcgtgtgtggcgcgcgggcagccctatacctgggcgatgggaggaacaagacgatgtcacgtccgttaggatggagatcgacggctaggcttaggcgatgattcctggccatagatctgggagtcaacggtggagattagaacggggcatacctcttcggtgtttagatcccgaccattgatctggctgctggcgacccagattaaatggtggctaacgcttcggctagagtgatctggatcgttagatatggatcgggcggacgcggttgcataccgattcgctgtataatctcggcccttgatccttcatcgggcgaccccagttggctcattacccttcggctgacatctttgctccaaagaccccccgagtttttctctaaacaacccgcagtgctaggcagttctaagaaccttgcaattaggccctgtttttaacactttggcccttgcgttcctagaaaaattgtacccgccatccagagacattggtaattcttggaataaatcaagaaattgatttttaactataagataaacccgaaaaccttagaaaaaatcatatcttctgcgtcttaactccgatttaatccgttccagttac

SEQ ID NO: 36856 - DNA, 1954 bp, Zea Mays
cgggagtagaatcctgcggatcagatagatcataggaatagctagctagtaaacaaataaaaagtagacagagctctgcggacaccaatattcaggaacaaacgaatagtacgtgagattgcacgtggtccatattctgggcggcgatccgcaggcgggctacacacacatacatggcggcggagggcgccggaggccggggacgagccatgcggtacccgcctctgtcggcgctcgtggtctccgccatcgcggccttctcggccgtgatcgtcctcgccgtcgtccactcggcgtacgacgacgccatgtcgcggacgcggacgctgctgggccacaacctggagccgacgccgtggcacccgttcccgcacgacaagggccggccgccggcgcgcgcggcgctgcggtgcgcgccctccatcgcctgcctgccgccgctatcgtcgtcgtcgtcgtcgccgcagccgcaaggtaacaagaagaagaagcaaaagcagtgccctgcctacttcgctgccatccaccgggacctggctccgtggcgcgggcagggccggggcgtgacgcgcgcgctcctggacgaggcgcggcggcgcgcgtccatgcgcgtcaccatcacgggcggcgggcggcggctgcacgtggacctctactacgcctgcgtgcagagccgcgccctgttcacggtgtggagcctgctgcagctgatgcggcggtaccccgggcgcgtgcccgacgtggacctcatgttcgactgcatggaccgccccgccatcaaccggaccgagcacggggacggcgctctgccgccgccgccgctcttccgctactgcaccaccagggaccacttcgacatccccttccctgactggtccttctggggctggccggagacgaacatcgagccatggaaccacgagttcaagaacatcagggcgggcgccagggcaacgagatgggcggacagggtgccgacggcgtactggaagggcaacccggacgtggcgtcgccgctgcgggaggcgctgctgggctgcaacgacacggccctgtggcgcgccgagatcatgcgccagaactgggacgacgaggccaggtccggctaccagcactcgaggctctcggcgcagtgcacgcaccgctacaagatctacgccgagggcttcgcgtggtcggtcagcctcaagtacatcctctcctgcggctccatggcgctgctcatcgagccgcgctaccaggacttcttcagccgcgggctggagccccgggtgaactactggccggtcgccgccctgggcatgtgcgagtccatccgggacgccgtcgactggggcaacgccaacccggacgaggccgagcgcgtcggcaggcgcgggcagaggctcgtgcaggacctccgcatgcacgccgtctacgactacatgctgcacctgctcaccgagtatgcgcgcctcctcatagaccaggaccacggcttgagcccgccgccccacgcgcaggaggcatgcgaggcatccctgctctgcctcgcagacgacaagcagcggaggttcctccacgcatccaaggcagaccccgcgccgggcgacccgtgcgtgctcccgccgccgtgatccctccccctccctctctctctaggatttctttctttctttatttatttatttattagactcaacagacagatcagaacgagttgggaggatttcaatgatggttctaaagcttctgacaaaagcatgttcagatttcatttttaggtcaattgcaatttccttgaatttaaattgtattatgtatcctgccgtcctgcctcttacaaaactagatgccttcaactatgcaaaatgctaatatgaatgacgctataattaattagtgaagaaaaaaggagctgcaagattttttaaaaaaaaatagatgtcatttacacaagaatcaatatttcgac

SEQ ID NO: 36857 - DNA, 258 bp, Zea Mays
tgcgggacagtgaattataaagtaaataggatataatgggtcagaggacacttgccttcaccaaacagatactcaaggtcttcaaccttatagaactcgaggagcctgactacttggtcgtcaaagtttgatcgtcgattcctcgaagctcgggaacagctcatgatctactcgcgacgcaacaaatacaaacacacacaagcaaacatatacttgcataagaacattacaccatacaagataaaatattatcaaaac

SEQ ID NO: 36858 - DNA, 2957 bp, Zea Mays
gaattgaagtgctaaagtttagtttcaattatcaccattagctctcatgtttagattataaatggctaaaagtagctaaaaaatagctgctaaagtttatctcgcgagattggaacagggcctaactattagttttagtgtattcaaacaccccctgagagtcgtaatctggcaaggatgaaaataacgtgaacaaattctaccaactacgctgtgcttatcgcctctggcggcggcgagttcgctcacgtcccggcgacccctcgccggtggccacgggccgtgacactccggcatgccgcgcgccccacgccggcagtccgacgaggcgcgccgtggcgcctacaagccgcgcgtcgacttcagccgctcgcgccgccgccgcgaggacggcctcctcgccctccgccgcctcaaccgcgacacgggactcttcaagcgccgccgcgacgagcccgctcccgccgtccctgcctccgatctgactcctacacgcgccgaagcagccccattcgcaggaatcacccgtccggcattcactccctcctcaccgcccgacgtagcggctccccgggatgctgctgagtcagagcttgaaggcctgtcagagctggtcgacaaactatgttcagatgacaccaccagtcagctcgaagccacaatccagttcaggaaacttctttcagatgagaagaactcaactgtgataaaaatcatccgagcggatgtcctgcccagatttgccgagtttctttcaagacatgggcttccccagctccaaatggaggcagcctgggttcttaccaacatagctgcatctgattatacactgctggttgcagaatgcggtgctgttccaaggttggtggaactattaggatcactaaatgcaaacatcaggcatcaggctatctggtgtcttgggaatatagctgcagacttacctagctgcagaggcattctcttcgatcatggtgctcttacacctttactttctcaatttagagaaggcatgaagattccagttctgagaactgctatgtgggcactgtcaaatctttgttttggaaaattgccagccgaagtgcaagtgaaaccaatactagaaattatcagccagcttattcactctgctgacgagaagatactggcagatgcatgctggactgtttactacatatgtggcgataaaggtgatgctgtccaagatgtattagatgctggggtctgccctcaacttgtaaatcttttgatgcatgcatcagctaatgttcttctccctgtcattatggcactcgcaagaatttctgcgggagatgataagcaagttgaggtagctttatagctgtgtattctttgtgtcctcaccctttattttactggtgcagattcccagtgatctgcagtcactagaacgtagaatgtaatggccgaagaaccgagtatggactatggagatgctgcttgttgtcagtaataatgctctgatctttttaagacccaaaaccatatatctcggcctgcagtaacattttatcgccacaattgcagctattattacactgctgaagttctatatacattttttttgcattgtcagcctttttcataccttccaagttcatatcatgggccttgtgtattgtccttgatccagtgaattcttggaggggctcagcaagctttcgctgcaaaacactcgtgtgtctacaattgctgttaaaggcagacctagtgctgggggctccccacatgagtgggatctcagagcctctggcactgtgtctgcgtttaataacaattatagatacatgagtgttttacagtgaaagttctcacttttcagttgctgttatagggaaacttaatataaaagttttcatgtagctcaataagtttttataccaagtcaacacatagcgaattagttgtacattctgctttgtcccccccaccccaacctttgaattacaacacaacaatattttgcaggtcttaatagagaatgacattctcaattgcttaggacagttggtagcacgaaattacccaaagaacatcaagaaacaagcgtgtctaattgtttctaatatcgctgctggtagcaaggatcagattcaggctgtaatcgatgcagacattataacctctctcattgtcttgctaagaacgtcagagccggatgttaaaaaggaggctgcttgggctatatcaactgctgcgtccggtggttcaagtgatcaaattcagtatttggtcagccggggatgtttagagcccctctgcagcgtcctcacccacaacgatcctgaccttgtatacacgtgtcttgaaggtcttgagaacatactccacgcaggtgaggcggggaagaagggcgaggaatcagggacgaacccatacgccgagtttattctagagtgcggaggtctggagaaactggaggatctgcaggacgtggacagcgacaggatctacgagctagccatgaagctgctacagagctactgggaggaggaagtaagcgagagtgatgatccgaacatcccaggttcgaatgactcgtcagatactgtggaagcaacgtccgaagatgctgctgctgctgtgcagccaccaccagtaccgccgccgccgtccgccgcagatgaagccgagtgatggtagatgttgtattgtagattgtatttcaggagaggaaagcctggttccttttcttagtggcactggcatattgtatgatacttactatgatcaggtcgatgtagagaggaacgtgtgaaggtgtggtagccgttatgtgcagaattttcgcatcacgtttctgtaggcgacattggagcattttgaatggaggatttgggccaagagaaaaagaggtatgggggttatttggcgcgtgctgctgaaaggttaaagattgggctggctgttgaaatggagctccgcagaccgca

SEQ ID NO: 36859 - DNA, 4147 bp, Zea Mays
ctgccatcgtctcctctccgcgacgcacgcctccctctcctccgccccaccctcctccccacgccatcggcaccgccatcatcagatccggcccaagacgcctctgccccacgcgcccgagtcgtcgaggcacactcctgcccgcctccggcgtccacgcacatctccgcctcacctcggcgcccgagtcgtcgcacgcgttcgaggtggcgtccatcccggcaccggcctcacgcaccatctacagctcccaactctgctcctctcagttctccctctgcattccaccttctctcccttcctctccaagcaccgtcctcctcgcctagatccgtacaagctgcaaataacctctccggtggcaagacagatggagtcgatctccggcgaggatgctccgaagcacaacctgatcctgtccgcgctcgtctccaacctacagtgcatgctcgccgcccgccgcccgttcacggcagaggtcagcaccgccgccacagctagcgaggctgaggccttggctcaggaagcagaggcgtccgatgcccccacgggagatgggacgctggcgaggcccatcgtgctgctgacctgtgccggaggggaaccggtcggcgggtctcgcggcgctcgtcgacgccctcgttgccgccggccgctgcgatgtccacgtgtgtgcccccgaatcgtacatgctgtgacttagaaaaccaaaccacagcgggaccggtgctcggatagggtccaacggcgatgcaagcaaggagtggcatgcggccggaggggcgcagatcggctcctgcacgtgcagcgcagccgcgtgacagtgaagcagggaggccgcgataggcggcacagggagggtgcgacggaggcaaagtgcaagcacctggggacttcagtcactgaagcagaaagaaagagtacaagtctactactgcagaaagcaaggaggatgccaacagaagcagatttcatgtttggatcgggtattgacctttttgtgttctcctcaactcattatttagctacatatcttattaaatcttaatatttggtcattagctaccaacttgcactattattgtgaaaatccattaactttagccaatgaaatggttagactatcaccacgtaggtgatattagtggcattaagttattaatctgtggcaaattctattatcaactattttcttggctaatcattacaatatataatgaagaatactatggcttgaagggatatttatacagttggctatgtatacggtctgcccaagcgcccaacaatgaatgatgtggtgaaggaacttgagatcatcagatagaatgaaggggcacaattgctaaactcaacgtctttatcagttgaacaatttggaaaaaaagagaagagatccttatgcatttgcctatggatgatggaagcaacaacaacacttttgactacaacagtgggagttcaattaagttgttcacccaagtagatagttgtctccactctttcaacaagttattggagtgattatatatgtctgctccatatgaatgccttttcgttttagtatcacatctgaaattaccaaccttttagatcgggtattgacatctttgtgttctcctcaactcattatttagctacatatcttattaaatcttaatctttggtcattagctaccagcttgcactattattgtgaaaatccattaactttagtaagtgaaatggttagactatcaccacgtaggtgatattagtggcgttaagtgattaatcagtggcaaatcctattatcaactattttcttggctaatcattacaatatataatgaagaataccatggcttgcagtgatatttatacagttggctatgtatacagtctgcctaggcgcccaacaatgaatgaagtggtgaaggaacttgagatcatcagatagaatgaaggggcacaattgttaaactcagcgtctttattagttgaacaatttggaaacaaaaagagaagagatccttatgcatttgcctatggatgatggaagcaacaacaacacttttgactacaacagtgggagttcaattaagttgttcacccaagtagataattgtctccactctttcaacaagttattggagtgattatatatgtctgctccatatgaatgccttttcattttagtatcacatctgaaattaccaaccttttagatcggataaaatcttaagcaaaatgggagaaggtttgggttttctgcaatctgtcgtctcctcttctgctgggtatctccgttattattctaatgaagagggctatgagttggattttcgtaggtacatttgagcgtgttttggaatgctgggaccgtgaaacacatgaatatgttgccataaaagttgttcgcagtatccacaagtactctgatgctacaatgattgagatagatgtgctcaatcgccttgtagaaaatgaaaaatatagatctctgtgagtatctcagagacctaattgcttaaagtataaccctattctatttttgacttgacagttcctcttcaatttgtcagctgtgctcaaatttagagatggcttgactatcgtaatcatatatgcatggatgcgttactttatgtttgcttgtatttaatatagaaggctcccttgccttcgttcgatcatgtggtatttgaaagtgatgtctctataaatgaagtaaggtagggcaatgcttatgttactgttgtcagttattagctttttaaaccatgcatctgtcaatgtgtcctgtttcaatagggtcttattataggacgtgatggcactgaattaggatgtttgttcttttgctacctttgttaaacaacatcagatcattcgtattgtatccttcctcggattgcttcttttgttctactacaaatatgcccaacatggcagggagaggtatgctcctaaatttcttattttgtgcattgtgaaatgattgttctaacaacatcaagtttgtgttcttcatataatctatctcagattgctctgtgttttgcaggtctcgaggtcaagcctggacccactgtcaagtgtgtgcttggacatgactttatcctgcactttccactgctgcacttggggaatcaaagaaaagtgaaagtaccatgtcaaagttgatgaccagaagcttgctattggaaccctctctattgaaaaatacccctagatagaaattgatttggttttcaataaagagtgtgagttgtcacacacatagaaaactacctgtgtatttttctttggttacaaggttgagcaaccaatcgaggaagatgaatatcctttttaacattgatttttttagttttatttcatgtaagactgatctaaacaatttctttgtggagtattttgtttccttgatctcatttttgcttcttgcctcttacataatggatcttgattctgaagatgaagagaaggagctaaacattccagtaatcaaggaaaatggcaaaggtgatgggaaggcagttgctgcagcttcaaaatcaagtcttgggcttgaaaaaaagcaaggatgagtatgagtctgatgattctgatgagggagaaggtgaaaccggagaatgaggagatgtggttgttcatggacgacagcatcaagaaacctgcaacatgcaacctgattttaagaaatctgccacctgcaacatgactgggcagtggtatctctgagatataatgtggacaacggcaaagaatactatgcatacacaacaaaagagtcctacaacctgattttaagtccatttgtagcaaaccatcttggaagccattaactcgttgaatttgaagctgatgtgcagttttatttttatgtcagttttactgatgcagttagttcctaagaagatccatggcaacttgtttcacgctgatgcttgagaagttgagagggatggaaatgacactcacaataaaaatttgattttctttcttgtgatcgtcgatcacaataaacacagtggcacaatataccgtgtaattgtcctttcctggtagaacatgaaatgttgaacttcctcttgtgatatataaagcctatgtatcctacataatatttaacatcttacggaaatttatttgtgctgtccca

SEQ ID NO: 36860 - DNA, 1175 bp, Zea Mays
ctgttcctattgtttttagaggaccaaatggagctgctgctggagttggtgctcaacactcacagtttggtttgcacatgttccaggacttaaggttctcacaccatactcttcagaagatgcccgaggcttgcttaaagctgctattagggatcctgatcctgttattttcttggaaaatgaattgctttatggagaatctttcccagtttctgctgaagtgcttgattctagtttttgcctaccgattggcaaagctaagatagaacgtgggggtaaagatgttaccattactgcgttctccaagatggttggctatgctctccaggctgcagagatactgtccaaggaaggaatcagtgctgaggtgatcaaccttcgatcgatcagaccacttgatagagctgctattaatgcatctgttaggaaaaccaaccgattggtgactgttgaagaagggttccctcaacatgggattggtgccgagatatgcatgtctgttgtagaagaaagctttgagtaccttgatgccccagttgagaggatcgctggagctgatgtacctatgccctatgctgccaaccttgagagaatggctgttccacaggtcgatgacattgtgcgggcagcaaagcgggcctgctacagggcagtaccaatggccgcagctgcctgattggtgtacaggcctttctatttttctcccccctcagttttcgctctcgggcagcaagaaacatgtagtattcataaggtgccggcaaattggccggaccccagactccaagcgagctagtttttgtagatctgctatggtgtgctttattctgttagtcgatatatgttgcattgtttctagtttcaaagcccatttatttacttatctatgatttctacacacggcctaataatcttgctaaggccctgattgaatggaaaatatttttttgggagttttaggaaaatactacaattttgtgaaataccttggttttggagtaacatgaagatgatgtttggttagaagaaccaatccattctaaatatggtggtgtatcacgaccaatgttttcgagtcgagaagtcgaagttgactagttgaatatacattgatgaatatagttttatcatctaactgtcccacctcttatcaataatagattacttcatcaatt

SEQ ID NO: 36861 - DNA, 1652 bp, Zea Mays
ccgggagcagtgcatggtgtggtggtggtggtaaaaggacggggattggacagcgacgctgatcatttatgccgccgtgtaaatacccaccacaagcagctagcttcgcaggtcggcttccacatctctctcattctcgtctccccccactgctagctgctgcagctctcaagctagctggcagctagggtttacaccgatccggggtccggtcgccgccggccggcggaagcgggcaatcgagctccgcgacgtcgagatctgcttaattgctaggtggtcgccgcgccggcagccccggcacagagaaagtcaattgctctttgcaggggttgctgctcgttttaaaagagatcctttgcagtggatgatacaccgacacgcagctagccagcagggacaccgcgagatggcgggcgccgtcgggctaacaagacgatgataaggggcggcaaccaccagcaggcggcggacgtcgaggaggagctagcccggaacagcaggcacgccgccgccgtggcgacgtcgcggcaatggtcggcgcagacggagtcgcgcatcgtgcgcgtctcccgcgtcttcggcggcaaggaccgccacagcaaggtgaagaccgtcaagggcctgcgcgaccggcgggtgcgcctctccgtgccgacggcgatccagctctacgacctgcaggaccgcctcggcctcaaccagcctagcaaggtcgtcgactggctgctcaacgccgcgcgccacgagatcgacaagctgccgccgctgcagttcccgccgcaggacctcatggttgggcacctgacgccccacaacatgccgctgatggtgcacgacgagaagttcggacacctcgccgcggccgcggcgctcgcgagcggcggcggcggcggcgccaaggtcagccagcagggcaacgtcgtcgacgtcgacgggaccggagcccaccacttggtggggaggttccccggcggctaccaccggttcatggagctgaacagcgcgttgggcatggtcagtggcgcaatggcgccgccgtataacaacaactacaccggagaggcatggaataacagcggcggcggcgtgcatgacagcggctcgccgcagatcgtcgccgcagccgctcaccactcgccgttcccatcgttgctctccttggctccacgtccgcatcagctggcgttctactcctcggaagctgatcagcagtttcaggtggagaaccttggctcgcaaagcctgtccttgagctcggcgagggcttaccatgatcaggctagctagcggactgcgtactggaacgactcttcgatcgagattaaggtagcaataatgctcactgatcccaaaattcccaagtacaatatactatctagctgtgcaagagtgtgcatgtcagagtttccaagtgccttttaaggatcggatcggaggcagttaagcttgtgatgatttcataattagtagtagacctgaaacagaataaaatgtgcggggcttgatcttgaagcgtacgtgtgtgtgccatacgaatttgttacttctttcaatacacaaaggagtaatattaatctgtatgctggcttgtagaataacaatatatggtttgctaatattacggttttagttataacattttatcttgg

SEQ ID NO: 36862 - DNA, 1807 bp, Zea Mays
aaaaagaaaaaaaaagtcctcataaactatagaggtccagttaagaaaatgaaccttttttcaacactaaggcccattcgataaggaggccgatgcgagtcaggccacatgacaaaacaaccgctcctactcttcagtggcaagcacatgttcactcgagcctgttcgcggtggagagtgatagctggggagtggagagtggcgaacccaagtggcggctacggttttacgatctctttctccttagcctcgtctgtcgtcttccttctacctccgttcctaaaccgtaaaccctagacctctcgtgtgtcgatacgatttgcccattcatggcattctctccgacggcgttgttcttgattactgattgagaggtcggattggtgtttcctttgatctgtgagtggagtttgaggcaaggagaggggcgacatggtccatgggcacgaagaactagttcgatctcctcgttgctcgcacctcatcgtggctgccgagaagaaggcggccgcatcgcccaagccggcgaccgtcgctccggccaaactggccaccgcccgcgcaggctgtaaaagagaccaggaactatggggctccagctattggggcaggacgtggtagatgtagcttctgtggaggcaggatgggaccaaggcgtgaatttggtgagggcaatggcaatggtgttgagggaggttatggtggtggtggatttggagatagtggtttcccgcggagggaggaaggtgatggaaaggctatgggaagaggccatggaccacgtcagccttaccgtggtggtggtcgccgtggtggctatactgatagtgaggctggtgatgagtctggtcgcccccctcgccgggcctatgagcgccacagtggcacagaaacagtagaaactgagggggctcctgctgtggctgaggctgaaaacaagctggaagaagcaccacaatctgaggttgagaagggcaaagagggcgaatcaactgaagtggaggagcctgaagataaggtagttgatatttttaaatggtaagtgctgaaactgcagcttagatatgatttcatgtctccgatttcctaaagctatcatgcaattcttgtggtcgttgatgttgtgtgatagtttttttggaggccagccaaagctgttctcccaagtcttaactaatctcaatattctctgctaaactttcaatatgtttgtacctacaccctgatccatggagcagcataagatgagtgattcataaatactgttgctgaaatcgtagaagaccatggatttaaaaaattgacttattctccattcccactataatacttgctatcttattaaggaaagcaataatagagcctctttctaatcactaatcagttatagaactcatactgtattactatttggtttccaattaatgtggtttttattcttctcatgcacacttactggtgaaaagatgtaacaatacaatctacagatttgtcattatgcttaaattaaccagtaacatacgagtattggagtctttaccattataatcaatctggtattttctgagctgggaagatgccatctgccacatctgtgtcctgtgcaccacctaaagtatttggaactgttgcataactatgtaactgaatgaactgagtgattctgtttatttgtgcagttaataccagttttttgtgttactgacgatggaaaaatatctaggctctgcacagccgcatcgcagtgtttgacattattttcagaaattgtttgccatgctcttgttttttggtgatgatctgttac

SEQ ID NO: 36863 - DNA, 7033 bp, Zea Mays
cccaaatctagggttcactcttccccttccccggcgtgcaacggcagtccaaactatccaagcggccactgggccagcgcgtcttccattcccgctcaacggagcgcacctgccagcatgagcgggcggcggggtccagctgccacaggaggcggacggggaggcggaggcggaggcggcgggaactggcggcggagcgggtcggcgaaggcgaaggagcagcggctgcgcctgggcgcggaggagctcctcgagagccggctaggattcgcgccatacactgatggggagcggcgcctcggatggcttctcaccttttcaccgtcatcatgggaagacgaggacaccggaaaaatctacagctgtgttgacttatactttgtatcacaggatgggtctacgtttaaagtgaaatacaagtttcggccttacttttatgctgcgaccaaggacaagatggagttggaagttgaggcatatattaggcgacgttatgaaggggaaatttctgacatagaaataattgagaaagaggatttagatctgaaaaatcatctttctggcttgaagagaaaatacctgaagcttcagtttgacaccgtacaacaattaatgcgtgtaaggaatgaccttttacatgttgttgaaaagaacgaagaaaaaatagatgctgtggaggcatttgaatcaattcatggtgtaaaaagggtagaaaggccacaagattacataaattacatcattgatttgcgtgagtatgatgttccatatcatgttcgttttgctatagataatgatgtcagaagtggacagtggtacaatgttaatgtatctggttctgatgttttgcttcagagaagggaagacctgcttcagcgtgcagaagttcatgtctgtgcatttgatattgagaccacaaaactgcccctgaagtttccagatgctgaatacgacaacgtaatgatgatttcatacatgattgatgggcaaggatacctgataatcaacagagagtgcgttggagaagacattgatgatttggagtacacacctaaacccgaatttgaggggtattttagagttaagaatgttcaaactgagttggatctacttaaagcatggttttctcacatgcaagaggttaagcctggcatttatgttacatacaacggtgacttttttgactggccatttttagagaagagggctgcacaccatggaataaaaatgaatgaggagattggtttccaatgtgacaataaccagggcgagtgtcgggctaaattttcttgccatcttgactgttttgcttgggtgaagcgagacagttaccttccacaaggaagccaaggtctaaaggctgttacaaaagccaagctaggttacgatcctctggaggttaatccagaagatatggttcgctttgcaatggagcagccacagacaatggcttcgtattctgtatcagatgctgttgcaacatactatctatacatgacttatgtccatcctttcatcttttctcttgcaaccataatacctatgtcacctgatgaggtactgcggaaaggaagtgggacactttgtgaaatgctgctaatggttcaggcattcaaggctagtgtcatttgtcctaacaagcaccaagctgatcttgagaagttctacaataaccgtttattggaaagtgaaacctacattggtggtcacgttgagtgtcttgaaactggcgtctttagatctgatctccctacaaagttccaacttgaaccattagcatatgagcaactcattggaaatcttgatcgtgatctgcattatgtcattgctgtagaaggaaagttggatattgattctgtcacaaattatgatgaagtcaaggatgccatagagcaaaagcttgttgcattgcgtgatcacccaattcgcgaagaacgccctctaatctatcatctggatgttgctgctatgtatccaaatattattttaaccaatagactccagccaccatccatagttacagatgtggactgcacagcatgtgatttcaatcgtcctggaaaaaattgcctcagaaagcttgaatgggtctggcgaggagagacctacatggcaaaaaagaatgactattatcacataaagaggcaaattgaatcagagctgattcaatctggtggcattgcatcgtcaaagccttttcttgacctctcaaaaccagaacatttacttaaattgaaggatcgtttgaagaaatactgccaaaaggcgcacaaaagagttgttgataaaccaattactgaagtcagagaagcgggaatatgcatgcgtgaaaattctttctatgtagacacagtgcgtagctttcgtgatagaagatatgaatacaaaggtcttaacaaaacatggaaaggaaaactcgcagaagcgaaagccagtggaaattctatgaaaattcaggaagcgcaggatatggttgttctatatgattctttgcaacttgctcacaaagctgggaagaagctaactatatcttatccctgtgtcatgcttaatgctgacgttgcaaggaacaacactaatgatcaatatcaaacattgaaagacccagtaaacaagacatatacaacacacagtgagtgttccattgagtttgaggttgatggaccttacaaggccatgatcttacctgcctctaaagaggaagggattctgataaagaagagatatgctgtcttcaatgaagatggcactttggcagaacttaaaggttttgaaatcaagcgtagaggtgagctgaagctcataaaagtttttcaggcggaggtatttgacaaatttcttcatggttcaactttggaggaatgctattctgctgttgcctctgttgctaaccggtggttggacctactggataatcaaggaattgatattgctgacagtgaattgcttgatttcatatcggagtcgagcacaatgagtaaatctttagttgactacggagagcagaagtcttgtgctgtaactacagcaaaaagacttgccgaatttcttggagattcgatggttaaagacaaaggactacattgccaatatattgttgctcgggagccacaaggcactccagtgagcgagcgtgctgttccggtagctatattcgagacagatcctgagatcgcaaagcattatttaaggaaatggtttagattctcctctgatgcaaacattcgatctattgttgattggtcttactacaagcaacgcttaagttcagctattcagaaaatcattacaattcctgcagcaatgcaaaagatctcaaatcctgttcctcgagttcttcatccagattggttacacaaaaaggtcagggagaaagatgatcgatttcggcagcgtaaactgcgtgatatcttcagtcccttggctaaagaagaggggctgcataacttgaataggactggagatatggaagatttattaatttcaaacaaggatttgaggaaaaatccttctcatggtttagacattgacaaagaaaacaatccaaatggagcatcagtgggatctggtttgaatattagtaaaaaacaacaaaactgtatgactgggttaaatgttccttgcacttcacaaatccaaaatgctgcttcttatgaaacagttgataagggtactgactatcaaggatggcttgatgctaagaaaagaaaatggaaatatgtccgtgaacaaaaaaaacgtcgaaggttgggtgctgccgccacttttgacgatcctaacgctttgctctcggccagacatgccaatcagctacctgtcaacagtcggaatagatctacatttttccagaaacaagaattggccctctttagatcacattggcagataatccagcttgcttcaagtacagtgcctggtcacttttttgcgtgggttgttgctgaagggattatgttcaagattcctattaatgtgcctagaactttttacctaaactcaaaggctcctgtcacagaagagtttccaggaaggcgtgtcaaaaagattctcccacatggtagaccttgtttcaaccttattgaggttgtaacaactgaagaacagttcagggctgaaggcaaaaaacttgcagctcatctagcagagccagatgttgagggaatatacgagacaaaaattccaccagagctcaatgctgttctccaaatcggatgtgtctgcaaagtggacaagtctgcaaaaagacgaagtatacaagatggatgggatctagccgagttgcaaatgaaaacaaccgccgagtgctcatatctggaacagacattttcatttttctatttataccacagcttgagtgaaggaagggctgtatatgtattttacttccccacgtctttccgaatacatgcagtgattgtcaatcctttccgtaacaaagaaatatctccgtcatttcttgaaaagcaatttggagatgcttgccaagcccttggttctgtccctgagaatctgtctttccatgtggactaccaaacatcaattgatgctggaagcaaatacgcacaaagaatgttacttgagtacaggcaacaacattctggacctgtcgtaggcatcatagagtgccctaagctccaagctataaaggtagctatacgagcacttgatgatttgccatgtgtaaccattcctagcaatgcacgtgacaacaactatcaggctcttggctggcaagcaacagctggccgaacaagtatgcagcgttgtgctgcatcaacccaatggttcaatgaacggatttcactcgctaaatatgcacatgtgccactgggtaattttgaactagactggcttctttttactgccgatgtattcttttcaagggcattgcgtgatcaacagcaggtactatggatatctgatgatggcattcctgatttaggaggcacttatgaaggagagacatgttttgctgatgaagtcattcagcctgcacttacttatcctggtgcatatagaagagtttctgttgagcttaagatccaccatttggcggttaatgctctcctaaagagtagtcaagtggacgaaatggaaggaggatcaatcggtagctttggaaacgacgtgcctccgggttcaaatgccactgaaactgactttgatgatgctagcttatgtatacctgctttccaggtgctaaagcaacttattcaaagatgcatttcagatgcagtgtcgtctggaaatgtatttgctgatgcaatattgcaacatctctaccgctggctttgcagcccacgatcgaaacttcatgatccagctctccatcgtcttcttcataatgtgatgaagaaagtctttgctctattgttggccgagttacgaaagctgggggctaatgttatttttgcaaacttttctaagataatcatagatactggaaaagtagatttgtcatctgcacatgcatattgtgacagcttattaaggaccttgcagacgagggacctcttcgagtggatagaattggaaccattgcacttttggcattccttactgttcatggatcagtataactatggcggaattcaagctaaaacacaaaacgtagactcttcagatggtgataatgatattgatattgtctcaagctggaacatggcagaagatttgcccaaagatacacaggatcattttgtcttaatcgtatcagaattcctatatattccgtggaaattcatgaaggaacaagtagctgctcaagctaccataagggatgatacctcatgcactccatctgtaacaatcatggctgctgagaatcttgagggccaggtgatagaacacctccgtgacaagcaattactttgcagacaagcttctaagaactgtaagtgatatacttcaccatttcaaagggaaaagcaaacatgagtcagatgaacctgcaaaatctgatcctcacacgcataaaggcgatgctgcattggagttcattaagcatatctgtgcagttcttgctcttgatcaaaatgttcagcatgatattttgagaatgaggaagaacctgttaaagttagttcgtgtaaaggagtttgctccagaagcacaattccaagacccatgcgcctcattcactctgccaaatgtgatctgcagctattgcaacgattgccgggacctggatctctgccgcgactcggcactccagggccaggagtggagatgcgcggtgccgcagtgcgggcagccgtaccaccgcgagcagatggagaacgcgcttctgcaggtggtccggcagcgagagaggctgtaccacctgcaggacctggtgtgcgtgcgctgcaggcaggtgaaggccgcccatctgtcggagcagtgttcctgcgggggctccttccggtgcaaggaggagccttcgtatttcctcagcaaaatgcgggtgttcctgaaggtggcggtgagccaaaagttcccgctcctgcaggactgcgtgcagtggattcttgaagccagatgacgcgggctgctacttcaacatagttcattagttcacctgatcgctaggttgtacaacgtgcacaggctgtagctccgaagagtgtataaacgggtgtatagcgctgccacagttcattgtagctctgccctgcttgcaaaaggttgttgttgtattgtagatattcaaaggtggatggcgagaaacgatagtaaccttggtatcgaaacatctggataactagccctctcgtatgtgattgctgggcatagactattctaagttatgatgtgggcatgtggttgcataagcggtttcgatgacgtgaatagaaatacacgcgtcggaccgtatgctgccagcctgccagtacactgaccttggccacgtcatactagttgtctgtttctgttgccaatcctacactgtattatctgcacaaaggaaaatgaaacggaggacgttgtgctttcgaggggccaggactcgttgggtggatgaagcacgcgtgcccggtgacctcagccttta

SEQ ID NO: 36864 - DNA, 1808 bp, Zea Mays
cttctatctcttgtcatgtttcctacaaaaggatcagcagcagttctatttcaataagtttctatcccaaatgttatagaggaaatgcaagttaataatgaggcaccactagggtgcctcaagccaaatatttctcagtataactctccagagcagataggtggtgttgaagggtttcctgagaataatgaaaaaaggaatgatattgttgctgcggaaaaaatctgggaggcgactccaaaccaaggccttagcaggcccatctaccgacaagaattttatgcctggccatatatttattcagattatcaaatcgtgcgtcagccactaccttatggttttgacaaccaattttatcagataaatagggaccacggtttccctattgagaacagggttcaatatcttccattcaagatgctccctcaaggtcacccccatgatgcacagcttcaggaatttcagtattttgtggttattgactttgaagcaacctgtgacaaggtgaacaatccatttccacaagaaatcatcgagtttccatctgtcttggttaacagtgcaactggaaaactcgaagaatgcttccaaacatatgttcggccgacgtatcatcaatttttgactgatttttgcaaggagcttactggcatacaacagattcaggtggacagaggtgtgcctctaggtgaagccttactcatgcacgataaatggctagaggacaagggcatcaagaacacaaactttgctattgtgacctggtctaactgggactgccgtataatgctggagtcggaatgcagatttaagagaatcaggaagcccccttattttaacaggtggatcaacttgagggtaccgttccaggaagtgtacggggacgtccgctgcaacctgaaggaggcagtccagctggccgggctcacatgggaggggcgcgctcactgcgggctcgacgacgcccgcaacaccgctcgcctcctggcacttctgatgcaccggggcttcaagttctccatcaccaactcactggtgtggcaacctgccgccgctccgcagtcaaccgccgccacctgccacttctccccggaccgctctccggacccagtcgtcgtccagctccagcaccagcagcagcagcacaagccgaaggaggcgctggggtctcccgcgtcgctggtgaacccatcgtacgccacccccgcgggagggaaggacagagccatgtactgctactgcggggtgctgagccggtggagcgtcgtgcgcaagccgggacccatgcaggggcgctacttcttcgggtgcgggaactggaccgccacccggcgcgccatctgcccgtacttcgcatgggcctcgtgaatagcaaagcaagcagagatctgggctggtgctttaaccgagggaggcgcgccatgttgctgcggctggctgctgcgcctcccagttccgtatatattattattgttattattatggtataataactttgctcgcgagacaatggaggttatctaggtagtgtctctaacctgtcgtactgacttctgtcgatagaagagaatggggccagatgctgcttaggtgtgatctatcctatccatccatggataataaagaagtttgtggattgctgttttattaacttgatggaactcctccgtaggtgtggtttgtgcaacttggattttgaaggcttgtgcgtctgtgagtgtttgatcaaatcgaaggtggtgtttgtttgctgaatgaaatggttatggaaggtgcctattattcctgacaagctctgttcagtgaga

SEQ ID NO: 36865 - DNA, 1156 bp, Zea Mays
cttcgagctctggcagtctggcacaccgcactctgccacaggtccacgcttccaccagcccactccccgtcgccgacctcacccccctcatggacggtggccgagccgcagccgtcggcggcgacccctctcccatcgctgctccttccaatcccccggcgctgagcagccggcccgtcgatgtctcctcgttcacccataccccgtgctactgcgaagaaaatgtttacatgttatgtaacgagcttattagaaccggagtggctgatcctgcgggcactgatctttatgttgttttcatatccaacgaggaaaaaaaggttcctctctggcatcagaaagcaggccattctgatgatggatttatttgctgggattatcacgtgatatgcatccaggcgaagcaaagaagttcttgattttgtttgggatctggactccgatcttcctttcccttccccattgatccaatatgtttctgaggcgattcaaccactatcattcggcaattccagatatgcaagactcttccgtgtggttcatgctcctgtgtttcttcaatcgtttgcctcagacagaagccatatgaaggatcctgaggggaactggattcagttacccccaaaatatgaaccgatcgtggctgaagatggaaccaccaataacctcaatgagtacatcatgatgtctgtgggggacgtggcagacagagaaaggatggctaatgatgtttactgcaacaagcatggtgtggtgctaaatgaaacgatcttccctgaattcttcgcccagctgcctgctccacatacttagcaagcgatctttctgttgtgatgggttactctgtacacttcaatagtgcactcacaagattatgaattaaaatatatgggcactattggacacatggtgcctctaagtagcgtttcagatagatcctggcctgttttggaaagcaaaatgtggggatctcatagttctgttagcctagacatctgaaagcttcatcttgtcccaaataatgatgactaggtcatgtttaacggctttagctttctttggtcattgttcgtcgaaacttatatgaacataacacttctatgtgctcgttgttaccttacaagtaaatatgcaacccataaactttaaacttgca

SEQ ID NO: 36866 - DNA, 1054 bp, Zea Mays
ctcggtctccgcgattaagcatgaagacgcaggcaccaggcagacggacctaaaaaggagcctttgcttctcgtagctccctttaccccttccttttcttttccgctgacagaagccgtaagcatcttgctgctgcgcgactgcgcgagtgctcgtctctccttgtcctcctactacagtcgtcgtcgtctctctccagggacacacatccgccatcacctttgcttcttcgattcgcaaggagcacgagtactcatggagcagcagggacaggggtggaggaggcggcagatcccggcgttcgggaggtggaaccagcataccgacgaggcggggtacttggagtcggcggtgcaggctggcctcgtcaggcccggccactgctaccacgacgacggcggcaacgaggttgtgctgttcaggtcctccgcctcgccgcctccgcacaagccagccaagaaggtgcgaagcacgatggagggtcacggtcaccaccatcaggttcaggttgaggcggggagcaggaagcagcggccgttcgtggcgggcgacgggtcccgctcccgcgcggccaagccgaggccgagggtcgttagggcggcggtggacgaggacctgtacattgtcccttccgatatgtcgcgcaagaagaaagggaggaaacacgtgaggagcatgtggatggggtgcgtgggcctcaactgcgtcgcctgaccagacatgaccggaccttccgagcctttcttccagctttttcgggtcgcatggaaaaaagagagtccacgagacagacaacccagactatctgtttcatcccatccaatggatgatcgtcaatcaccacgtcggacacgggctcgatgcctgccgtccatccggatgtcgcatatgtatattgcctggtgctgtcattgtgcatgggtatatcaccaggcggcgtgagttgtctgtggtccatgtctacgtctacattgcatgcacttttttttacgataataataatggatagatatttggcttcaatatcttaaagagaggatcttttttcgctggt

SEQ ID NO: 36867 - DNA, 1912 bp, Zea Mays
ttgcaattagcgctgcattggcaactacgctggcccatggatgcactgtgacgcgctggcccatggtgagcttctgatgccaattaggactaaacatgcttcctcgctgcgctcaagtgggagaacaagaaatcagcctagacactagtcatctgctgcaagcagaaaatgcacccttattcacttaagagttccaagggagcaccaattctgccacggccagtcttcgttttcttcatcgcgacatttggtttctatgtatgctatctctccttcaatcagataacgctagagaacaacagagaggggaatagtcgagaagaacaaagggacgatatttgcagaaagccttatgtgccgtatgaggagctcagttatgtgcactttccaaaacctacaagttatagcaggggggagtgctcgtgtactcctgttcggttctttgtaatcgtgtctatgcaaagatcgggaagtggatggtttgagaccttgatgaatagtcaccctaacattagttccaatggcgaaatctttaacagaatggatagaagagaaaatatatcgtctatcttacaaacgcttgatacgctgtataatttggactggctcaccagcgccgctaagaatgagtgcacagctgcatttggactgaagtggatgcttaatcagggaattttggaaaaccctgaagatatagttagttatttgaacaagaagggtgtctccgtgatatttctgttcaggaggaacacattgcgcaggcttgtatctgtgctggccaacgactatgacaaagatgcaaagcagttgaatggaactcacaagtctcatgttcactcaaaagaagaggctgagatattagcaaaattcaaaccacatctggatacgtcgactctaattacaaacatcagaaacatcgagaaggccatcagagattgcttggaccacttcaagagtacgcggcacatgatcctctattatgaggatataatcagcaacagcaatgcattatcccgggtgcaagagttcctcagggtcccggtgaggaggctgatgagccggcaggtgaaaattcacacgaggcctcttccggaccttgtcaagaactgggaggaagttagcagcaaactgaacgggacagagtttgctcacttccttgatggttcagattatgccaagtgatggacggcaggttattcgcatttggagttgtagttgcaaacatgctttagaattcttttgtacagatgagtttgtaaagagcaaggcatgaagacaacagatgacgatcacaagtgcagatggaatcgtagaaaatattcctagttttctccttttttttgtattgttattacgactgccaataagattgcggccaagaatagctggcttctgactatcagatcagacaattctggaccaaagataataacgtttcggcatcatattagcagcgggtatacccccgaacaacttacgtaaatgctttgcacaggagtaaaattccactcgaaaaaatgtttacaagtacaacatcgctaaagatcgtacggatgtcatggtgcacacatgggctctcatcttagcagaggcagactattggcgtcgtctctttatcctctcgagggcgcccagctgctcattcccttgggcacctgagctttcctcattgttctcggcagctctcttgccgagctcaccaaataccgcagcaggaacgctcttctccgcaatttggacatcgggttcctcatcgtcactctcatcgggcagctcaatgtcctcattgttagcagcctgttgcctgctgctctcgacctgggcctctactccagcactgacaaagttcatcatcctgttagcagaggctggggcagtgcttggtgctgctggtggggcagtagatggtccg

SEQ ID NO: 36868 - DNA, 3104 bp, Zea Mays
ccgaaatccgaaacctcccgcggtctcgcccccacccctcacaccaccgcaccaccggccaccccctgccccgatgcagcccgacggcggcggcgcgattcgcgtgctgaacgtggcggagaagccgtcggtggcgaaggcagtggctgagatcctgtcgcgccgctcggcgcagtcgcgtgcgggccggtcccagtacaaccgcattttcgagttcaactacgccatcaatggccgcgcctgccacatgctcgtcacctccgtcacgggccacctcatggaactcgaattcgatgaccgcttccgccgctggcactcctgcgaccccgccgaacttttccacgccccagtccgcaagtccgtgccccaggacaagcaggccataaaacaaactttggaagaagaagctaggagatgccagtggctggtgctatggcttgattgtgatagagagggtgagaacatagcatatgaagtgatcgatgtttgtacacgtgccaacagtcatcttaacatttggagggctcgcttctcagctttgattgatagggagatacatgaatctgtgcaacatcttggcaggcccaacaagctctttgcagatgctgtggatgcaagacaggaaattgaccttcgcattggtgcctccttcacaaggtttcaaaccatgctgttaaaggatgcatttgtaattgatgtgactggggatgagagaagtttggttctgagctatggtccttgtcagtttccaaccctaggattcattgttgagcgtttctgggagattcaagctcatgaacctgaagagttctggacaataaattgtactcatacttcagatgaaggcactgcatcttttggttggatacgtggtcatttgtttgattattcatgtgctattagtatctatgaaatgtgtgtttcagaaccaatggcaacagtacaaaatgttaggaatcaagagaagctaaaataccccccatatccactaagtacagtggagcttcagaaacgtgcttctaggtactttagaatgagttcagagcacacaatgaaggtggctgaagaactttatcaagctggattcattagttatccgaggacagaaactgataacttctccccaaacactgacctgcatgcaatcgtacgtgaacaagtgaatcatccagtttggggagcatatgctcagcgacttctaaatcctgaagcaagactttggaggaatcccagtaatggtggtcatgatgacaaggcacatcctcctattcatccaaccaaattttcagaaggtgaaagaaactggagtccagaccacactagattgtatgagtttgttgtccgacatttccttgcatgttgctctcaaccggccgttggagctgaaacaactgtggaaattgacatagctggtgaacagtttaatgcatcagggcgtgtcatacttgctaaaaattatctggatgtttaccgctttgactcatggggtggaacgttacttccaacatacaacattgggcagcagtttgttccgacaactttaacacttgattctggagtgactcggccaccgcctcttctggctgaagccgaccttcttagctgtatggataaagcaggaattggcactgatgcaaccatgcatgatcacataaaaaagttgcttgaccgttgttatgcaaccaaagatgaaaacacacgtttctccccgacaaatcttggtgaggcattggtgatgggttatgatgaaatggggtatgagctttggaagccttatttaagatcaatgatggaagctgatatgaaatcagttagcgtgggtactaagagtaaatcagaagtacttgagagttgtttgcagcagatgaaggcctgttttcttgacgcaagggtgaagaaagcaaaactccttgatgcaatggggacattctttgcaaggtctaataggcctataaatgaaactcaaaatccagtagaggttgtgaggccttgtggtgcatgcaatggatctgaaatgttgcttaagcgaagggcgagtggtgaatttatggttgggtgccgaagttatccacaatgtagaaacgtggtatggctcccaggatctctttcagaagcggctgtaactaatcaagtttgtcctatctgcgcaccaggccctgtttataagattcaattcaagttccgtcggagggatattccaccaaatttcgatgttgatcacctaggttgtgttggtggttgtgatgatatcctcaaagaccttatggagataagtaggtttggaagtcgcagccaggctgcaacaccagcaagaggaccaacaccaaatggtgtgggtcaggggactccaagacaggatttacatactatttttcgtccggcaagccagcttaataatgataacccatcggttatgcattctcaaggtttccgttcaacccatacccaaaatccaagtaatgcatcaggtcaagtgctgtgcacctcatgtggagcgctttgcatatcacgaattgctaatacagaggctaacagggggaggaggttctacaaatgtcaagatcctggctgtggcttcttcaaatgggaagacgaagtggacaatggtacggggagaggccgccgtgggcgcggcagcagcaggcaggcgtctgcgtctgcatctgcaggacggagaggcggaggccggagaggcagaggccgtaacgctgacggcgggatgttcgtttcagcgacgggcgacaccgtgctcggctgctgctttaactgcggcgatccttcccacttcgcaaacgcctgcccgaaccggagatagttatcagggagctgctcgctatgcgtgtacagagactggcagcgtccgccaaacgatgaagccttcggatggttttcgtgtactgaggtgcatataagtgcacctgacaagctcattttctagacaattactaatatttttaaacaaaatgcagctattaggctgatgctagttcagcaaatctgacggcacttatttacaaaagttagggcgcgaaaaactgacaaaggaagagatgcaaacacgagctgatctactaaggtttcgataacaagtttctactcatcgt

SEQ ID NO: 36869 - DNA, 287 bp, Zea Mays
tggacggtattcggtcctccggattttcaagggccgccgggggcgcaccggacaccgcgcgatgtgcggtgctcttccggccactggaccctacctccggctgaaccgattccagggttggcgggccgttaagcagaaaagataactcttcccgaggcccccgccggcgtctccggacttcctaacgtcgccgtctgccgccacgtcccggctcgggaaatcttaacccgattccctttcgggtgacgcgcgtgatcgcgctatctgccgggtttcccccgtccctt

SEQ ID NO: 36870 - DNA, 2698 bp, Zea Mays
cgcgaatcttcttgctcctcgtaattgtttaagcgcaggagcgaagtggttcgttgttccaccagatcccctcttttggccgatctctcttccgttccgttccgctctgccgcagccaattgcttctgctgtgtccttttcctcccagcgagcaccttaccttacctctctctcctcgttgttgtgttgttgattgatcctggaagccgcagctccacaagctcccaaaaagcaacaacctttacctcgttgttcattgtatcttcctttcttccctgcttctggctccgccgccgccgcatctcttctgaagctgaacccgcgacagctaaccgccattgtttgcaggggagacaggagcgagcgagagagagagagagagagagagagagagagctcgcgacaaggttttgcccgcaccatatcgtcctctccccgcaagctccaaaagccaggtccagggactaaatagagcaaaggaagcctttcatcatcgtcgtcatacactaatcgaacgggagaatcggagggagggacatacatcacgtttttgtgctcctccgagtccgtccttctccaagatcccccattttccttctcgtttccaacctcctcctccttcctgaccgaccgatggcgatggtgtgacgccgccgcccgtccccgacaccgctgcgacctcagcatttccacaccgtctcggtctgggtctggtcttcgtctccgcctgcgccttcgttttgatccttaagctgagcttcccttccccgagcgccacctccgcccgtcctaccatggcgctggcttcaatgtgatacgcggaggtgcggtcggtcggtcgtgactcgtgaggaataggaagagggtaggagaggagaagaagagccagcgccggcgggaggggagatggcgggcggcgagggggagatgcggtcgctggcgctcacgcccacgtggtccgtcgccaccgtgctcaccctcctcgtcgcgggctcgctcctcatcgagcgctccatccaccgcctcagcaattggctgaagaaaactcatcggaatccactttacaaagcaatggagaagatgaaagaagaaatgatgctgcttgggttcatatctctgcttctggctgcgacgtcaagaatcatctcggggatctgcatcgactccaagtactacaacagcagattctccccgtgcaccaaagaagaggtccaagaatcgataaatgcagagcatgccattgctcacgcgcgcaagcatctactggaggtcatcctgcaccattcaccgaggagaaatctgaaaactagttaccataaccatgaaggctgccgtgagggatatgagtcatttgtttcgcatgaaggtttggagcagctgcaccggtttatatttgtaatggctgtgactcatgtgacttatagctgcctgacgatgttactagcaatactcaagatccataaatggagaaaatgggaggatgaagcattcagggataatcatgaatcattttctcagatcgcatatgagtcagcaactagaaggcaaccagcacttaccaaatcctattcattccgctcttggagccaaaataatgtggtcatgtggcttgtttgctttattgcgcaatttggtcagtctgttgttcgagcagactatcttatcctccgcaagggttttataatgacccacaatcttccgccaacatatgatttccacaattacatgatacgctcaatggaagaggagtttgagaagattgtcggactgcagcatgtgattgcgactctaacagcagagggcgcaaagatgagcacctacgggccaaggatacagccaagggatgatctcttttggttcaagaaaccagagtttctcctttggttgatacacttcgttctctttcagaatgccttcgagttggcttcgttcttctggttctggtggcaatttggttatgattcatgcttcatcaaaaaccaccttttggtatattgccgccttatactggggtttgctggacagttcctgtgcagttacagtacattacctgtatatgcgctggtcactcagatggggtccaagtacaaggctgcgctgatcccgcggaggatcagggagaccatacatgggtggggaaaagcgacgaggaagaagcgccggcgccgccgcggcgacgactcgacggtccgcacggagacgagcacggtgtgctcgctcacggacgacgacgaagacttcgaagacgacgacgaccaccaccaccacggaccgtcgtacgataccccgagagccgggggccgcccgccgtacctgaagatcgagacgcatcgtcagtcgggcagcgggcacgacggccccaggcccggcggcaccccgtgcttccaccccagcggcagcggcagcgggcacgccatgctcctgcggcaggcctccgtctccgcgccgtcgtcgccgtcgtaccgcggaggcaataacgtgacaaggtcggcgtccatgcccgggatcgccgcgctgaggacaacgggctccggcacgccgacgcgcgtgagccatgaggagcctacttgatgcgcgcccgtgcatgccatggatggcttgctagtgcagacgtactgaggactgagctgctagtgtagcaccggatttgaaggtatatcgatatatatatacacacgaaaagatttggggtgacaaa

SEQ ID NO: 36871 - DNA, 162 bp, Zea Mays
ttatctggtaatgcattaaatttctcgctcgacatgagttattcacagacaaagacttctagatggttggctctggactcatcgggcgtgtccactagacgttatgtactattaatggctagttttgaaactaacagtcagagtgtcacatatggctagttt

SEQ ID NO: 36872 - DNA, 85 bp, Zea Mays
gagaaacatacctttatccttgatttgtactttgtccaccttttcacaattaggcacttgtgttggacactaaatcaccaaaata

SEQ ID NO: 36873 - DNA, 1666 bp, Zea Mays
gccgccgcaacaaatccgcgcacctcgatctgctcaagtgagcgtggctcaacgagaaggccacgtcagatatcctcagcttcgaatcgcccctcgcgttacgtgtccgcgagcagatccagcacctcatacgctcttctccctcccccttcttgaccacgttcctccactcccccccatagctctgggatctggccatggctccctctcctggtgtcgtgtcacccaggaggcggcgctcgatgacttcgtcgacgatggcgttgacgacctggtggtctcgctctaccagatggacctcgatctcacgctcttcctcctccgctcctaactcctcccggagaagggttccacatgcacattcaccgagtcaatcctgcgatcgtgtggcttccatactgggctgttcacctcaccacatttgatggatgttagagagcgatttcagctagggttaatatttgaatatttctgaagagaaatttttgaagtacttctggtggtgctggaacaagttgaagcctatttcaggttcctcgcgctgctcgcattcaagatattttctgctgagcaggtagatgttgctgttctcgaggttggcctaggagggaagtttgatgcaactaatgtggttaaagcacctgtagtttgtggcatatcttcccttggatatgatcatatggaaattcttggtgaccaaatcctgttcttggtgataaacttggtgtcgataaacgggttaattctgttggcaaaattaggatgacacaggtgacatgaagatgccaagtcggtgcatccatactaattgcgactttggtctgtttggacctctggtaaacgacgtagtaggtttggagacctggaactacaaatcaatagtattgggacttaagtgacaacctgaacaagtttaggaacaacttgctagaaaatttttatgctttctaccaatcttacaacgataatttgaaagttgatatttatggtacttatttggtccaggaactagattttttgtacattctttcggatctggattaaacaacgctctctttgtatatgaacaatgctctataaatatacgtttgataattttatatgatatttaataaatagtagctactgtgactgtttcattttgtttttcttaggttgttagttctcatgaatgtcatgttgtctcgaaataaagagcttctgtccgcacctaatcgcctaaaatggaaatgtttgactcattgtttaattcggggggaagctgaaggtggtctgatccgggacgatgttagcgaaagtcaatttaatcaggtgctgaacattgagttgcaacaaatcatcgatggagactgtcaccgcagccagaaaaccacggtctcaatttgaggagcctttccatctatgtttgttagaaggcatataatgcctatttatctcttgtattcgaacatttggcaattaagaaatagaagattacttccccaatatcccttattcctaatctcacctttcacggcttctggtgaacaatcacttgctattaccgactgacatgtccactcctcatatgtgagatattggggttgatatatatgttgttcgtttccatgtaattattgtgtactaacatttattgaataatttttacgccgtaacaacgtacggg

SEQ ID NO: 36874 - DNA, 5029 bp, Zea Mays
ttcttttttaggaaccggccttataagcaatattgtgatactctttacatgaatgtaggggtgtcagtataatcatgatgctttgtgtaattaggtatccaagcggcctcgttctgaattaacagaagtctcttctcatactggcaaagatgtttgtgaaaacatacaagacccgaatggtcaggttggacactcttggggctgggacgatgagggtgtcgttatggacatcaatatacttctgtcagagtttggagattttagtgacttctttcaacaagaggagttagattttggtgagcctccaggtactgctgaatcacatgctctagtaattcctgcttcagactgtggagatgtcacattcacagatagtccatcaacagcaatggatatccctgaacaaagactttctcctgttggtttcacaactttggatgcatttgaccatcaaattatggccccagctcaagatgttgttgctaaagttcaagaacctcataatgatactgcaacacctgcacagtcccactcgcaagttttatcatctggaagatttgattatcttaccaaagctgaagcaaagctcacatttgctccagaatatgcagctgttgaaattttgattgctgaggccccaacaccattgtttacaaatccatactttcctagatcaaagaaaccaggcagttctagttttagtgcaagagtttattcatatgatgttgcacaaagctctcaaattgaatccacaggagacaagccagataagacttctaaactaatatctggtaatcatttacatgatattagttcatcaaacttgtacacacttgtccaaggtgggaataaagggagtgataagatcttaaagagtactgatacacagccctctaagggagaattgtcaccacctatttctggtgtgacttcatttaatttttctcttgtttcacaaaagaagagtggcaacatgttcaatgctggctattttctgctgtctatgaagactgctttggcaactgaaattgaatgcatcacgttccaggctgccatgtgcagaattaggcatacactattgtctctgagaagcaaagcatctgccgagtttaacagtgcaacatccagcttcatacagacaaatgtcagcaacaaatcagatctcacccccagatccttaatggacaatgtgggagtttggaggcctgttgttacacctaaagggcctaaatctcttgagtctttgtctgctaacacattaactggtgcaagcccaagtctgtctatacaaagacaacctgttgtagatcttctctgtgccatgactctgcttgttcaacaatctacttcgtttgttgatatgtcacttgatatggatgacggggacggttcttttttctggctttccctggatgagcaaaagagacgtggattttcttgtgatccttctatggttcatgctggctgtggtggcctattaggaacatgccattcaaaggattgcgctggtgttgatttagtcgatccactttctgcagaggggtcgaggcaatgctgctgagtctgcaggtacgggagatgcatactcttttcagtactccagtggtgatatcctggagccgtcaagttcgttgtccattggtggagattcaatgagcccaccccagccaaccagtagcaatcgaggcatttcagaattagagttccaaaagggatatcaccgtgtcagaccaaccattgctgtcctcccttcaccttctatgctagtcggttaccaggatgattggttgaaggcctcggtgaatagtcttaaaacatgggagaaagctccttttgaaccttatgccttgccgaagcctgttacttactatgcactttgccctgatattgatatgttgacttcggcggtagctgattttttcatgcagcttggaacagtttatgaagtttgcaaactgggaactcattcgccccaaaacaatggaggacaaatggaactatctcctggaaaatatttgccttcaggacttgttctagttgattgtcctgagcagttgaagaaggttcgctgtggccacttaggtcccatcagttcaacaagtgactgtcttcaagctttttcaaaacattggagcgtgaaaagttttgtaacatctatttcaaggatacttaaggatataaagctgacttcaaacatatctacaaatcagaaagagagcagtagtggaccttgcacagtaatttatgtagtttgcccatttccagaaccttgtgcaattctacagacgctagtagaatgttctgttgctcttgggtatgttatttcatccccggaaagggaaagaaagttactatattcacaggttgccaaagccctaaacagcagtgcttctgtagatgaagcatcagcatcaaatgtcgttatgctatccgggttcagtatacccaagctcgtcttgcagattgttactattgaaactgtactgagaatggataagccaaacaaggagcttgctgttttgaaggacatagcattcacagtgtacaacaaggcacgacgaatcccacgggctgtctccacaagcgatatgttccagtcaccaacttatttgggtagatctcagtccacaatgatgcatgttacatctcctgctcctactctttggaaggaatgtttagttcctcgaatgtctgggccaactctctctcgagaaaccgattttgatgcatccatgaggtcggcaacatgggataactcatggcagcctgctcgttcgggaggacttctggacccaagtaagctgcctgatttatgtgctcaggatgataggaaatatgcctttgagccacttttcatactagcagaccctgggtctgccgatcttaatgctttaatggaaccatcaaaatctggagcagatgcatctggcagcagggtatatggctcaatttcaggaagtaactctgatagtggagtgagccctctactcgacgtatctgagagtgacagtgcagcaagtcttcattgctgttatggttggactgaggactggcgatggctagtgtgcatttggacagatgctagaggagaattattggacagcttaatatttccttttggtggtattagtagccgccaagacactaaagttctccaaagccttttcatccaaattctacagcaaggctgtcaaataatgtcgtcttcacctgaggctagcaatatgagaccacgagatgtcataataactcgtatcggaggtttccttgagcttgaaatccaagaatggcagaaggcaatatactcttatggtggcaatgaagtgaagaagtggcctgtgcagttacggcgatccatacctgagggtattccacctagttcaaatggtcctacgctccagcagcagcagcagcaagacatggccttaattcaagatagaaacatgccttcctcaccaaaccctctgtatagccctcatccaaaatcaagcttcatgaaaggtgcacttggacaatctggcaacaaaaaacagatccttgtggaacaaagtggaatggacacttcaaggggatcactgcacttagttcgtagcatcagtttggttgcagtttcccaagatcattcgttgcatctcacatgccaagcagatctactgagcagacctgcttcagctggcgaagggagtcaaggcagcagtggcccttggagttacctggaaggtttcactccagtgaagtccattgggtcaatgtcagcgtcacactcgtaccttctagttccttcgccaagtatgagatacctctctcctgcaacattacagctcccgacatgcctcacatcggagtcaccgccgcttgcccatctactgcacagcaaagggactgcgattcctttagcgatgggctatgtcgtctcgaaagccgtcccacctgttaggagggactctgcacaactcaccaaggatgaacagccctctgttctctcagtcagcatcatcgatcactatggaggcagcagtgggactgttcaagagaagatgagccgaggcggcggcggcggcagcaaacaggcaaggaacttgagtcaggagacaacaggtcgtgagtgtgagatggagatgcatagtgtgctggaagctgtggccgcggagcttcactctctgtcttggttgacagtaagcccggtgtacacagaaaggcgcacagcactgccctttcactgtgacatggtcctaaggatgcggcggcttctacactacgcagataagtatctatctgaacctaagggagagacaactcactaattgtcatgtacaattaatatctagctaggtaggtatgtgagggcacatttgacgagctttgtagactgattttgcaataaccctgataacttacaggtggatgctgtaacctttttctctttttttaggtctgtattgtttgtcgacacaagatttgagatatgattccgtttgttgactgtattaatcagaattacaagtacagcgtttactgggattgccgtgccctactgcgacgacgtttttttttcctttaatcagaaatacttgtaaaatcaaaatcatctctccgctacggctattgctcacaccccctggctggaataggcagcttaaaacccaggtaaaactgacaggtccgcaatccccttgggcaaactctcaatcttcctcagcaacgttagccggttgttgcgaactctctcgtcttcctgcgcataatatacaccatcatcactctcactcatcagcacaagttaagtttttcaagggcctcacaaaactcaccgccatcacgaagacactattgaagaaatcttctaggggttgtatcaggataagagaagcatccacaaaggtcttaatatcaacacctacagaatgggtagttggaggaatcagacaaatgaacatttaaattgaaatgaaaaatggatatgaaaaacatgtaccaggatggatcttatcagcaacctccaagtaggcgctccacaaaactttctctt

SEQ ID NO: 36875 - DNA, 215 bp, Zea Mays
gggttgtcgtcacgccgccgtcggctaattggagacatagcgttgctgggggctcgattggtgcacggtggggttcggcgatatgcagggaagcttatgggggcgttaggggagacggaaggaccttgtagtcgccggaattgctcttcgatgcctctgctccgccgcgggccgtgctgcaccgtggccggtgccctccacgccgcgataaccgg

SEQ ID NO: 36876 - DNA, 405 bp, Zea Mays
cctcatgctgctatacccctttctatacgtatgcgagaccccagtaacagtaggtacattaacccaacaccaccggcatggaagaggagtctcaccgtcgatggtggtgaggctggccgacgatggagcgcggatttcgcggcgagccgcagacccagtgctcgattccctcccctgcggtcgcccagaccatcgttcggctggacggtgatgacggcgcagcgagctccggcccggtgaggagccgaccacgcagccgtcgtgtactcggtacgcccgcccaagctctatcgaagcgcgccgccagctttgtgagcccgagacgcgacaccagccgccctcggatgcctgctacacggcgctctccctctctcggtgcgctgggaacgttaggcaagcgcggta

SEQ ID NO: 36877 - DNA, 2267 bp, Zea Mays
gcaaaaggcaaagcaaaagcccccgacccccgtctggcgccgggagtcccactttgtgccacactttgtctaaggttagtcgttcgaattgaagaactaaccttaggcagaaaagttaggcaaagtgtggcaagttaggcatcaaaccaaacagaccccaaaacccacgccacgccacgccacagccccgccctcgccgccgtttcccgaatcccccaagggcaagcggagccatccaggatggcccattcgccggcgcccagcggcggcggcggcggggggccgctgccgctactggtgtcgctcaactgcctcgacgacctctcgctggagcaggaggggctggcgggcgtggccgcggtggagcacgtgccgctctccgccgtcgcctgcggccgcatcgaggccgcctccgcggtgctgctcccctccctcgccttcctcccgcgcgccgcgcagcgccggctgcggccctggcagctgctgctctgtctcggctccgcggaccgcgcggccgacgcggcggcggccgccgacctgggcctccgcctcgtccacgtcgacgccaaccgcgccgaggaggtcgccgacaccgtcatggcgctcatcctcggcctgctccgccggacccacctcctctcgtgccacgcctcgtcggtcccggccgccggctggctcggctccgtccagcccatgtgccgcggcatgcggcgctgccgcggtctcgtgctcggtatcattggccggtccgcggccgcccgctgcctcgccactcgtagtctcgcgtttcggatgagcgtgctctacttcgatccgcgctacgtggcaagtgggaaaacaaagcggccttctattgttttcccttctgcagcaaggagaatggacactctcaatgatttattagcagcgagtgaccttatttcgctgcattgcggattaacaaatgaaaccatgcatatacttaatgctgactgcctgcagcacataaaacctggagctttcatagtcaatactggtagttgccagcttatagatgactgtgctctcaaacagctcttgattgatggtaccatagctggttgcgcattggatggtgctgaaggtccacagtggatggaagcatgggtgcgggagatgccaaatgttttaattcttccgcggagtgcagactacagcgaagaagtgtggatggaaataagagagaaagcaataactatgttacagtcctttttcttcgatggtgttcttccaagtagtgcaatttctgatgaagatgaggaaataagtgaagctaaaaatgaagatgactatctaggcccacaggcaaaggatagccagtcacagatttttgatactgaaatagatgaaagccacataacgctggagtctgaaaagaaaagagccatatcccaccataaagagcctcaggcgtctggaaagtctgtaaacattggctcccgatctgaagggaggcgtagtcgttctggaaagaaagggaaaaagaggcctgcccatcgcagacctcaacagaaaccagatgacttatctgctgttgagagtgacagtaactattcctcccggagagatgatgacactgcaatgagtagcagggaccaggttgtaagttccagttcacgatttgcctctcctgaggacccaaaatacaagcataaatctctttctgaatccccgatggaaataacatccgagaagaaggtgcctgtactactcagtagaaagtaccctgataaactaaaagatggatttattgtagctttgagagcaagagataattcagggtaccatgttgcaagacagagagtagttggtggtggtggctggattcttgatgttgtctcaaatgctacaaacagggaccccgctgctcagttccttgttactttcaaaaacaagattaataggaagatggagtttgtgtttgcaagccattcttttgatgtttgggagagctggatgctggacggttccttgctggaggttatggtggttgaggtcgtgctcgctggcggtggtggatcaatgctagtccgcttggaggtcaaggtctcgacatgctcgaggggatggcctcacctggaggaggctagaggagtcatcatcggagccgagcgcgggaagcacgggaaaaggagcaccgtcaccgactcaccgtccgaagacgtgcggtcgcatgagatgagaaagatttcactgtttcacggatggaaagagatcggagactaaaaagaagggaaaaaaaaaagaac

SEQ ID NO: 36878 - DNA, 458 bp, Zea Mays
accctaaccctaattagttgtgagagctctctggtttgaggccgagacacactgtgtctttttacagtggccagacctaaaatcttagggttagggaaaaccctccaaatctcgattcccattacatattattcatttcttacaagcatacatctcgtgaagtggggatcgaataaaaaaaaagggagaaaatcatgacagagatggcccatgcagccaagtgcatacagaaatgtccatgcggcaagtagaaacgaataaaaaaaacagaaagcaaatagagagtgggcggctgtgtggctctgtgcagggcgcagtcggccagagccagccgctggtgcttcctggcggacgaacgaaagtgagcggcagaaaaaaaaggaagagggaggtgcggtcggcagtgccacagctcccaggcggctgagacagaaggaagccgccggccagagttttcg

SEQ ID NO: 36879 - DNA, 747 bp, Zea Mays
ctttcgttttgcttttgttagtcaccccctgcggggagtggtactgtgtttatcaaactggagaaacctaacgggcggctatgacctctagggaatctttgtaaaggcttcatagtgaatccctggccattcaccttgggagtggataagggtcttgcaagcccgggctagagagggaatcacatcttgtgggtaaagtgcacaacctctacagagtgtttgaaactaatatatcagccgtgcttgcggttatgagcggccaagggagctccattgattagagacacattggatcatggatactttgtttacagatgatgatgatgatgatgataatgctggtttctattgtgattatgattatggttttctggtattctttccgtttggaaagggtacttttgggttaacaacttgggttaatgctaaaacctggctctatattagtaataattacctgaccaactaaaagcaactgcttgaccctaactccacataaagctagtccactacggccaaacgggacatttgctgagtacgttgatgtgtactcacccttgctttcacaaaacaccaggttgcctttggtgcaatctatgctcaggtaaagaaggtgtcgaggcggatctccaggggttccaggacttcgacgagtccgaggattaggctagcgacctcccccagtctgctgcctgtggtgggttgtttacgttggctacgtttcgattctgtgtactttgatttata

SEQ ID NO: 36880 - DNA, 2359 bp, Zea Mays
cgcagttgcgcttcccacaaccatggcggccgtcacgttctcaccgccgctcctcctggccatccttctcatcctcaccaccgccagcacaactcaatgccacggtcacaagagccagcgccaccacaccggcggaactagagtggcccaaaagaccgccgcggcgggagccagcccgccggccgacactgtccaccacgccatctgccacacgacgccgcatccggtctcctgcctgttggccgtggcctcgcacctcggcgccgtcgccggcgcgaaggcggccgaggcgtccgctgtctctgtgcagctcctcccgccgaacgtgctgtccgtcgcgctggcgtccctcaacggggcggagtcggcgctgtcctcgctctcgccggcgctctccgccctctccgcgccggccgcctccccggcgggcgcctcgctccgccgcggcgcggcgcaggactgccaggacctccacgccgccacgctgtggtcgctgtcgcgctccgcctcgctgctcgcggcgcccggcgagagcctcccggccgtgcgcgcgcacctcgcggccgcgctcgccaacaaggccacctgcctcgacgggctcgccggcgcgtccggcccgcgggtcggcggcctcctcgcgtccctcgacgacgcctacgagcacgtgtccaactcgctcgccctcgtcgccaggcgcggcggcggcgtgtctgctgctggcttcgtggacgtcgtggcgaagacaattcacaaccggcggctgctccaggacgacgacgacgacgacggcaacggaggagacgacgacaacgacaacggaggagacgacaacgatggcggggctgacaacggtggcaacactgggcagccggcggcggctacggtgatcactgtggcgaaggatgggacggggaacttccggaccgtgggggaggcggtggctgcggcgccgaacaacagcgaggcgaggacggtgatccgcgtgaaggccgggacgtacgaggagaacgtggaggttctgccgtacaagaaaaacatcgccctggtcggcgaagggcgcgacacgacggtcatcaccggcagccgcagcgccgccgacggctggaccacctttcgctcggccactttcgatactatccgtctccttcatccagtcggttggcactaggatccgatgctggccatggacatggatcatgcatgggctcatggctgtcactcgtcaggatgtttggctgctcttaaccgactgccatcgatctcacggcgtctccggcgaggggttcctggcgcgcgacatcacgttccgcaacacggcgggcgcgggcaaggggcaggcggtggcgctgcgcgtgaacgcggacctggccgcgctgtaccgctgcggcgtggaggggcaccaggacgcgctgtacgcgcactcgttccggcagttctaccgcgagtgcgccgtgtcgggcaccgtcgacgtggtcttcggcgacgcggcggccgtgctgcagggctgcgcgctcctggccagggcgcccgtgcccggccagtccgtcgtgctcacggcgcacggccgcgccgaccccaacgaggacacgggcatcgcgctgcaccactgcaccgtctccgcctccgccgccgaccccgcgcccgccggcacgcgcacgttcctgggccggccgtggggcgcgtacgcgcgcgccgtcgtgatggactcctacctgggccagatcgtggaccgggagggatgggccgagtggcccggcgccgagcccggccgcgcggacaccgtgtacttcggcgagtacgggaacgacgggccgggggccgacacgggaggccgcgtgggctgggctggggtgcggcagatggagtacgacgaggcggcacagttcgccgtcgagaacttcatctacggcgacgagtggctcggcgccacctccttcccctacgatgacgacgtctgattcggcgcaaaccttgctctgcaaatctcaagaatacaaaggccgcacaagtgaccgtgtaaagctatgcatacccatcatcagccgtcagtgagtttggcttgtgttttagtatattcaagttggaattgttaagaggggtctcacatctctatataaggaatctgtacaccccctcataatacagagatcagaaagaggccagaggcacaaccctatatcatgtgtctcgtgtgtttcctctgtcgtgcttatgtgaagggagacgagttctctacagcttctcgcgcctctactgctgacaggagggaagggagcggatctggtgatccgtggtaacgtagttttcaacacgttatcagcacgctctacctcgacgttgctgcgggatcagatctgca

SEQ ID NO: 36881 - DNA, 1829 bp, Zea Mays
ctggccgaccaggaacggagttgcatagccggccgcgcgtccgtccgccccaagacccaagattgcgagacgccgtcgcctagatccatgagacttcccgatcttcctgcggcccgaggatgtcccagagcgacgtcgactacagttgcggatcttgtggataccctctaaacctttcatcttctaaccgaagcacatctgaagtggacgaggtatcttgctttcccctcacctggcgtggttacaggccaaaaactaagcttctgtgccgaatatgtggggcatctattggctacggatacggtgagccggctgttttgtgtagttttgatccagcaagttcatcttcctccagtacatcccagaagtatttaataaagatccaagcactccaaccttcagacaggactcagtaagtgaaatatggaaagagaggaaataggtgtcagcctagagaactccatcagttacctatctgatgattgcttgctttctatatttaacaagctagaaagcgggtcagagaggagtgctttcggtttaacttgcaagaattggttcaaggttcggaaccttggccggaaatcactaacattccattgttcttttaatcctgccatagacaaggagcatgccaagtgcatccccaagatactggctcactcaccttgtctgaaccggatatcccttgctgggctcacagagctacctgactcggctttgagcacgctgagagtgtctggatcatctctaaaatccttttcattgtactgctgttctggcataacagatgatggtctagcacaggtggcgattgggtgccctaatttggtggtggttgaacttcaaagctgcttcaacattacagatgctgccttggaaagtctttcaaaaggctgccgtggtttgaagagtctaaaccttggttcttgcatgggcattacagaccaaggggtttctgcaatcttcagcaattgtccaaacatctgcacgctaatcgttacaggttgcaggcgtctgtccggtgctggattcagaggttgttcaagttcatttcgttaccttgaagccgagtcttgcatgctttctccagacggtttgttggatatagctagtggcagtggactcaagtatctgaacttgcagaagttaagaagctccactggtctggatggcctgggtaaccttgcgctcgctaaaagcctctgcattctgaatctcaggatgtgtcgctacctcacagacgattccgtggcagcaatagccagtgggtgcccgttgctcgaggagtggaaccttgctgtttgccatggggtccatctacctggctggtctgcgatcgggctgtactgcagtaagctaagagtgctgcatgtgaaccgctgccggcacatctgcgaccagagcttgctggccctcggcaatggctgtccgcgccttgaagctgtgcatatcaatggctgtgccaaggtcaccaacaatggcctggccttgtttaccctttccaggccccacgtgaacctaagggtgtatgaagttatgtccattggcccttccattgagaatttgttccggttgcattgaggtgaaattgttagttaggttttcgaagtttgggattaaaagtataataccctgtccattacaggtgattggtttcttcagtcaattatgcacagtgtgtttgctctggtgcttactgtaagataacaatagcgaatatgttgttagttaagctgctgttttgtcaaggccatatttgtcaatccttcgttcacaaagttaggtagcattaatagagtttgacaaacattttatcagttgccaag

SEQ ID NO: 36882 - DNA, 3787 bp, Zea Mays
aattggaccttgcttgtgctagagggtcgtatgccctatggacaaacagtgtcagaccaaccttcactgatagttataccattagccaatcagaccagtgcaatgactattcaatttatattgagggcattcgccatcctcttctacttgaacagtctcttatggcagaagaatcaactacagaagcatctgaaatgcctgttccattggacatgtgggtaaaaaagaatgcaaggatagttgtgatctctggacctaacactggaggcaaaactgccactatgaagaccttggggctgtcctcgcttatgtcaaaagctggtatattcttcccagccaaaggaaggcctaggattccatggttcgatcaggttcttgcagatattggtgatcaccagtcgctggagcacagcctctctacattcagtgggcacatatcacgtctgcgcaagattgtagaaatggtatcaaaagattctctagttctaattgatgagattggcagcggcactgatccagctgaaggtgtagctctttcaaccagcattttgaagtatcttgcaagtagagtgaatttagcaattgtgacaactcattatgctgatctaagtcggctccagtcagttgacaaccgattcgagaatgctgcaatggaattttgtgtagaaactctacaaccaacataccgaatcttatggggcagtactggtaattccaatgcacttagcattgcaaagtcaattggttttgatcaaaaagtgcttgatcgcgcacaagaatgggttgagaaactactgcctgataagcaaaaggagcggcaaggtttactttatgattctctcgttgatgaaaaagaacttttggaatcccaggcaaatgaagctgcatctgttctttcacaggttgaggggttgtacaatgagattcgcttggaagctgatgatctcgaaagcagagtagctgcattgagagcaagagagacccaaaaggtacaacaggaattgaaggttgtgaagtatcggatggacaccataatcaagaactttgaagctcagctaaagaattcaaaacttgaacaatacaattcgctaatgaggaaagcagaggctgccactgcttccgtggttgccgctcatcagccaagcgaaatagctttcgatgatgacgatgaaaaccggatctcgttcgtctcacaagttggagacaaagtgtatgttcaagggctgggaggagaaacgatggctaccgttgtcgaaactctcggagaagatgagagttgtatggttcaatacggaaagataaaggttcgagtcaagagaagcaggataaaactggttcaaagaggcacaaataacgaggcaacaacttcctcttctgtaaaagcaaagggccgaacaccgaagcagcgatcggcaacgacgacggacgtctccttcggccccgtggtgcagacgtccaagaacacggtggatctgcgcggtaagcgggtcagcgaggcggccttcgagctccgcatggccgtcgacgcgtgcaggccgtaccaggtgctgttcgtggtccatggcatgggcaccggggcggtgaaggactgcgccattgacgtcctccggaagcaccctcgcgtggccaggttcgaggacgagagccctctcaactacggctgcaccgtcgcctacatccagtgaacgggtgggtacagacagactgtttggaactgaacgcagacatttcagtacagaaatcagtttggttttgccttgcctaccagctcccagcgtgtccttgtcacagactcacagttgcggaatgccagttgggtgagctttttgctagtagctgatctgcgggtggatcggataaatggccttggcagttgtgatcagttcggccggcgtcctatgcattggcatcgcaaaatcaccagcggaagcaaggtgtgcgtgcacatgcgcgcctcttctttccagcaggattttgtgtggcgagggctgatgtggccagtggctgaagaaaactcatcggaatccactttacaaagcaatggagaagatgaaagaagaaatgatgctgcttgggttcatatctctgcttctggctgcgacgtcaagaatcatctcggggatctgcatcgactccaagtactacaacagcagattctccccgtgcaccaaagaagaggtccaagaatcgataaatgcagagcatgccattgctcacgcgcgcaagcatctactggaggtcatcctgcaccattcaccgaggagaaatctgaaaactagttaccataaccatgaaggctgccgtgagggatatgagtcatttgtttcgcatgaaggtttggagcagctgcaccggtttatatttgtaatggctgtgactcatgtgacttatagctgcctgacgatgttactagcaatactcaagatccataaatggagaaaatgggaggatgaagcattcagggataatcatgaatcattttctcagatcgcatatgagtcagcaactagaaggcaaccagcacttaccaaatcctattcattccgctcttggagccaaaataatgtggtcatgtggcttgtttgctttattgcgcaatttggtcagtctgttgttcgagcagactatcttatcctccgcaagggttttataatgacccacaatcttccgccaacatatgatttccacaattacatgatacgctcaatggaagaggagtttgagaagattgtcggagtgagtggactgttgtggggcttcgttgttgcttttatgttatttaatgtagacggatccaacctgtacttttggatagcaattcttcctgtaactcttgttcttctggtgggtgcaaagctgcagcatgtgattgcgactctaacagcagagggcgcaaagatgagcacctacgggccaaggatacagccaagggatgatctcttttggttcaagaaaccagagtttctcctttggttgatacacttcgttctctttcagaatgccttcgagttggcttcgttcttctggttctggtggcaatttggttatgattcatgcttcatcaaaaaccaccttttggtatattgccgccttatactggggtttgctggacagttcctgtgcagttacagtacattacctgtatatgcgctggtcactcagatggggtccaagtacaaggctgcgctgatcccgcggaggatcagggagaccatacatgggtggggaaaagcgacgaggaagaagcgccggcgccgccgcggcgacgactcgacggtccgcacggagacgagcacggtgtgctcgctcacggacgacgacgaagacttcgaagacgacgacgaccaccaccaccacggaccgtcgtacgataccccgagagccgggggccgcccgccgtacctgaagatcgagacgcatcgtcagtcgggcagcgggcacgacggccccaggcccggcggcaccccgtgcttccaccccagcggcagcggcagcgggcacgccatgctcctgcggcaggcctccgtctccgcgccgtcgtcgccgtcgtaccgcggaggcaataacgtgacaaggtcggcgtccatgcccgggatcgccgcgctgaggacaacgggctccggcacgccgacgcgcgtgagccatgaggagcctacttgatgcgcgcccgtgcatgccatggatggcttgctagtgcagacgtactgaggactgagctgctagtgtagcaccggatttgaaggtatatcgatatatatatacacacgaaaagatttggggtgacaaa

SEQ ID NO: 36883 - DNA, 1154 bp, Zea Mays
atggggagagaacacacggaggtggtggtggggcagttgcgcacggggagggccgacgcacggagcgaacacagggggacaactcacgcaggggatgtggggaggtggtggcggcagacggacgagcgagagctaggttgctcatgcgggcggggggacgcgggatggacggacgatacacgaaaacggagatctccagccagagctctccgcaaaactactcactgtgaaactccaatgttagccttcatccatcaggcactggacactccacatgatcctcactgcagaactccaagtcatgaccatattgagctactgcttgttgcactccgctacgttactgcctccgtgctctacctcaaggcccatcactacggcatcatcatcaccctacatatgcctttgctttgtgcttggtatgtcacccactccactccagtgaccttgggtgtccatggggacgatgtcgtcggggtcatcgtcgtcgccatccttgcttctgaatttacctcatgaggccccaatctcgaacggcaccaggctctcctcccccaatccgttggattaagccacttccgtggtttgacagcctcttcaaaagatgtaccactgctcagtaaatccatctccttggacaaatcacctgtaagttgcaaagttggtgccgaccaagttaggagagggcaggagccggcgcacggtagcgtgtgcggtcggcggcgaaacggggccgacgagtcaggggagggcaagagccggcacagggcagggcgtgcagtcggcggtgaaacagggccgacggttggaggccgtggccgagggtgaggcgggccgatggagcaggcccatgggcgacgacggggacatgaacttgaaggcgaggtcaggaagagaatggcgtggagggcagggaccgaatggaagccgccgcgagggggttagcggcgaagcgtggctggtggtcggaggccgtggccgagggtgatgcctgcgtgctggtggagcgggccacgagcgacagcgggaacagggacccgagactgcctgcgggatgaggagtaatggcgctggtcaggcgtggggcgggtgaggagcgaccgacggcgggtgaggagccgccgcgcgagagccgcgaccgacggagagcctgc

SEQ ID NO: 36884 - DNA, 206 bp, Zea Mays
attccaacgctgcatctgcactgcacgctacctgcgggagctgagccgtgctcggtttggcgaaattttgcacccctcttgtgctaggaccacccggttcaagctgttccacggaaggatcaggtcttcaccggtgctctccggcgccggatccaggtttgttccggcgagaggtcgggctcttggtgggggccagcccagcttcg

SEQ ID NO: 36885 - DNA, 521 bp, Zea Mays
ttttaattgggttgccatccaaaccacaaaaacccacaagagagctttcactttttaggccccaccacctagagtgtgcatggagtggggctgcatgtcaacaacgagaactagtcacgctccctggccacacacaccgccatgatacagtaagctcgagtgcacggtctaccacgttgcgctggccggcgagagcaacgcgactgagcggcctgcgagttgttccccaccgcaaattgagaggtgtatgactagctggctatcctcgaaagttgcagatttgtctgaccatccatgtcgccatggaaggagaaatagcttgggtgtagatggtagcctgttcccttagctttaatctgtaccggcttttactgcttctacattgttttgtctctatgaattgcagccgcagcagtccgaacaactagttttaatccgaagcgaacatgggaggtgcttcaggggctgccttacagggcatccctacttttgtcgctaccaattgtcaagctcgcgaactt

SEQ ID NO: 36886 - DNA, 2123 bp, Zea Mays
aaaataacaatttttttcggtggaacgtgacattgggcaagtcctttccttcaccgctaccgaagtctacttccattcctctccttcctaaccccgcgtcgcccacgagctcgccgtgccggcagaggcgaggacctcgccgaagcagaggccatggggcgaccgcagccagccagggctggcgccatcaacatcgaggcgtgcgcgcggccgatcgccgtcgaccaccgtatcagtctcccgtactacttccgcatcgcgggcagcctcctccgacaggctaatatatatcggaacgagagtaacttgctcgacctgtatgtcatccttctgagatactcgagcttgctgtgcgagacgattccgaagcatcgtgattaccatgccttcaagttaagagaaaaggcattttttgataaacttattgatattatcaaagagcttgagacattgaagccagttgtgcagcggcaggttgttgagcataacagaggaagtactgtggaatttaatactaatagtctaaatggaaactacggtacaactcgtaggatagagcagtgtactccaagctcttatactccacagacatttgtaggcagcagtaatggagcattgcaaaaacccttccatgctgggagacaagtggcatcattatcaagtgtacagaaacaatttatgaatctaccatatccaaaagaagaaacactagctagacactccatattaggacctaatggtcttaatggccggtggaatgggcctgttactggaatcaaggttcaatatccaagcaattttgaattaacacaaaatggtataacaagtttagtgccatccatcttgaaccaagatgatttgcatggttccaacactgcacctgcacctccacctccaagtagctcctcaaatgacaatgacaatatgaaatctgttctctctcttgatgatggtcgatggtctgtaccagcagaagaacacactccacttccttctgctaatttggaagaggagttgttccaattgaatatcaaacaaccttctcctccaccagttcttgcagaggtacaaagaccaatttctccatcaagagttgccgatccaacaccaggacttccgacctcaggaactgcccgatttcagaacttgcatgttccgatcaagttgatggagtgttttctaagggttgctgagtcaaacaccaaaagaagcttagaaacctgtggggttcttgctggtaccctgaactttttatgtgacaaccttaattattccaaagcagaaatcgacatctgatacgtgtgaagctacaaatgaagaagaactatttgaagttcaggacacatactcattgttcactcttggttggattcatacacatccaacacagtcctgcttcctttcttccattgacgtccacaatcattattcttatcaggtcatgctacctgaagcaattgcaatagttatggcacctactgacacaagaaaacatggtatatttcatctcacggatccaggtggcatgggcgtgatccatgattgtcaagagagaggtttccatcctcacaaggcaccacttgatgggtcgccaatatatgagcagtgctcccatgtgtacatggacaccgatataaagttcgatatgattgatctgcgacaaagatgacgaagctcacctttgggtttattttgcaacctatacttctcgcagttaaatcaattgctgccttatttttttcttagctcaagatttgtgaattcttatgtacgctgttgtacatagctattgcgttgtatagggaaaaccattgaggtaataatatcattggtaatgcttcgttgtaattcattccttcaacctcgcaaggcacgtttgtgcggtaagatgaggaagtggtgtctggattttatgccatgccaaatatttgacttaaaagggcatcaaatatcacaaattgttaaaggtctcatttcttagactatcttcattagactatcttcagtagacttcttatcccactctttattttaaacttcactctgcaaatagtgtaatctacagtacaaattttgcacggccgtttatatgacctgctagagatggacttagagacttatga

SEQ ID NO: 36887 - DNA, 3348 bp, Zea Mays
gaagcagctgccaaatggccaaatcccgaaagcccctgtccccagcccgcctctcaaacccctaatccctagccacaccacgccctcttccctccttccccgttggcttcggcggcgggcggccatcagcaaccagcatcgtacggaggagaagcgctgtttacacccgtctggcagggatgccgctggggcagcgttcgggggacaagagcgactcccgctactgcggggtggaggttctcgacttccccgccggggagggcctccctgccgtcctcaatcactccctcgcctccgccttcgacttcatcctcgcccctctggttgatcccaactaccggccggcgcccggcgccgttctgccagtgtcagcgtcggacctcgtcctcggcccgtcccagtggagcaaccacgtcgtcgggaagatcagcgagtggattgatttggacgcggaggacgagcggctccggctggactccgagctcacgctgaagcaggagatcgcttgggcatctcacgtttcgctgcaggcatgtgttattcctgcccccaggagatctttttgcggcaattatgccagagttgtgaatcaaattttgcaaggcctgaccaatatgaatttgtggcttaggttgcctctggagaagtccgagcctatggatggtgatcttgataaaataaagaacaacaaccacacgagtgaaatagcagactcatgggaattatggaattcattcagattgctatgtgaccatagtagccaactatgcgtggcacttgatatttcgggcacactgccatcaatgaactcattagggcgctggtttggggagcctgtaagggctgctattctgcaaaccaatgcttttcttacaaatgcaagaggatatccttgtttatcaaagcggcatcagaggctgctaactggactttttaatcattctgttcaggcgataatctctgggagatcgaatcacaatgtttttccagcatctgaaggagtgctctcaggcgatgagggcaacgctgaagattcctatgttcgacatgcattagctccgtacctggagtacattgcatacctgtatcagaagatggatccgcttcctgagcaggaacgctttgagattaattacagggattttttgcagtctcctctccagcctctaatggataatttggaagctcagacttacgagacttttgagaaggatgttgtgaagtatactcagtatcgaagagcagttgctaaggccttggttgatagggttgcagatgatgcagtctccacaactaggacggttctgatggttgtgggagcaggccgagggcctctagtacgagcatcattgcaggctgctgaagaaactggtcgcaagttaaaagtatatgctgttgaaaaaaatcctaacgctgttattactcttcatagtttgatcaaattggagggttgggaaagcctggttactgtaatttctagtgacatgcggtgttgggatgcccctgaaaaggcagatattttggtaagtgaattgcttgggtcctttggggacaatgaactatctccggagtgtctggatggtgctcaacgattcttgaagcctgatgggatttccattccttcatcatacaccagcttcatccaaccaataacagcgtcaaaattgcacgacgacatcaaagcacacaaagatattgcacattttgaaacggcatatgttgtgaaactacaccgcatagcgacacttgcacctccacaacaggtttttactttcacccatccaaatttctcaccaaatgccagcaaccaaaggtacaccaagttgcaatttgaaatgctgccagacatgggttcatgccttgtgcacggatttgctggctattttgactctgttctttataaggatgttcatcttggaatcgagccaaacaccgctacaccaaacatgttcagctggttcccgatcttcttcccattgagaaagcccatctacgtgcccgaagggtctcctatagaagtgcacttctggcggtgctgtgcccccacgaaggtgtggtacgagtgggctgtgactacgccgaccccgtcgccgatccacaacagcaatggccggtcctattgggacgcccgtctccacgtagcctggaaggttcacgaggttcattgagccgttgagcgtgtaactgccgtgaaggttcccgaagcatctggaacacgtgggcacgccgcacgccactgggcgtgtgcgctgaccctgacggcaccaaaaggagaaagaggaagcgagcccccaggaaagcggtcagaattggagtgcaagcgacgcgtcgagccccatcccgttcccgcgcctcgccgagagatctgcgccgtcgtcggcaccaatccgtacacccgtcagtccgtccgtcgtcggcgccggcgaacgagtagagatggaggagacggcggcagcggcaccggctgagaaggcgtcgtcgtacaggtactgggtgcgggaagccaccggcgacgccgcgccgctccccgtcccgcgcaagctcgaccccgccgccaatgggaacgggaacccgccgcccctcgggtccgtctggaatcaggctggaacttgggaggaaaagaacctcaactcatgggctaatagtaggataaaggatttgctgggctctctaggttcattgaagttccctacagggaatgcatccgttgatgaagtgtccaagtgctcaggcgatgcctttcaggtcactgtccgcaacaagaagagagtaggatataactacgaactaagcttgagatttaaaggtgaatggttagttaaagaagaaaacaagaagatcaaaggacacttagacattcccgagttctcgttcggtgagatcgatgacctggaggtgcaagtaaggttcagtgacgacaagggcctcgcatccgacgacaaggcacggatctgcaaggatctcaagtcctttatggccccgattcaggagaaaatgcgcgtgttcgaagaagagctcaagggtagatagcgagcattagcgagaatcggcagtgctaggtgggcgctgccgtgcccgtgctggaatgatgagtaaaacatgttgacgtcttgtggtgtctccacgttctaaagtcgtcttcggatgactgggactgtctgtgtactgatgctatgcacttccggagatgagtatgtacggttacgaactgcctaaaccgtctcttcgtcctaatcattttcgggatatgatggtagtagagagatttagggcttgtttggttcctaatttgtttttatctaaggttagttctttaatttggtcgactaaccttagacaagttatgaa

SEQ ID NO: 36888 - DNA, 1804 bp, Zea Mays
gtcagtttcttatgaacacgccctcaactcaactggccagctgctgtggggactctgcaaagggtagcgttgcgtatatcacttacaaagtcgtcgtgcaagtttgcgctcaaggggctcaagaactggatgaagcccgagaaggtacctgcggccataactacattcccgtcctccgcccaaatcgtgccggagcccctcggcgtcgtgctcatcatctcagcctggaactaccctttcatactctctatcgacccagtcattggagcaatcgctgctggaaatgctgttgttctgaagccatcagaaatagcgccagctacctcgtcactgttagcaaagctgctacccgagtatgttgacaactcctgtattaaagttgtggagggaagcgttccagaaacaaccgcactcttggaacagagatgggataagatcttctacacaggtaatggaactgtaggacgtatagtgatggcagcagccgcaaagcatctgaccccggtagctctggagcttggtgggaaatcccctgttatcgtggattcaaatgttgatctccatgttgctgctaagaggattgttgttggcaaatggggatgcaacaacggccaagcatgcattgctccagattacatcataacgacaaaatcatttgcaccggagctggtggcctctttcaaaagagttttggaaaggttctatggggaggatcctctggaatcagcagacttgtctcgtattgtgaattcgaagcagttcaaaagattgacaaatttgatagaagaaaaaagagttgctgacaagattgtgtacggcggcaaggctgatgagaagcaactaaaaatttctcctacactattgttagatgttcctgaagattcagaaattatgacaggcgaaatatttgggcccttgcttcctattgtgacggtcgaaaagattgaggaaagcttcgacttgatcaatgccaagcctaagccactagccgcctaccttttcaccaagaataggaagctgcaagaggagtttgtggcaagcgtccctgcaggagggatgcttgtaaacgacactgcgctacatctcaccaacccgtacatgcccttcggcggcgtcggcgacagcgggatggggtgctaccacggcaagttcggcttcgactgcttcagccacaagaagggagtcctgatccgcggctttggcggggaggcgaacgccaggtacccgccctacacgacggagaagcagaagatcctgaggggcctcatcaacggcagcttcatcgccctcatccttgccctcctgggcttccccagggagaagcgttagatgctccggcctcttgtcggtttcggtacagcctttttagtccctgttcgtcgtcaggtgcacagtatacaccgtcatattctgtcaaatagatgcaatgcaacgactgcgcgccgtgcttgtgttgcaagcgtggataatgcatatatattgtagcattgacatgatgtgcgttattgcattacgtaagggagttggataaataagtgtgatttgtttgtcaattattcagtgttgagaatggatgatacttgcatacagtttacttcacgatttaggggactaaagtttagtctgtttagttttagtgactaaaagtactcgaaacgcatcaaatgacacttataagaagactaaaatatcttttaacatggtgaaattaatatagtttaaaggtgaaattaatatagtttagtgttttttagttatcctttgagacactaggaattaaaacagggaagtgtaaatgaaataa

SEQ ID NO: 36889 - DNA, 2516 bp, Zea Mays
ctatcctctccacacctttcttcttcgtgcacgcctaggagcaagctgctgccctctccctggccagccctctcccatggccgccccctccctcagcttcgtcttcagccgccgtcgaaccagggcgagcaccccacgcccgtcgccactcccatcccctccccctctctgctgatggtcacgcgccctagcatccgctcgcccctgcgcgcactcctcccccatggcgagctcgccctcaactccctaccatggtgctcgcccaggctcgccggcatccatggccgcagttccctagatgctgccagctctggctccctagacgccgccagctctggctcgccggtctccgggctcgttggagatggcatattacctccaagacctacaacctagtgctcctcgacgtcgacagtcacgaccgcttcctcaagtccgtttgctgcaagcacgacgaggtgctgctcatcatcaaggtctacttcaagcgcaccggagcagagtggaggctggagaggattaggaacactttcaaggggatcgagggatcccacatgtggccctttcagatgaggattctatgcttagggcttaccgtcctgattctgattctagggtgtaggttgtagcttcagaaaaaggattggcgacatttttccaatgcacaattgcatgttctaaggcaaatttaagtggggtttagcaaatttttaacccatgtactgtatatttgtttggttcagataagtttacactaaggttttgcgcttttggcattaacttggtttaactgccttttccagcggtgtagtattttttgcctctatatgttgtgagttatccattttgattaagtcctgatgatgttagtgtagccactttattaggatgtttttgcacaagatagcatgtgtctaacatagccattttatagcatgaatcgatgaatgtacattgcttgtcggttcatatgctgatttggcttccaatgttgttcttggctgcaaatagattaggtagcatatctcctgagatagtacttcttcatcaacttgcactatcgattgagtacatgccctttctatagtcagattgcaaagaaatggcttgactctcaggtgagttctcttttctttggtgtgtgtgtgttgaatgactatcagtatttaggcgtagaagttgatcctgctggtgtccatagcgcgtaaggacatacattctcactgctacatgtagatataaatattacagtagaatgaactgaaagttttttgttgaaattttaagaaccaatagttaatcttttggacataatcaaagtctaactaaagccaaaaagtatattcgctttaaatagtctgtttataaagggaatctatggatcccacgactatttccatttactcctatgtgccgggagaacaccatgcactaatctctgtttagtgcctacaatgaaatttttggtccattgttgaaccatgctaaatattatatcctaaaattatactatttattaccaaatgctgggtttgtttcatggaattaccaagtgcacgcagtacgcctctgagcaatcgattctcacgccactcctccacgatctccattaaagacacttcagacagatcgagagcttctccatataacacactagactgtgtttcatgtatcctcgtccttgataacacacatataaaatcctattaaaaatttataatagtgaaaagcttttggcaaatgcatgttttgattgatgttacgcagacaataattttttgactaagtactgcaacaattgagttgttgaagcattcatgtacatttttgttccatgaaacgaaactcattgtgatctttctctcaaagttgtaggaccatggctgaagacaagagtcatccatggttgaatgagcggatcatgtcattcctctcaaaacggtcggtcgttgtgcattcctgacaagacttggagatagtccatgaagtgggaggtggctctacgatgggttgactccactcaattggatctgatcttactcgtattcaagagctactagagctgcggtagaatgtgtccatgcagagcgagcaagaggcctctgcagtgggtatggattcaagcaagactcacaacaagtgtgcatgaggtatatatgcaatctgatgtcctagcagtcaagaaatggtatagtctagggtcttggtgatctcaaatattatgttaaatgtatttgttagaataattagtgtgatcttaatttagttggtgtgctatacataatagtctagattagtagttctaaaagttagttgaagtatttctattcattattgaggattgtcactctttattgaggattatgtataacttctttattgaggattgtcactctttatgtatttctatctatagtttctttattgaggattgtcccttaagctaataagctaacatgtactttaaaacttataaatgttttatacattcaatttgtaatatttttgaatcaatt

SEQ ID NO: 36890 - DNA, 2127 bp, Zea Mays
cccagtccctgcactcgtgttcctgtagccgccaccccagcccctggacgctcggctcgatcccccccccccccctcaccacccgttctcctctagtcatcctcctcgccagtcgccaggtgtcggccgccggttgtgctccccgtcaggcgtcagcgtgatcccatcggtcgtcgcagaaacacagtcgctgctcgccgtcaccactcgccaggcgccggttcttctccaatccacgactcatcggctctccagtcctccgtccgttaccgaatttaaagtgcaacgtgccgattctttatatgtacttctgaatgcttggacctggtgtgactacatagcctggtattcatttcataaatgatggaaagaagattgggacggcgtgtatatttgattcccagaacccttccctttatgcaactcaatgctatgtcctcattctcagctggccatggacgccgacccaagaagaaggtatatcaccgtgaacctggtcttgacagggccatggatcttcaaaagaagcctgcccttctccttcgtctgcgtgacctcattttggcacaaaagacaggatcactacttgtgcgtgaccttgaaaaggaggttggttttgtccaaaaatggaactttctttcacttatcgagcgtcaccccaatatcttccatgtctctggtggaagtgcttcccgagagcccatttctgtcacacttacggagaaggccagaaagatatccagtgaagaggctgaagcgcgagagctaatggagccaatcttggtgagaaaccttaggaagttactgatgatgtcgatggactgccagattcctctggataagattgaactaatccagtctgaactgggcttacctaacaacttcaagagcaacatgattccaaggtaccctgattttttttcaatccgtgatgtgaagggactggaccatttgtgtctggagaattgggactcttcactagcagtcacaatacgagaagaaaaaatgaactttgagggtttccagataggctgtagagggattcctaaagatggaaatgtcttgggtccttttgctttcaagttgaagtatccaacaggatttaggccaaaccggaagtaccttgaggaggttgtcaggtggcagaagatggcatttccttcgccttatttgaatgctagacgagtcgagtctgcaacaccacagtctcgaaagcgtgccattgctgttctgcatgagattttgagccttacaatggagagacgattgacatctgataagctagacatatttcacaacgagtacaggcttccatgcaagttacttctttgtttagtgaaaaatcatggcatcttttacatcactaacaagggagcaagaagcacagtcttcctcaaggaggcttatgaaaactgtaacctaattgataagtgtcctttactgaaattctatgatcagtttgcatcattgattggccgaccgtgctccaactcagacaacatgctggcagtataattggagtgtggatttactgatcaggagacaagctaaagtcggtgcatctattttgttgaaactcagatcagctcattgcacatgcaactacaatttaaattcagtggaaagttgctgtttgtttcagctcagtagctaaagagaactaaagaattgaaaaagtcagtgtctcatcttcaaatgtgaagccatctgagaagtgaagtagcagccctgcaaactagacaaaataatgcttataccagaagtcaaagatcaggactggtttagtggtgagagttgtctcactgagtcactaggtcacatgtttgaagcagcctctccgcattcgaggggggaaggcttgctttgctttatccctttcccaaaccttacttatatatgggagcctccgctattggtgtaggtcatgccctccaataatttctacccgatgtcgctccacattattctgatatggagcatgattaacagctttgtgattaagcattgccatgcttcgagccatcacgttcatcaaatcaacttgcaagttacagattgtgctactacatcattccatgatcctattccatgcctcttcatcactgcttaaaggaaactcttatgacc

SEQ ID NO: 36891 - DNA, 2103 bp, Zea Mays
accacgcccaacacgcgtcataaaaaatgggtacgcatcaataaagaggagcttgggaagttgccaaggcctccgatttcgctaatgcgacggtgaaatcccgcacctacctccttcctctctctccgaggaccctcgcaccaagaactgagcgggaagagaggtagagaggcaagcgcacgagagtttctgctcctctctcgcctcgcctccgtctcctttcctctctggttctctctctgcgattctcgtcgcattggttccgttccctcacgaaaggcggtagctttctgtcttccctgatctatctagataatggcgaccacgacgtcagcgaccaccgccgccgcagcagccgccaccaccgccaagccgcgggggtcgtcgtcggccctctgccagagggtggccggcggcggcaggcggcgctccggggtggtgcggtgcgacgccgccggcgtggaggcccaggcgcaggccgtggcaaaggctgccagcgtcgccgccctcgagcagttcaagatatccgccgaccggtacatgaaggaaaggagtaccatagctgtgataggcctcagtgtacacacagcaccagtggagatgcgtgaaaaacttgctgttgcagaggaactgtggccccgtgctattcaagaactcactagcctgaaccatattgaagaggctgctgttcttagtacctgtaatagaatggaaatttatgtggtggcgctatcatggaaccgtggtatcagagaagtagtggactggatgtcgaagaaaagtggtattcccgcttccgagcttagggagcacctgttcatcttgcgaagcagtgatgccacacgccatctgtttgaggtgtcagctggccttgactctttggttctcggtgaaggacaaatccttgctcaggttaaacaagttgtgaggagtggacagaacagtggaggcttgggaaagaacatcgataggatgttcaaggatgcaatcactgctggaaagcgtgtccgcagcgagaccaacatatcatctggtgctgtttctgtcagttcagcggcggttgaactggccctgatgaagcttccgaagtctgaagcactgtcagctaggatgcttctgattggtgctggtaaaatgggaaagctagtgatcaaacatctggttgccaaaggatgcaagaaggttgttgtggtgaaccgctccgtggaaagggtggatgctattcgtgaggagatgaaagatatagagatcgtgtacaggcctctctcagacatgtatcaagctgctgctgaagctgatgtcgtgttcaccagcaccgcatctgaaacttcattgttcgcaaaagaacacgcagaggcactcccccctgtctctgatactatgggaggtgttcgcctgtttgtcgacatatctgtccccaggaatgtcagcgcatgtgtgtctgaagttggcgctgcacgagtgtacaatgtcgacgacttgaaagaggtggtggaagccaacaaggaggaccggctcaggaaagcaatggaggcgcagacaatcatcaccgaagaactgagacggttcgaggcatggagggactcgctggagaccgttccgaccatcaagaagctgaggtcgtacgcggacaggatcagggcctcggagctcgagaagtgcctgcagaaagtagcacctgaggtgcgacggcagcgacagccgcacccttgacgagacgctcgagaacatgcacgccctcaaccggatgttcagcctcgacatggagaaggcgatcatcgagcagaagatcaaggccaaggtggagaagacacaaaactgaggccaggaagcaatttttctaccaccattatctatatatatagcgtctccaatctcattccatttttttatcctttcactcagtgagcccttcccctgctcactgtgatcgttaactgtgtctgtgaattagagccatggcagcgtgttgtcaataacagcaatgtgtcccaattccccacagaagaaagactatatttatatgcatttattggagcaaatagtttacttatttattatggtggtagactaatctaaattttaattttctacgtttgtttc

SEQ ID NO: 36892 - DNA, 1478 bp, Zea Mays
tggggttcccccgttgtggggattgcctgccatggtggtgctgccctgcttgtgcttaactgttctgttctggaataaaatattgaagatacagatcatttgaaaatccttcttgttaggttctaccacggtgcctgcctttttgtcattccttgtctccctggtagtaggtctgaaggtgatcgtctgatggatatagttcagacatacggagtatctgttttttttttcgaggtgatatgggggcatgttcagctggtgcaaatttcactccacacataattacagtcgctcctggtgaggatgtgatgacgaaggtcatatcgttttcccaacaaggaccacgagctatctgtgttctctctgcaaatggtgtgatatccaccgttacactctgtcagcctgattcctctggtggcacgttaacttacgagggacgctttgagttgctgtccctgtctgggtccttcatgccaaccgaaaacggcgggacacgaagtcgatcaggtgggatgagcgtgtctctcgcgagtccagacggtcgtgttgtcggtggcggggttgccggcctgctggtggcagcgagtcctgttcagattgtggttgggagcttcctgccaagctaccagatggagcagaagaacaagaagccacgggtggacgcggcacctgctgccgccgtcccgcagacgcctcccgcagtcccgatctcgagcacagacacccgcagcagcgagcaagggcagcagagctccgcgtcccagagaggggtgaacatgacggtcccgggaggaacctacggcgcggaccagagctgggtgttgtcccctgctccgcagcagccgatggccgaggtgtccaggacgccgtcgtctggggacctgaagatgaccacgtccggatcatgagcactctgaaacccagccggagctagccacccacgcactgactgggagccaaggtccccgctggaagatggaaggatggggtcatggattggttcatttgttcctgactcttgctgcaaatctcgcactagggcggtctagtctagttgttgctgtatgatgagcgcgccaggcaggaggaggggagtctaacaactgcacttgctgccattgtcgaggagtgcgtgtgtgtagtgcagcagctattaacaccacagtttgagtgtgctagcggcgtgtgtttttatttaggcgacattgtcgattaaattcttgtgtcgggattattacctttaccttacgtgctggtttagtttggcaccctgtatctgtatctgtattggatcatgcccacccttggcttaaatcagcattagaaaattctccatgtttcctgttattctgtcactagtcgggaaatggatgaattccgtggtgcgatcgatctctctttccgaatcatgtgtgtaggtatgatggattgtgtggccaggtcatgcctacttttgtaactgttgccgtactccaaaa

SEQ ID NO: 36893 - DNA, 1843 bp, Zea Mays
aacagtgtcgccactcgccacagagcgctccatcaacacgaccgccggtataaacgcagcccccctccggcctccaccaaggccaacattgctcaggctgctcccaactcccatcctccccctcccggagtacgaagtactagaaagagagcggctttcctctaagaatggcgggtggcggcgccggcgacgacgacgtggtggtggtgagctgcggcggcagaggcggcggcgaccccggcgcatacgccgcggtgctcaagaggaagctcgacctgtactgcgccgccgtcgccaaatccatggtgacatagatggggcaagcctagttacaaactctaatgtcatagaagatgatgattttcaaggcaagccaaccaacagtggcacatcaaaggaactgtcagacgatgatggtgaccttgaagagaatactgaccccgctaacgccaagaagatgaggagaatggtgtcaaaccgggaatcggctaggcgatcaagaaagaggaagcaagcacacttgaccgatcttgaatcacaggtttccaggttaacgtctgagaatgcatctttgctgaagcgactggctgatatgactcagaaatacaaggacgcttccgttgacaataaaaatctaacagttgatgttgagactatgaggagaaaggttcgttcgtcttgaatgcatcacagacctttttcttcttttttttgttgtacgagaactcttaactgcatccatttatcgatcataacatttttactgggctctgtgtatactcaccgtaatcaacgtttacatctctctagatggctgcaaagggcagtgaaagtaatatgattgttcatagttcttattttagaacctgcaagttcagttttagtttctaatggtttttaactgcacacaaaaggtatggcagcattttcatttgattttctgaaattctgcataccttctacaagtgtgataggaataatttagttccttggttttgttttcttgcagtatcatttcagaaattttatttccttgtattatatatatatatatatttaaagaataacagtgttctcttacaggtgtgaggagttgtaaaacgaaacaaaacattaaaagcgcacataccatgccgcaatgcgccaagtgtgtgtcccattaagcctgtggggtgttgcccttgccttgccttgtggatgggctgctctatctcaaatgataccgagaggagtccaaacagaatactaccatacaaacatttcttaatgcttgtgtgtgaacatagccgaggaagctgtcaggaggctaactgggatcaccctcatgctaccgaccgcttttgagaagcccacgagcagcgcgcccctgtcatcatgtccatctgatgcagcttctgcttctgcttctgccgccattgaagacagcgtgaagcatttcctccaggcgccacttgaaaacagtgggatcatcccaaacgcagcagtttttcagaccaagccagcttctctgcaccgtgttgctagcctggagaacctgcagaagaggatcgtcggggatgcaatgtattccgagaccgcgtcaacgacattctcagatcctgaagctcttgccgataggtaaaggttgctcctgtcctgtgatgaacagccgtgtgatgctctagcggcctaagtgcttctggtaatggaagttgtagcacccatgcgcctgggtggggtctacacagtgatttgtacactattttgaaggttaataataattgttgagaaatgatctcatccctttgtacctatataagtaaagtattccattaataaagagaatagagttttcactcttcat

SEQ ID NO: 36894 - DNA, 2095 bp, Zea Mays
aacaaatgttgcttgcaaatgttcgtgacttcgtgtggtccctagtgagggctggagcgaaaccgcccgctgtctcgcgtccgtcagacagcacgcacagacgcaggcgggcgacgcacggcagtgttgccaatggactcgcgctgcccccatctgctactgctcctccctctcctcctcttggccgccctcctgcccccgccgtcgtcgggggtgccggaggtcatctggctgccgacgagcgggggagcggggcccttgtcctgcgcgccgccggaccccgccgtgtacgaccgccccgtcatcggcatcgtctcgcacccaggggacggtgcgggcggcaggatcagcaacaccaccgcgacctcctacatcggcgcctcctacgtcaagttcgtcgaggccgccggctcgcgcgtcatcccactcgtctacaacgagcccgaagaccgcctcctcgagaaattgagtttgttgaatggagtgctgttcactggtgggtcagagaaggaaggtgtatattttgacacgataaaaagagtatttcagtatgttttggacaagaatgatgcaggtgaaccatttcctttgtttgcccaatgtcttggctttgagcttgtaagcatgattgtcagcaaggacaataatatcttggaggcatttgacgcccaggatcaagcatcaactcttcagtttcccagctatgctttggagggttcagtttttcaaaggtgtctgcttcatgctaagcaaatctttattttgctactgcttgatggggacattttagaatttagacaagttatcttgtagtgtgatatgaggcaagtaattgttgtagggtgatatgaggcaagcaacataggatggttccagtggaatattatctttttattctgtgttaccaaaactgaaactttagaatatatggtttaagctgacacatttatgcattcataaatgactactacggcataatattatctacaatgggtccctagaaggcaggggactacaagaccacatgcactccagcagagtgcggttaatttaaagaatgactgggaataaatttcttatgggaagatgtggttagtatattaaaaattattgttttacttgtggccttcgtgaattccacttgttgtaactactgacttgcaattgctcataggtttgacactgacctcatcaagaaagtcagcaccaactgtcttgtcatgcaaaatcacagatatggtatatcaccaaggcgatatcgagagaacgatgcactatcaagtttcttcaaaatcttgactacatcacctgatgaaaacggcaaggtctatgtctcaactgtacaagccaataattatccaatcacttgcacgcaatggcatcctgagaaagccatttttgagtggaggaaaccaatgatcccacacagcgaagatgcagtacagttggcagtacatcatgttggtttaagcatatgcaagaaaggaccttgctttgatgaaacttgcaagagtggtgaaagaaaaatggagttcatgtttacctagctcacccttccttgtcgtggaacagccaagcacgcaagtctccaaacaggcctcctgccgacaaagtgctggataacttaatttacaactacagtccgacatttaccgggaaaaaatcgaaatcgtttgaggaggtctacatcttctcctgagactggattgaacgcctgagtgtcttcaggaatctgtagttctgcactacattgctattgtagtgtaaccgtgcattagtattacccgtggtaccagaagttgtatttgtatagattcgttggactgcctgtattgcagtaacctttccaccgtatgggtggctctatagaatgcctataagcagcgcaataataatgataatgtaagactgaaaaaaaatacttgtatggagattttctgaatttaaaagtttctccaaatcaggtgaaggtcgaatgttcctggacctgattcatgaaatccatcgaatccaatttgtttggagtgacgtctttgctatggcgctatggcttggctcaagcatcttgcgtcgagaacgtcaccgtgttacctag

SEQ ID NO: 36895 - DNA, 472 bp, Zea Mays
gcggcttacaacactggcagcggccgggctcggccagcagcgactaattggctaggggctcgactgggggagggtgggggctcaacgtcagcgccatggtggacaaggtcgcgcctgccgagctgggtcgcgcacgggcaagaggcagaaatacgccgtaccgtgggggccagagttcaccgtaggagctgcgcccggccatggccatggctgaccgagcgaccagggcgctgccttggcactgagcgccgacagggatagagaagaaagagaggccatggtcaggggtacacgccggggatcctcaccttggagctcaacgaagatggctgttagaattctggactctaaaagagatggaagaacgcacgcacgcgatcttgacacaggagcgttggtgctgtaagcggcaacattttctattgattgtattcactatataaaggaattacatgctgcgttacaaggaaac

SEQ ID NO: 36896 - DNA, 2646 bp, Zea Mays
cccattaatgctacacgctgtcacccatcgtatcggtcaggtaggcacggccgatccggcgccagcagcggcggtgctcgaccttcaggcatcagagctgcgggacatcacacgcaccgctacgatctcctcctgcgagcgagatctcaccaccgcagcggcgccgcggccatggcgggaaggtatcaccaggatcagggcggggacgggggcgcgtccatggaggtagtcagcacgccgaaccaggagctggcccttaccaactgcgcatacgtctctcccgctgacctccgccgcttccccaacgggctcgccctcgtcgctgacgcctgggtcttcaccctacgtgaccacaatgctgttgcaagtggacgcattgccttgaatgctattcagcgtcggcaggcaaaggtttcagctggggattctgttactgttagcagatctagattatgccaaggcaagagccaaccgaaatgacgagctggatgctgttgtgcttgcccaacaactccgtaagaggtttctgaatcaggtcatgacctcagggcaaagggtgccatttgaattttatggaacaaactatgtattcaccgtcaatcaagctttgctagagggtcaagagagttctacaccattggatagaggattcttgtccagtgatacatacatcatatttgaggctgctcctaattcaggaattaaggtgatcaaccaaaaggaagctgctagcagcaagcttttcaaacataaagagtttaacctggaaaaattgggtataggtggattaagcgctgaattcactgacatatttcgtagggcattcgcttcaagagtctttccgcctcatgttgtcagtaagttgggcatcaaacatgttaagggtatattgctatatggacctcctggtactggcaagactctaatggccagacaaattggaaagttactgaatggaaaagatcccaagattgtgaatggacctgaagttctgagcaagtttgttggagaaactgagaagaatgtgagagatttgtttgctgatgctgaaaatgagcagagaacacgaggtgatcagagtgacctccatgttatcatattcgatgaaattgatgccatctgcaagtctagaggatctacccgtgatggtacaggtgtacatgatagcattgtaaaccagctgcttacaaagatagatggtgttgaggcgttgaataatgtattgcttattggaatgacgaatcgtaaagatttgcttgatgaagctttattgagacctggacgattggaagtacacattgagataaacctgcctgatgaaaatggtcgtttgcaaatccttcaaattcatacaaataagatgaaggagaattctttcctgtctccagatattaatcttcaggagctagctgcgcggacaaagaactacagtggagcagagttggaaggtgttgtcaaaagtgctgtctcatttgctttgaaccggcagataaccatggatgacctcactaaacctttggatgaggaaagcatcaaggttaccatggatgattttgtgaatgcacttcatgaaattacccctgcatttggtgcttccaccgatgatctcgaaagatgcagattgcgtggtattgttgattgtggcaaggcacataagcacatttatcaaagagctatgctcctcgtagagcaagttaaagttagcaaaggtagcccactcgtgacttgcctattggaaggtcctgctggaagtgggaaaacggctatggcagcaagtgttggcattgacagtgattttgcatatgtgaaaattatatcagcagaaacaatgattggtttcagtgaaagcagcaaatgcgcacagatttgcaaggtttttgaggacgcatacaagtctcagttcagcatgataattcttgatgatatcgaaaggttactggagtatgtagccatcggaccacgtttttcaaacttgatctcacaaactcttctggtcctcctcaagagagttcctcctaagggaaaaaacttgcttgtcgttggaacaacaagcgaggttggcttcctagaatctgttggaatgtgtgacgtgttctctgtgacctaccatgttcccaaactgaaaaaggaggatgccaaaaaggtattgcatcatcttgatgtgttcgatgacggagatcttgacgcagcagcagaagcactggacgatatgccaatcaagaagttgtacacacttgttgagatggctgctcaggggccaaccggaggaagtgctgaagcgatttatgccggagagaagatagatatcaaccatttctttagcatcttgagtgatattatccgttactaagcccgcatggagccgaaatgaaccctataagtatccagtaggagtttgtttgcacccgtgcttcatcaaccatttctgtagattggtttgatctttgatgtgttgtttttgtttgatgcacctactagagctgttggattagatcagaggcgaattacacgatatatcatttttgtattgtatgacgatgtttatacagttcttaatgggatccagctttacacctcagaacaccgataattttcacattcctattagacccgcttgttttgttgaaattgaattctattttaata

SEQ ID NO: 36897 - DNA, 3740 bp, Zea Mays
cactgaactcaggcctcactgcctttggatggaagccgataagagagggggggggggggggggggggggggggctgggatgggaaaatcggaggagctttagtgctctcaaatgtatcatctaaccatgttttcgacttggaatgaggcgagggtcgtgtactcgtgtactacagagaggattggaccatttctattttctgtttgatcggggagggggacaaatgtgactcgtgatttgtctaatgatcagacactcgtctccttatatctccacagcattcatctttctctccatgttggattgttcgcggccgccggtcctgctcctgtcctctccacgtcgccaatcacttcaccctctcaagtctcatctcccttgccaccatggctacgcttctctccccccctgcccacgctgccgttgctcatctaatcctctcctcccagtcccaaaccatagcctcctgccaaagctgccatagttgaagttgcccacatgtgccactttggtcatcgtcgtctagttggatacattcgaggcgacgacacacatgtgatagagctcgaatagttacgactgggcattgggctcgccggaagccatggatatggttcttcccgtcgtcaccgaagaagcgtaaattacaggaccccaaacgaccccaaaacggtaacacaacgaccagttctattaggtagcttatcaattttctttccaccagtgcatgagtgcgggagcaaagtgcggtgcgctttacaactgcgtggcactaataaaacgcgcgcatacacggcttctcagtttcagactccagactgaaaaattcccccgctgtttgtgcctgagacgcagcgcgtgctcactagctagcgtgtcactgagcgccgggcccgtcctcggtgcgccaccttccctttccgctttccccgcgtttccatttcgtttcagtcagtggctcagtgcgcgactgaaggctgccgcaacaccattaaaccaccaaactgcttctcctccagtctccgcttcccgtgcgccgcgggaacaaggttctggaagcttcggagatggggaggagtagacgccacgaaggaggaggaggaggagaacgacggggtgcgggtgctggaggggtggccgccgccgccttcgccgctctgctgctgggctgcgtcgtcatggccctcgtcggcggcgccgccgcgcagggcccccggctcccctccgactacaaaaccctcagcggcgccgctccgctcgtggtggccagaggcgggttctcaggagcgttcccggactccagcgagggcgcctactccttcggggcgtccgccagcgcgcctggcacggccatgtggtgcgacgtccagctgaccaaggacggcgtcgggctctgcctccgcgacgtcaacatgaagaactgcaccaccgtcgaccagacgtaccccgggaggaagcggacctacgtcatcgacggcgtccacaagaccggctggttcgtcccggacttcaccagcgccgagcttcttcagtccgtgtacctaacacaagcaatctggtctcgcactgagaggatggacggcatataccctatcgtcactgtccctgacgttcagtccatcgtcaacacgtctcctatctggctgaatgtccagcatcccatcttctacaaacaacgcgatctggacatgagcagctacatacactcgatccggaagctggtgcgcatggactacatctcgtcgcctgagatcggcttcctcagaaacatatccgcaagagtccgccgcagaaccaagctcgtgttcagctttctcgacaaaaaactcctggatcactccgtgaaccagacatacggttcgctggcgaggaacctgacgttcgtcaggtccgtcgcgtctggcatactggtcccgaaggactacatctggccggtgacggccgataactacctgctgccgtccacgtcgatcgtcaccgaagcgcacgaagcggggctggagatatacgcctctggttttgtgaacgataaggctgtcccctttaactacagctacgatcctctggcggagtacctgaacttcgtcggcgatggtggcttctcggttgatggcgtactgtcggactaccctattactgcatcagaggcaattggttgttttgctaacctgaattcaagtaagactgatcatgttacagggaaacccttagttatctcccacaatggcgctagtggagactacccggactgtacagacctggcctaccacagtgccgttgacgatggcgcagatgtcatcgactgtcctgttcaagtgacaagcgatggagtcctcatgtgcatgagttccattaacctgcttgacaccaccaataatgctgcgttcatagcaaagtcactagggatcgacatggttgactccgtaaccgccgccttaagtgccgccggcttcagtaaccagaccaccaaggaagttctgatccggtcaacagacagcgccgtcctcgtcaaactgaagcagcagaaaacgagatgcaagctcgtgtacaccctccccctaggcatcggggacgcttccaaaccctcgctgaaggacatcaaggcgttcgcggaagccgtagtcgtcgacaggacctccgtcttcgctctgagctacgatttcatcatgggacagaacaggatcgtgcgagacctgcaggcggcggggctggctgtgtacgcgcaggtgttccggaacgagtacgtagcgcacccgtttgatttcttgggggatccgaccgtggagatcaactactatgttcagacgtttaatctgtccggcatgatcactgatttccccaagacagtcagaagatacaaagagaacacctgtacagctctggggaaggatatgcccaagtacatgcggccagttgaggctggctcccttgcagatttcctccggtccttccaaacccagccgccgtctgtggcaccgatgccggcgctgaactcttcaagcgtggaggagccgcctcttccaactgctgcgccgagaaacgtgccgcctggtggtggcgccccagcggacgccgccgggactgctggcggcgctgctccttctgatgcgagttccggcggcgctcctccttctgacgcgcgtcacacggctaccggaagtagcggtatgctgcttgtggtgctggtttccgcggctctgctgatctgattctgagcagacacatgagactgtatagtagacagagccgaagcaaatgcaaatctccgttggattcgatcaagctttgaccagcgatataccatacacttgtttttctcgggtatatatgtttgtatttggccgcatttttcacgtccacatgtgtaaaaaattgtcagtggaaacgttatatgtatcagccggaaattttatccggcgatgatcaaagttctgacaaggattaagcgatcaccacaaactcccaataatatggtgttatgtaactgtgaatgatttactctttattgttatatttatatctccacgctaaaaatctttactacttattaaggctgcaatagtagtctgccaccattccatgttctacaattctcatgtcttgttctgcctttctgattccctcctccccgcgcacagtccatttcccatgttatgccaccattttatatctatcattttcattctccctccccgcaaagctcattcccatttccattcccccgtacagtcgacgtctag

SEQ ID NO: 36898 - DNA, 1589 bp, Zea Mays
atgatttgattacgacgcgcggtcggccgcgcgccggccgggaatctcgtagtccgccctcgatcgcgccctcgacgcaagccatcctcctctcctcgctcccctcccaactactcaagtttgacggcagctggcaaaccattctcttccttccttccttccgtgtccgtccgtcgtctccctcttgggctagctcttgcctcttgccatataaagatcggttagtccaagcttgccagcaagttgagtacagaactgcgggtcgtcgaccggtcggccggccgtggttgcattgcagttgcattgcagctgccacttgcattgaggatgtggtgttgcagcggcgcggacgacgagccccacgccgccccgctggccgccaacccggccgcgacgccgccgcgagcaccagcccaggcgagggggccgagcatgccgaggaccggaggcgccgccgcgtccgctgccaaggtgctgcccatcgacgtgccggccgtcgcgctgtcggagctcaaccgcctcacgggcaacttcggggacagggcgctggtcggggaaggctcgtacggccgcgtctaccgcgccacgctcgccaccggggaggtcgcggcggtcaagatgttcgacaacggcagctcctccggccagtccgaggccgaattctgcgagcagctgtccgtggtgtcgcggctcaagtgcgagcacttcacccagctgctgggctactgcctagagctcaacaacaggatcgtgctctaccagttcgccaccataggctccctctacgatatactccacgggaagaagggggtgaagggcgcggcgcccgggcccgtgctgacgtggatccagcgcgcgcggatcgcctacggggcggcgaggggcctggagcacctgcacgagaaggcgcggccgtcgatcgtgcaccgcgacgtgcgctccagcaacgtgctggtgttcggcggccacgacgccaagatcggcgacttcaacctcaccaaccagtcccccgactccgccacgcgcctgcactccaccaaggtgctcggcacgttcggctaccacgcgcccgtacgcgatgacggggcagctgacgcacaagagcgacgtgtacagcttcggcgtcgtgctgcttgagctcttgacggggaggaagcccgtggaccacaccatgccaaagggacagcagagcctggtcacctgggccactccgaggctgagcgaggacaaagtgaagcagtgcgtggaccccaagctcaaggacgactacccgcccaaggccgtggccaagctcgcggcggtggcggcgctgtgcgtccagtacgaggccgatttcaggcccaacatgaccatcgtcgtcaaggctctgcagcccctcgtgaacgctcggccaggaggagagtagctagatgtcgtaaaaggctcgccctgagcagagctgtgactgtgatggaccaagtttctggacgtcgtagtagttcatgtcatgtccacggcatttctgccagaatgttgccagcaacggcctgcttggcctgttcaatcacgagagcattaaccgcgcgtgccattgcgtgtgaaaagtgtgg

SEQ ID NO: 36899 - DNA, 2497 bp, Zea Mays
gcggagcacgggcgcgaggtggcgagctgcatgtgcccagccacgcgccaacgaataggcgcacagcccgatggaccgcgcagacggaccgacgcaaccaggcaccatccagtgcatgcgcacccgcggcccagccatggacatggggtttgtcgagagccagccggagttgacggccgcgccggcggcgggacccggcacgggaagcaggctgccgggcgggggcggcgggcgcaagcggaagcacctctcctccatcgccaaccacgtgctccggcaatgttctctgacactggacaggagcgtggacgatttggtggcagacttcgagctgggcttaaagactgcagcagtggacagctactcaagaaaactggtcgagttctgcagtctccaggcgctgcagatcatcacgtcacgcgatataggggagaagatcagcgagggctcgctaggtcggttcaccttcgatatgatgctggcctgggagaccccgactccgtcggaccaacagatcaccatggagagcgtagcgaaggagagggaagataggaaggagacccttggagaaggtgaagctgtgatgggtgatgagacgtcactgttctattcagacatcatgcctcttcttgtgaatgaagagccaactgttggggaagaagcgtacgtgtggtttggatctgtgttccctttggcttgtgacgtggtcaatgctcgattcacattcgaagctctcactgccaccacagctaacaggctgcactaccctgcctatgacaggttcctgaaagagatggataagtccttcaagttcttccaagacttgccaactccgactggagttgaattcgctgaggatgagttcattttgcacatggagggcacggcagggacacagagagtggtgaggcacattggaaccactagctggccaggtcgagtgactctgacgaacaaggcactgtattttgaggcttccggaaaattttcatacgaatctgcaatcaaggttgatctctcagacaccggagtagaacaccaaatcagcacggcgtcaacaggccctttcggcgtgcctttgttcgacaaggccatcgtgttcgagtcactaccagagcctgtggtcttggagttcccggagatgaccagctcgacaaggcgcaacacgtggctcgctctgatcagggaagtgctgtccatccaccgtttcatctcagcgtacagcatagtgtcccccgtccacagatgggaggtgcactccagaaccatactaggagtggtacgtctccacgccgcgagggagatgctacggatgtcgccgccgccggcttccagcttcctagtgttctcgctgtacggcgacatgcccaagggcgacttcgtgctcgagcagctggcgagcaacctgaagcggacctccaccatcacccggctgagcgcgtcctacgtgttcaagggtctgagcaggtcttcttctgtcccacctctgagcgcggaggtggccgccgaaggccgtggcgcggacgacgacgccagtggccgcgagcacgagcggcccctggcgtccctggaggacaagatcggccgggtgcgagatgaggccagggaagtcaccgccgccaacgccgccgttgaagggatgaaggacgaaggcatctcggatagtcttctcgtgctggtggggttggtcggtcccgtcggcaagctgcggcccgcgatccagcggataacctcgtgggagcggccgcttgtcactggcagcatccttgccgcagcttcgctgatcatatacaatgaatggttcagttacgtgctagctgcgtccctggtgctggccgccggcgtgatggtctgggcgaggcagaggaagataggggagctatgctcggaggtgatcatcgatgcctcttcgtcgtcgtcgtcggacaagacaacgatggatagcatagtggaggcgcagcgaagcctgcagaaagtgcacaggtacatcgtgaccgcgaacgttgccatcctcaggctgtggtcgattgcgctagcaaggtcgccaaagcacacagagacggtgatctggatgctggccgtgtccgcggcggtggtagccgtggtcccgttcaggtacattctgatcgggctggtggcggggagcttcgcgttgaacacgagggtcgcgagggccgtgatgaacccgcagggcggccggcggtggagggagtggtgggagtccatacccgccgtccccgttcggacggtgcacagttgacaaaagtatattttcctctactacgtgaaatgatcgcagaaggaacccgttatagaagcctgtttgttcaggaagaataatgaagtcaataagaaactgtttgttcgcttgtgtctcttttcacctcagccagcaatttcaccttgtaatgaacaccgccatgcacccctgtttaattagtttcattcactaaattttagtttctgtcgcatcaaatgtttggattttagtttaaaa

SEQ ID NO: 36900 - DNA, 1808 bp, Zea Mays
cgccgcccactcttctccccctccttgcctgcggattggggcgacaggggttggcgatgccggaggtcaatgccggcgcgctggcgcaggcggagcagaggaagaaggcggggaggtcggttccagagcgtggaaagctaatgtttatcattgggatttaaagccaaaaaatatattattaaatgctgactgcaaactcaaaatatgtgactttgggctagcaagggtcgcgtttgatgactctccaaccacagttttctgcacggactacattgctactagatggtacagggctcctgagctatgtggatctttcttcagcaagtattcaccggctattgatatgtggagcattggctgcatttttgcagagattttgactggggagcccttattccctggtaaaaatgtgtttcaccagttcactttgatgactaatctcctgggcacaccatcaacagatactatttcacagattcaaaatgagaaagcaaggaagtttctgagctgcatgaggaaacaaccaatacccttttcagagaagttccctggtgcagatccttcggctctcaagctcttacaaaggcttctagcatttgatcctaaggaccgaccaacggctgaagaggcgttggccgatccctattttgaaggcattggggaagtggagagggaaccatcctgtcagccaattccgaaaatggaatttgagtttgaagaaaagtttaccgaagaggacgtcaaggaacttatattcctggagatactgcagtaccatcctcaacttctgaaggattacaagaatagctctgaaaaaacgagctttctatatcccagtgctgttgacaagtttcataggcaattcactagcctagaggaaaatagagggagtaatgtcatgcttgtcaggaagaatgcttctcttccaaggacaacaaccgttcactccactccaattcctgcaaaggaaggtccaacagcaacctcccaggctgctcaaaggattccagcagccagaccaggaagagtggtaggcccagtactaccattcgagagcgcaagcgtcactgatcaacacatcgcgcgacaggtggcaaggaacccagccgttcctccagcaaccaacacctcgtcagcctactgctaccacctgaaaccggacagcgccgacaggcaggagcaacagctagagcttgaggaagaccatatgcagtataggacagggcagcatcccatggatgccaaggggcttgcccaaagcgacctaacagacagggccaacctccataggagcccgctgcacggcgttgctcccttcaaaggcgtcgcagcggtcgctggtgttcttcaccgaaagagcgaaggatgcccgatgactggtatgttggatgagctgcagcagatctgcaacgggatggtgaaactggttcagttaacgctaggcctcgagctcatgtttctgaactcgaaggaatttttggaagcttaacaagaatgcatctcttgctatcgttctatatatagcaaagtgatttcttctccggaatttggaggattagttaggagaaagctaggtgataacagacacatgatcgttaaggtgttcgctttggattaaagtcagccaatttctacgctgttttgtctttatagattacagttgtagcagcctaaacagtctgcatacctgtgtatactgtacacccatttaattgagggtttccaaacttttgtttgatggcagtaagctgaagacaccaccagatcatgttggctcttttattatctcccagggagacttcacctag

SEQ ID NO: 36901 - DNA, 485 bp, Zea Mays
cgcagtatgaaacctatccctatcccctgcccgtggctcctgcccagctgctaagccgcaaccgcctctcgcctcggacctcggtcgacgcctcgacggacgacggtccctctcggttctcgcgggtcacggctgtctcctggctggctggcttgcaagcaggaagcagctttgtctccacgcgggccgcggctagctcctcctcggtcttggcttgcaagcaggtgcaggtgaggtgactagcttttgaagtcgtgcggttgcagcagtctttgaggttgcagttggccagttgcagcaggtcgtgcggtgaggcacatagaattgttaaagggcagcgacaactcagtatatgttttacttttggataaactggataaactaaatgtctgttgtccctggcagctatttgtacatatttcatttttgttgtttgcatatgatctgtgccatagcgtcaaactatcagtatacttgtatgtgac

SEQ ID NO: 36902 - DNA, 309 bp, Zea Mays
gaggaacctataccgtattacaaaattggtggaaaaaaggaaaaactgcaatgagatcggtgagtaacagctagcacgcggcaaattccagtagcgcaagtctgcaacggcaatgcaatcagagcgacggcaaagcagacgcagacgcaggtcgatgcgacacagcacgaagggcaatacagacagtacagggagccgatcaatcgcctgcttccagcaggccaggagcgaggtacttagggcttcatggcgcaagacgattggaccgaaaccgccgtgggccaagcgtaccacgaagcgaggggggca

SEQ ID NO: 36903 - DNA, 4510 bp, Zea Mays
ataacaaggagtcctttattattattcttattatcttagtgtaaatattattattattaggggcgtttacagcgtagcaagttcactcttgcaagcaagggacttttacaagagcatgtagctagttagttcatttggagtgtgaacatgtcttatttgcacacttgcttttttcccctctctttattttctccatcttcaggatggctattattagctcctttgcatgcgttcatggaattctgcgtcagaaaaccaaaacggaaaatagcattattggtcagtgtaatatacatgatatatatatgctacggtggagttattaggatgatatatctctactactacttatgttagtagtgtaggcgtccacacaccctctcggcgcatggttctgcctctgcagccgcgacacccgcgcgtgccttcgcctccgccgccgcgatggccgtgcctctgcccccgcctcctccgccctcgcgacgctgcgccctcccccgcgatgcctgcgccttcgtccccgtgatgctcgcgcctacccccgcctcctctgcccccgcgacaccgcgcgcgcagcctcctccccgcgatgcccgcccaagctcccaaatgccggcccccgtctcctccaccgcgactcccctcgctctcccgagactcccagatgctggcccccgtatcctcggccctgatgccgccgcgattcccagatgccggcccccgtatcctcggccccgcgctcgctctcctgagctccgacgggctcccgccctagcccctgacaccatgttgtgcccaaccctaaacctagccaccacgccgtcaacaacgccaccttccttcctcgccaccacaccttctttagatggaaggcgcgactggtggcatcttcctgatctcggagcacgtctaatcctcgctccaaatgctgctccgcccccaatccgtgcggcatcttcagatggaagccgggacaatgccccatccccctctcccgagccccgacgactgacattccagggatgtcgctctgcgatcctcacctcctcgtcgttggcggtcgcgcgacctcctgaccgtcgtctccgcccgcgagatccccccgactcgcccacctctccgtccacagccgcctccatcacgcacctccacgccgacgagaaggctcgcccacctctcagtccacgactgcctacgacgcgtcttctgaataaagatctctcgaagcacccggtggatgggttctctgctgggctggtcgacgacagcaatgtcttcgagtggcaggtcaccatcatcggaccgcctgacaccctatagattggttgttggacctgtttggtgttcttcatgatgggaagaagtcgtacccgaccattctggcatgtatgttggtagtttctctcgagcaatcctcttcccaaaagtctcgagaagcttgagcaggttctaatgcttggcctagaaaagggacttccaatggtgctgcctaatccagaattccagattatgtcactgtcgaagcttgagatcttcgtgtcatgtctgggtttggaggctcgtcggcaaccggacaggaaaacagcaaggcggaagggcattgctcgatcgctggtccgatgagtggcactgtcagggagcgtgacaggggcgacaaatctagacctccacgtcggtaagatgttgtggcaaaatgtcagtgagctcacattttgaggagctgagggtcaatgtcagcgagctcactgttgaggagctgagggtccctgagtacctgcagttcaaggaacaacttatggaagaaggctttaaggttgaggctgggagaacttaccatcggacagttctagagatacttgaccaattggaaaaatgtgcaaaatcatgttctcctattgatagaagcatttatttagatttggcttacattgatggatgaatatgatttatatgaagttcctggtatctatcggcttcatggtatatctctactactcttaagaagataccaggtatgttcctttcctttcttttattttcttagccccatctttatcatgttttcaccattacagagtttgcctaccgcccccgttcgcccgcaagcaaactctagccgaggaagacgcggtttctcacctctgcgccctcgccagtcccacgagccccgccttccctagcctctcaatgcctccagattctctaccccttgccccccagtcgttgtttccgcccgcgccgctgacccatgacctcgcatgcggggctagggtttccacatgcgatggaagtagcggtgatgactttgctgttgtttgcatctgcctcgacttcctcggtccggtcttgccatctaccagcgctgcctaggtttgcctctcctgtcctgcagtgctgaagttccgcgtgtgctggttggtgtgtgttacgcgtcttggaacgagagggcaacttcgatgcggggctttgattggctgttttgtttgtggtgggggtagttgggtttgcgacattttttaggaaaccgattggtttcgtttcagcttgttttcagagaagggatagtggatttgtcaacactagactggattccataaaaatttgatagaatcagtgctttcagctttgagctagactacacatttttctgtgaggttgcaccatttttccctagataacttctatgttgaaatggtttagttctgaagctgtcattgttagataataacaaggcaaatagatggttactgtggcagtcaaaagtttgaagccagatgcgcttcaaggtcatagagaatgggtggcagaagttgactttctgggacagttgcatcataaacaccttattaagctgattggatattgtattgaggatgatcaaaggttacttgtatatgaatttcatggcacggggaagtcttgaaaatcatcttttcagaaggactcttcccctaccttggtccaacaggatgaagattgctctaggtgccgcgaaaggactagccttcctccatggaggtcccaaacctgttatttacaaggattttaagacattgaatgttcttcttgatgtggagtacaacgcaaaactatctgatttcggtttagcaaaagctggtcatcagggtgaaaaaactcatgtatctactcgggttgttggcacctatggttatgttgcaccagagtatgtaatgacaggtatcagggataaacttttgacttcagtagctacctatagcagaaattatgtaccttgtttatctgttgcatgttggttctttacactgttttctgagcttgtagttattctcgtgttcactccatattggatagtaaattggcttaacatttttgtccgaagacataaaactaaggtgccattacaaatgttcttctttcaagtgaaactgtgtttttcgtttttacatgcagtaaaggttgtaaggctgtagacttatataatgaatcttgcgctccacttctttgggacatgatttaacatttcttaacatttctcactctataacgctttcagatcacttttcatatgttttttagatgcactttttttttggagactaagccctaagggcaacaatggagatgaccagcgtcttggtttatcaagaggaagttaatccctctcaactgaaactcccatcaaatttggggcgtagtgtgtcgattcagttgtaactattatatgtcattttgggttagcaaactgtatctactaatttctcagacttatgccttttgagctagaaacttgtgtaagaattttttgcactcagtgacatgctggatagtgcgagtagcagattacaatagtgacggatgaacattgtattttactttacatgatggatttttttgatgtgtaaggcttttaaggcatgtaaaaattcttaacttttaaaagatgctaacacgaatataaaattgcaatcattattcttgaatttcaatgtatcttatcataacatgttcactccgtagcaacgtacgggcatttacctagtatatatatatatacgcacgtggtgcagtcgaagttgagggtgagcgggaacggcagcggcgcgccgcactgcgcggggaggtcgcggatggcgtcggcgttgagcggctggtaattggccgccgcctgcttgacgcactcgcacgcctgccgccgctccgccgggccggacggcatggccctgatccgcttcacgccggcgcagcactcggcggccggggccgcctccttgcccgtcacgtagccgacgcaggggcgcaggcttgcgtccacgtccgcgcagttcacgtccgccctaaccgccgccgccgccagcaggaccaacgccactgctgccaccgctgttgttgcggcgccgcccttcttcttcatcatcgccatcgatcgatctgtgtctctctctctcccgaacttgacttgctgctgctggagctcgatcttagcttgttgctgctgcgttcatggagcggctcgagcgctggggtttta

SEQ ID NO: 36904 - DNA, 2927 bp, Zea Mays
caaaaaccagcactgctcccaaagccctactgttattaccatttctcctttcatttccttcatttatttctctcactaggctagtagtcaaacccccccctccgcctcctactcctccacttgccccccagcctgtctctctccgcagcacagaggtcaaaccaaaaggcgcaccccgccgcaacccagcccaacccaccgccgccagcgctctgcaatggcggctccgcgcccccttcaaaaccggctttctcctctccccctctccatccccatcctcctcgcaatctccctctactagtgctgctgctctcattcctccaacaatccaaggttcgagctcattcattacacgaatctgcggccgcgtgggtgccggagagcggcgagcaatggagggggtgtggaggaaggccaagagggcgctgggcgccagcctctgtgtgcgcctccccgccgtcgccggcgaccgcgaggacggcgccagcgagcgccgcgcctcggatgcgctctccctcgactctacagcggcggcgcacgcatcggcgcccaacacgccggccgcgccggggaccggcgcgctgcggaggtccaagtccggaggcaagtcctccaagagaatgtgtgcaatatgttttgattccatgaagccaggtcttggacaagccctattcactgctgaatgttctcatatgtttcacttccactgcatctcctctagtgtgaaacatggaaaccatgtatgcccagtatgccgggcaaaatggaaagagatccccttcaatcgctcattatcttctatagttcctcgtggaagaggtggactgaatgtaaaccaagctcgattgccccaacaaggtgcctacatggctcttctccgccaggttccaaaccgtcagcgagaaggtccagtattggttacttctgagccatcagacttcaatgatgatgaacctttgcataagatggagcctgctaatattggatctagtagaactgtggaaattaagacatattcagagttttcagccattcaacagtcatctcaagatgactttgctgttctgatccatctgaaagccccatatgctaacccagagcaggtcataggcagaccggtcaatgcaacctcagttggttatcctactgcccgcgccccagttgatcttgttaccgtgcttgatgttagtggaagtatggcaggcactaaactggcactcttgaagcgagccatgggttttgttatacagcatcttggcccatcggatcgcctttcagtcatcgctttctcttcaaccgccagaaggttgttccatctccaacggatgtcacactctggccggcagcaggccctgcagactgtcaactcgcttgttgctagtggtggcacaaacattgctgatgcactgaagaaagctgctaaggttattgaggaccgaagccatcaaaatccagtatgcagcatcattctcttgtctgatggccaagatacgtacaatattccctcaaatattaggggtgcccggccagaatacagttcactagttccatcctccattctaaaccgcacatttggcttagtgccggtgcatgggtttggttttggagtagaccatgattcggatgctttgcattcgattgcggaggcctctggcggtacattctcctttatcgaggatgaaggtgtgattcaggacgcatttgctcagtgcataggtgggctcctcagcgttgttgttcaaaacatgcaagtaaatgtggagtgtgtccatcctggtgtccagcttcgctccatcaaatctggtagttaccacagcaaggtggctgcacatgggcgaaatggttccattgatgttggccatctctacgccgacgaggaaagggacttcctactgtcggtgagcttaccacattgtcgtgaacagaccacacttctgaaagttgcctgtgcctacagagattcattgaccaacgaagagatcaagattcagggtggcgaggtagcaatcttgaggcctagatcacccgtatctgagccagtttgcatggaggttgaccgcgagaggaaccgtgtccgtgctgcggatgctatcgaggccgcaagggctgctgctgagagaggtgctctttctgatgctgtgtcaatcctcgaagactgccggaggatactttcagaaactttttcaagccggagcggggaccggctgtgcatggcccttgatgcagagctgagggagatgcaagagaggatggctaaccggcaacgctacgaggcttcagggcgggcatatctgctgtctggcctcagctcacattcttggcagagggccactgcgcgaggcgactccactgacagtgacacacttgtttattcctaccagacaccatccatggttcacatgctacagcgctcacagaaccactgcccttctcctcaaggcccttcacaacctagggtcttggtgaaaccccagccaagaggcggtgaggcgggcttggagttaagcacttcactattttcggtggatgttggatccatcaaaagtacaaccacgccctccctctgctccgagctccgtcctcaaatcgtggtgggtgtatgcactcacggctcacgggaaaaaggcgggtacggagatggagccgccgagatgcggaggcgcggggctgcacggacacctaggccagcgcgcgagcttcgggcgccccagcgttgccgcatctgggagacgagcggaggaagccaaagatccgcatcagcaccgcaaggggggctgccgacggccgacctacgcgttgccgaggctggcacgcggagcttcgagcatgccagggcggggacgcgcgaagatgagtggacgagcagagcaagcgccggggcagagaagccacatatcatgagtggtggtgcaggaggtggggtttga

SEQ ID NO: 36905 - DNA, 2701 bp, Zea Mays
cgcgttctgcggcgcagcggctgggctgaggacggcgatgctcacacacatgcttgaaacaggtacacattgggaattcaccaacctatagacttgaaaggaagcttggaaagggaggatttggacaagtatacgttggtcgacgtatttcagctcctcgtctcagtgaccgtaaccctggttcaaatgctttagaggttgcactgaaatttgaacaccaatccagcaaaggttgcaactttggagctccttatgagtggcaagtttacaacactcttagtgggaaccatggtgtcccacgggtacactacaaaggaaagcagggagagttttacatcatggttatggatattttgggaccaagcctatgggatgtttggaataataattcccactcgatgtctgttgagatggttgcttgcataggtatagaggcaatctccatactggaaaagatgcactctaaagggtatgtccatggtgatgtgaagcctgagaacttcttgcttggtcctcctggtaccccagaggagaagaagctttttcttgttgaccttggattgcaactaaatggaaggatgctggtacggggcaccatgttgaatatgatcagagacctgatatttttaggggaactgttcgctatgctagcgtgcatgcccacttgggaagaactgggagtaggagagatgatcttgaatccctcgcatacactcttatttttcttctccgtggccgcctcccttggcaaggataccaaggagagaacaaaggttttcttgtctgcaagaaaaagatggcgacatctccggagtctctgtgtggaatctgtccacaacctttccggaattttgttgagtatgtcgtgaacttgaaatttgatgaagaaccaaattatgctaggtgcatctctctttttgatggtattgttggcccaaatccagacataagaccgataaacactgatggtgcccaaaagctagtatatcaggttgggcagaagagaggtcgcttaatagtggacgaaaatgatgatgagcaacctaagaaaaagatcagaatggggatgccggcaactcagtggattagtgtctacaatgcccgtcgacctatgaaacagaggtcagcatgatgcacatatctgcataatggcagtaacatgaattttccattgtcttgccacatttgtttatcaggtaccactacaacgtagccgataatagattggtgcagcatattcaaaaggggaacgaagatggcttgtttattagttcagttgcctccagctcaaacctgtgggctttaattatggatgctggcactggttttacatctcaagtatacgaactttctagttactttcttcacaaggaatggataatggaacagtgggagagaaatttctatatcactgcactggctggtgcgaataatggaagctctttggtgattatgtcaagaggaacacaatatgcccagcagtcctacaaagtaagtgatacatttcctttcaaatggataaacaaaaagtggaaggagggcttctatgtcactgctatggcaacagctggaagccgatgggcagttgtcatgtcccgcaatgctggtttcacttctcaggtagtggagcttgatttcttatatccaagtgagggcatccacatgcgttgggacaatggctatcgcattacggcaacggctgccacatgggaccaggcggcctttatcttgagcataccaaggagaaagcctactgatgaaacacaggagaccctgagaacatctgcttttcctagccagcatgtgaaggacaaatggtccaacaacctatacctagcttccatctgttatggaagatcggtgtcctgaagcccgttttcacgatttggtctggttgctgagaggtatattgatatcaaatacaggtggttttatgatatcaatggggcattttgaagctgaaaactctgctaacctacttacctgcaactaacaaaaggtaacctatatatgaggaaaaaagaaagcaaagtctgttgtgtttcgctaatctctaccatggagcaaaagaacattgcggtatgcctttttttttaattgggctgtgtataaattatccaaagtattaggttgtgctgtaaagaatgtagaagtgtacctgctggacggttgccatgtatataaagtcgaattttttacaatgttgtttcgaattacaaagatggaatttgtagctttttcttcattcatctattcaagttacagatcaatagctactcccctccccccaaattataaaaggttcttgtcttttgaagatcattgcttttgtaatgtatctagatatatgctatgttgagatatatagcaaaaaactatctaaaaaaagtagaacgtcttacatttttaaaaaaaagatgtggtatgatgtagttcgtttgggtacatcacccaggatacaaaaaaatgcttgtatgtatgtcgttgatggtccgacaagttcgctttctctcttcgatcccagaactagagttggactgctatagcaatacctaaaagcagtatgatagcaacacacacaaaaggaagtcttgtttttcactatgaatcaattgtcctgttgttccattggacatctacagtgttgctgcatttgctgcaaaacacagaacagtcagaaagaaaaaaacgaagaaacaag

SEQ ID NO: 36906 - DNA, 813 bp, Zea Mays
gcagcagagcccagtccgcccgggacgtgtcgcgcttacgtggacacgctgccagacgggcacaaaccacgaaacggaacccattgatcgagccgaagccgattgacggcaggcagcccatcgtctcccctctccggctctccccacctcctcttttaaagacgacgccaccgccaccgccacccggccctccctcgtccccagcctcgccgtccggcgctgccctgtcccatctcaccgcagctcgctcccacctcgagccgcgagcgcgcccgtagcagtctcaacgcgggcactcgcttgcgtaccccaggccgatcgacgagtccgcccggcccgcgtctcacgcgtgagcctgttgcgcgcggtggcttgttgttcgatcatattcgtgtacgggcaccccgcacggccggagaatcacttgccagccccagccccgttttccggggctcctcatccctcgcctcgccggtgttgcttcccggaggtttccgctgccgctgcgtgccggtgccgcgggcaggcgcaggaggctctcggctgtttccttagcgtgccatcgtccatggaggcgaagcagcgcccgcggcacggcgaggagaggaggccgccggcgacggacaacggcggcggcggcggcgaggagtacgacccatggacggcgtggctctacaagccgcacaccatctcggtgctcctcgtcggcgcctgccttctcatctgggcaagtggagcactcgatcctgaaggcgctgctgctcacagtagcttgacatcaatcaagaggaataaagaaaagaaggaataaag

SEQ ID NO: 36907 - DNA, 2892 bp, Zea Mays
gtcagttgctgttgcgggggtgtggtgtggccgccgagccgaaagcggcagcattcgtcgtctcccagatgcgcatgcggcggtagctagcttccgtcaccgctcccccagtaggccagtaccaccaaatctctagcgaggccgcccgcaaccgtgtcccggggttgaggatctgcgcggggccgtcctcgcgcgcgccgccgcatccccgccgtcccactccggcgaggctggctgcgttccgtcgtcgtcccccgcaccgccgctgactcctggaacaggaaccagcttcttcgcccccaccatctcacgtccagcgtcgcgaactcgcgatggcgggcgccgccactcctcctccgtcgtcgtcgtcgtcggcgtcgtgtggcacggacgctgcctacctgctgttccgcggggagacgctgctccccgacggcgtccacgcctccctctacgccgtcgctctcgcgtactgcttcgtggggctgtccgcggtcacggcccgcttcttcaaatccatggagcagatcatgaggcactcccgggaggtggtggtcggcgtggacccgcgcaccggggcgcccgtcgtgaggcgcgacaaggtgtggaactacaccgtcgcggacattgctctcctcgccttcggcaccagcttccctcagatctccctcgccaccatcgacgccatccgtaacctcggtcaactcacagcaggaggtccaggcacacttgtcggctctgcggcgtttgatctgtttccgatccacgctgtctgtgtgcttatgccaagggcgggatcaaagaagaagatctcggacctgggcgtttggttagtcgagctcttctggtctttctgggcatatatctggctctatgtcatcttagaggtgtggacgcctagagtgatcaccctctgggaggcatcgctgacagtcctgcagtatgggctgcttctactccatgcgtatgcgcaggataaacgatgtccatttgtgtcgatcccgtttgcgagaggtgagaggcctgaagattgggttccaccagaagatgtttctgctgtttattacgccaaatgtgatggcattgacgagacactccctatgggtgctgacgggaacgatgggattgtagacatcttctctgcacattcctactacgatgcagcagagtacagtcaacttgcagaagaggatatggaaggatcgtcaacaatggatcaagttgtaaagaacacacaagataacatgtcctggctttctatttggtggcaacaatttgttgatgcttcaatggtaatttggttcatttcatttatgggacagatgtgcctaacccttttaatacattggacaccataactagcatggtgcatggactgggaaatatgttctagacttttattttacaaatagttgatgaatttatttctaggtgctgctgagacaaatttgtttcccagagatagttatattgaaatagtttaatccacaccccttcccatctagccaggagaaaattcagtagcattaacatttgtcatttgccagtcttaaaactgagccccaatattaagaactttctgttttttttggcatagtaattgtttttttagcaatacatgcagttggagagccctgagtcaatgaagatggattctgtctgcctgaggtacaccagaatattttggaacttgatcattgcgccttggaagtttttgtttgcttttgtgcccccataccacattgcacatggctggattgcttttatatgctcactgatcttcataagtggtattgcttatggtgttactaagcttacagatcagataagctgcgtcacaggttaaattaaaacatactcaaaacacaactttaatgttcaatttgctgaccaagatgttaccttcacgtatgaagacaaaaaaatcttctgttttgagcaggagtaagtccatatgttattgcattcacagcactggccgctggaacctcatggccagatctagttgctagcaagatagctgctgagcgtcaagtcaccgcggactctgcaatagccaacatcacttgcagtaactcggtgaacatatatgttggcattggtgttccatggttgattgatacagtgtacaacttcttcgtttaccgggaaccattgtacatagataatgctgccggtctcagcttctcccttctagtcttcttcgcgacatcatttggatgcataacggttttggttctgcgtcgtattatactcggtgctgagcttggaggccctaggctatgggcttgggttacatcagtctacttcatgatcctttgggttgtttttgttgtgttttcctctttaagagtatctggagtaatatagacaggaattaaaaaaaaaaggtagtgggggcttcgattttccataaattttgttgcaattggttttcatatccacaaagaaaacaactattgcgggtgaaaattagggtctgtgaattagggattatagatacaagtgcttgttctatataatgattactgatgaagccaacaatatattgtgtagtataattgaagttattgtatcagaaagaagggagaacagttggatagctcttaaattttttattcaatcagagtgttgcattatcaatcatacatgtaaatatcgaggcttatgttttgctagcattgtactactactattatgtttttatgggttaacaacagtacattggacataggctgcctcacattcatatgttttgctagtaactagagactgtataaggatatagaattcttaattcttgcactccctccgtttctttttattagtcgctggatagtgcaattttgtactatctagcgactaataaaaagaaacggagggagtatcata

SEQ ID NO: 36908 - DNA, 2033 bp, Zea Mays
caagtcccaaccaaaagacacacggatgccagctctctagctaccttgtgcccaaagtgccaaacggccccttaagtcttaaccacctgctttatcatctcccgtacgcgctctccctcggtctctccctccctccctccctctcgctcgtggccacgactgggcgactgcctccgccgcatttcgctaggcgccacacggcccttggccggcgacgagcacccacaggatattcagagcacgacagagttgcagtcaccagtgcaaggtactaatgaagtgcaaagtcagcaaccaaactcaatggccgctgatgctcctgctggaaattcgggttccttgtctgtagctagtaatgacaataagaaggtgtctcgcgaagatattgaacttgttcagaatttgatagagcgttgtctacagctctacatgaacaaaggagaagttgttagaactctttctactcgtgctagaatagaacctggcttcactactttagtatggcagaaacttgaagaagaaaactccgagttctttagggcttactatatacggttgaagttgaaaaggcagatcatcttgttcaatcatttattgcaacaccagtacaatttgatgaaatatccagcacctccgaatattccattggctccaatacaaaatggaattcatcatatgccagttagcaatttaccaatggggtatccagtacttcagcagcctatcatgcctgctcccggccagcctcacatggatccaatggcctgcggtctgtccagtggtcatgtggttaatggaatacctgcaccaggtggttatcatcccatgcgcatgaactccggaaatgacatggttttggacaatggagcgcctgaagcaccacatgctggtgctaccggtagtgctatgtcatctgagatggctgtgagtccctcgtcggcggcttcaagcaaccatgctccttttacgccgtcagatataccaggcatgaccatggatgtatcggccctagactcggcatttgggtgtgatgtggggaatcctgaatctctgcaattgggaccagatgggtcgtcaagagactctattagatccttagggcagctctggaatttcagcctctctgatctaacagcggatttgacgagtttgggagcagatctggacgtgctggagaactacactggcacccctttcctgccatcggattcggacattttgcttgattccccagaccaagatgatatagtcgagtattttgctgacgccatcaacgggtctccgtcagacgaagagaaaccgtagtttttccggggttgcatggcatgcattcaggttcatcatcaggcagggctgtcatctcatctcatgtagtgtaaagcagccaatctaactgtgtattcggctcgcgcgcggtgatccggtaatcgggcctctgccactaaaaagaattttgtagcggttaattgaaatcctaattctttggaataagtagctgggactggaatgtccagagagtagcggtcgttgttggcttagggattgctgctggtggatgcaaacctcacagctagctggtgactctgaaaccacaggaactccttttctttttctttttacttgtatctgtatttgctgctacataagtaaacagaagtggggtgtacctagttttctggttctcgagtgtcttgaaacagtgggcgcgggttttcagctgaaagatcatgatattgtgttgttggcaaagtgctgaggacacgcgatgcaaagtttcttagattagccatacacaggaggctgctggagttgatctcacatctcagggtgtgtttggttgaactggagaatagagcctacccatcgtcaatcattttagtggagcaagaacatcccaataatttatagagttcgcccctctttcgtacaaccgttctccactcaaccaaacacacccttactcaatccatctgtgctgctctctgagctcatctttcctagtcaaacttaaatatgattacaaccaaataacg

SEQ ID NO: 36909 - DNA, 2729 bp, Zea Mays
cgcctcgacatcctcgcaacagccaagtccgcgcccgccgccacgcaacagacactccgctccgcgttgtgatgggatgaggattcctctcatcggacaaggattcccctcccccgtaccacccaccttcctcccgatctcctcgcagagttcaccgctactcgcgccctctcctaggctcctagctcccttctgaggtagaccgcgcacgggaatggaaaggcatcagcgaaggagcgatggctgcgcccacggaggaggagaggaggaggtccaggactccaggtacgcgtattccgccgacgagcagtcaaagccgccagagccgcttgccgtcgcctccgtgtggtcgccgccgcagacgcacgccgaggccaagggactgcgcagcctgcgaccaggcgtatgcggcgggggaggccgcgcggaagaagcgcagcggctccagcccagtggcggccacggcgagcgcgagcgtcgcgaagtagatggcgaggtagacctgcgccagcagcagcgcgcggtggaggagcagcaggtactggcccatgcgccgcaccagcgctgtgagcacgaagagtggcaccgccaccgccgcccaccggccgccgaggaccgagcgcacgccgtcggcgatccaagcgttcgccgccgacagatacgccttcgaagctctccaagacgaggatactgctgaacttacgaattaccagcacaagaatgaggtgatcaattcatctgagagattaacatatggtggacacgaagattgtaatgcatactgtttgtatgcaacaaaaaaatataaaaaaggggagcaggtccttgcttatggaacatacacaaacatgaaactccttgaacgctatagcatcatatgtgtttggattgttttgatttagttgtttgattgcttctgtgtttgccgctcccaagttttatgctggttaataaaactttgtaattctttaggtctagcccctcttgctgtttttggatatgttatggccacacacctccctctttatcctgcaattcacatcctacccgataagtaccacaacttatgtttgtgttttctatttcaatttaaatgttcaatcacattgctactaacctgcatagttgtctagtaaagatacaactctgtttcaggtcattctgttgctgggttatggtccagattctcctccaccaaaattatttcttataaaatggtcaagcgccagtgaaagttatgtgtcagacaatgataaaacaatacagttattcagcagttttcgcggaaaccagtatttcactgtatatttttgttgttcatctagtggtgccatttgttggtattgagcagcatgattttgaagaaagttggtggccttgagatgtttgaaaagtaagatgttataggctccttatccagccttcagtgggatgtgtttcgagtaagtcacctaattcatctcaaattgtgcagtaagagcaggtgtgggtggtgacgaagttaggatttgggctggtgaccttgtaggtagatgatgattttattcagatgagtgcaatttagcaaatggtatacaattgtttttttaatgttttcccaggcacatcaattgtgatgttgtttgaaagggccaaattatcaaagtcaccaaatagtttgaaaacaaagaggattatagcaattagtgctgcttctgagagttatatggccctgagcacaattgtttttttttataatctcaactaggacctacctcatacctgtcagtacttgttacctagatcttttacttatgatcttctagcaccgaatctaattcgaagtatttgacagcatatattcaaagtgtggtcactgatgagccatgatgatgagatgaaatctgccctgtttcttcaaatgagcatgattaaccatgcagtccatgctatcggactttttgcacgatcatttgatggctacttaatagatcgtcttagatctcttggaacgacttcttttgttatatctcaatcggcctgtttctgctgctccgttatatgcatagtttccttctgcatcttttcattatataaatagcggtttagatatttcttgctgattatcaatctcaagtaggcttgtaatacttttgtttgttatgcccgcagccacatatcatgatgtcaaattaaaagatgtgttctgctaaattttctgatgtttgtgctcgttgtcactgtcccagtcttattgtaataatgttgtgatgttttggacattagcaagctgcaaattgaaatatttaagtcttttgtaatttgtgtgtgtactggcattgtactagttactatatatagagcggggagcaatcctcgtcgatcagcccatctcgtggctattcttatgggtcacaggatcttcatcgaacggacacggagcggtcttcccacgtataattcctgtattttctgaatagtttgagtggcaattgatgccctctttcattctagcatccgaggcaatatctatacaaactcttttttttttatttttccctccagtaaatggatattagtctgatttggaatttacttttcccttcatataggcaatagctgcattttagacagctttgcagcacaattcacaaactacagacgtctcaagaaaaatcaacatgttatctcagttagccagggaaaagaagtgagcctttgaagtagagaacatgtgttcaaatgttgac

SEQ ID NO: 36910 - DNA, 557 bp, Zea Mays
gaacgctgaactcactgtgaaaccggaaacctaagccgcaggccacagccgccgcccgccagccgccgcccggagtctcgagtctcgcccagcccagtcgccctctactcctgacgctgccggagtgacggacgagtggacgacgccacgccacgccggcggctggtccctctcgcggtcgcgggtcgtggctcggcgactgtctcagcgccgtcagcgggctcaagttgcaagcagaagcaggccgcgggtcctggctggctggcttgcaagttgcaagcagctttctccacgcgggtcgcgggtgccggctagctcctcgctcctgcggctacggtgcagactgcagacgaccgcgcgggctccagctttgtctccgtccgaccgtcttagttacaatttgcctcctgctatctaatctgcattgtgtgactttcatttgttagaatctaaggatattccttcacttgtcactgatctgaccaatttagaggactttgcaacatatgtaaagcttgcgaatgaagaggtatacatggttcactgcacaaaattac

SEQ ID NO: 36911 - DNA, 2238 bp, Zea Mays
gtgccgtggtggccgtgggctgcaagctacagagctgcctcataaaagctccctgcgtttgctcctgtttgcagcttgcacggaggcggggtagtagaggacggcctcgcaaggtagctctgctcgagcgaggcagcagcactactcccgttcaggagaggaggcgttctccaccgggtcataggaatcctgacgagatggacggcaatgctaggtcgacggcggcgagtcagaagaagtccatcgtcccggacgacgacctcgtggagctgctctggcacaacggaagcgtcgtggcgcagccccaggggcaccacaggccggcgccgccctccgaccgcgactgcccgggcaccagcggccttactgccgaggagaccgccgcgtggttcccggacaccctcgacgactcgctggagaaggacctgtacacgcagctctggtacagcacgatcgccgacgccgccccgcaacacgagggcatgttcccgggccctacctcgcagccttcgccgccgccgcccgttgcgagcagcggcgtcgagtcgagctgggccggcgacatctgctcgaccttctgcggcagcaaccaggtgcccaggacgccggcagggatcagggggaaggacgcggcattgcagccggaggtgccgagcggtgccggcgcgcacgacggcacatcgtcatccggtgggtccggaagcaactatgggggatccgggctgcccagtgacagcgtccatgtccacaagaggaaggggatgtgtagagacgagtcagatagtcggagtgagagaagaagggaccggatcaaagaaaagatgcgtgcgttgcaagagctgatcccacactgcaacaagactgacaaagcatctatactagacgagacgattgagtacctgaagtccctccaaatgcaagttcagatcatgtggatgacttctgggatggtgccaatggtgtttcctggtgctcaccaatacatgccaccaatggctctaggcatgaattcaggttgcatccctgcagcacaaggcctaagtcagatgcgaagattaccatacatgaaccaccccatgccaaatcatatccctctgaactcgtctccagctatgaatccaatgaatccactgaacactgtgaaccagttccaaaacggtcacctcagggaggtaccaagacctggaccccatgtttatggacaccaaatagcacaagccgaagaacacaacagaatactggaagtggcagctagtactgttataccaacttctaaggcagggcaaccacctacttttgatggagtttagagtggtcataaatcctgtaaggtgttgcactgataatctgacgatgcatagcgttggtaccttgagttgtatatctgtgcagtagtgtcagcagcatactctttgacatctaagcttggttctagagttattaataggagcctagtataggtaacaagattgcaagacaactacctgtctaccaccatattctctgtggaagaactggagctgcatactgctgtgcagtacagtgttcaagagagaatggaacagatgagtatttgaagcacaacctgaacaggaaatggtcttctttctggcaatcgctgaaaatactgacgtgatgaggagcagattgcatccctatggctgtattgtaatatatctacatcaacatggcaatacgtgtctggacttggatgctacagttacatgtaaatgcagagttgcaggtttggtcggcaggagcatacatcttcacacgacgtggacagtggactacgggccgagacagtggcccagacacgacacggctcttatatcaggctaggccagacactatttaatgtgtcatgcctcaggccggtccacgagacacggctgaccatctataccacatactctactcctccacggcaacagttcagcatcctcctggcaatggcaacggttcagcatcctccatggcaactgtgcggagccctagactagacctgctgcaagatggcagaccctcatcttcagagcggattgggtttggatcccctgtactcctccttgctcccctgttgctttcagttcgtctcacggttattgttcagacttcagatacatatgtcgttgtgcctggttggctgtatctggacatcagtttccgtgttgctactattttcccccctgtatttctttataacggacattcaccttataaatatacacacaaaac

SEQ ID NO: 36912 - DNA, 2919 bp, Zea Mays
ggtgtaattttttattattctaatttttattataatttctatcatgcgtgtatatgttctaataaatagaaaagtgtgaacatgtggcagagtctaagtaatgccttgtacgctatgtcgtggacctatgattgaattagagaaataaagtccaaccctagaaaactctcgcatcgtcactccaaatcagccgctagggctgcattcatccacctcgtgcttatcgcctactccaacgccgactcctgctcgtcggtcgtcgcctcgtccagctctctccgcccctccagcctagcctagcccctcctgctcactgcgtcgtctccagaatccggcctacgaccgttggcggctggtgcccccaccggcaatcggtggtcatggtctgtccctgctcactccattcagatccgctatgcgcgaggcgcaactggatctatcgtattcctggttgctctctccctctccgcgggcgatgcgcctctctaggttctaccggcgtccgtccaaccggtgttcagcgtgccttcgcaggcccccttctctgccttcgatgagtgcatttggtgagtggtgacacaactgggcggagtggtgaactagtgattgatgcgcttgccggcgacttgcaaactaagtcagaatcggcttctcatcttcctatccctttgtgtgatactactactctgtatgtggaaaaaataattattccctggtttaatattatttgttcttaagtctgaaaattcactcatatagttcatttgtgcagtgttttttagtccttagctattagagaatgatgcctggtaatacctgaatcggccactgcattttattatcctgttgttattaaatttggctattagataatgccagcgttttttattatcctgaatcggccactgcattttttagtccttagctattagagaatgatgtctgaaaattcactcgtatagataaggaacgttgtctagcaacaagagagatcatgtcacaaaaaatcctcaagctaaaacaagaacatgttacactatattttattatcctgttgttattaaatttggctcggggcttcggtaatacctgaatcggccactgcatagagtagtaaacctaaaaaaaatcagactcttattgttatataatttccatggtttcttcctctatgaataggagagaaaaattgatcctagattgcagtctactaagatgcatgcaatgcgttatctccttatacagttactgttacaagttcttctccatccagatcagtattgggaggctgcacttgatgtgactatatgttggaagaaatcctttcttgtcattgctcgaggttgttaaagaagagcagatgtgctattttggttggtctaaaatcaggggtggaccaacagggggtccaggggggccacggcacaccctaggccagcccagcaaggaccccacccctttgtcgcccagccgctagcacgtagctaccacgactagtgcccaggtcaccaccgccatgcctagcgccaagccaccactcacccgcacccaacaccaagtcgccgcaatcctagtgcccattgtacatgtgaacatataaagctaccatgatcatggaggtagcaggtgcagagacacccatcaaggtttcttcgtctctagtcatttgttacgcaaattcaaatacaggtaaaagtagcattgtataaggtgcagattgatttgtacagatgaggttgcttctgaaaattgacaggaaaattccttggtatacttgtatgcaggcttttggaaagttgaggcctatttgtgcacaatagtatactaaccattgaagattattactctcatctattgcaggtacattattctgaaactcagttcatgaaatggaatgagttcagtttcaatatagcagaatagcatgctagcagcaaacatgcacgtgcccagacttcattcaggtgacatctttcattgtctcttctcaatcatttatagtgtcatttcgagttttcatggcttgtattgtgctatgagtttttagtgcttcatggtgggcttagttgcatgaagggttctcagctttgagattaattaccaatgcaccttttgagagctcaaaagatggtcttcgcattgagctataacatgtggtggtgacatggcacaacaagaacttgaagaagtagacatgttgctgctgcctgcagggtgacgtctatggtgttgtgctgcgggcaaggcccacacaatgtgatcgggctgcacgccaatgttcaacatgtgccccaaccagaatgtgtatgctactactaatataacattcgtcattggttggttcaccccaagaggtttgctgcatgttcatggagctggtggataataaattttagttgttctttttgtggtttattagatgacatcaattagtgttcaattgagccttagagtaggatgaatacaactgtcttaagtttctttgttccagcagattgtttgggggcaaggttacctatgaacttcaagaattggtcttatgatattgttagtttgtacaacttagtgttaggttgctcgacttcttcatgaatgaggtgttagacattggtcgatcatgcagggttgaaggtgcttcatataactaaatctaccatgactttctaggaaaagatggaatggaactcaatttttggtggccgtacaagtgtggaaacttgaattcatatatacttacaatcaacattagcgcaaacagttgaccaagtttttcaattagtattttagtttgaatttagtgtgcaataatgtatgagttatttaacaatgcttattcatgacatattgaatgatacttatatttattatatcaattatgatgttattaaatatatgtgtgcatgtatatttctctttaaa

SEQ ID NO: 36913 - DNA, 590 bp, Zea Mays
cagaccctcacccgtcggaaaggtttagaaagttagctaggtttcactgctcgtgcctcgagcaccacggcggcggcggcagcgggactgttctggccgacgacggcatcgatgacgacgagattcatttgcaggagtgttaaaacagctcgttgttttgggatttgccgcctcaagtttcatctagctacctccaacaaacccttcaatctccatggctacatcgatatcaactcaatatactaacgaggaggaaattaaaaggaagagaaagaagcgaaagagagttgttgtattagcctagtgtacaataaagaccaagcaaatggagagggtgctaaaacagcagctgaaagttcaaaggaaatgggaaaagagaatgatatcggaggcaaggatgctccatattctgtatcttcctcgagtagtttaaaaagacaaagatcagatgattcatttaactctatatggtgtgataagtttgacatgtatctgcattgaaagatgatggtccaaagctaccctcttccgccgaagttctcgccacattacaagaggttgagggacttgatgaagacacagaacttgag

SEQ ID NO: 36914 - DNA, 2448 bp, Zea Mays
aagttagggtatgctaaagtccatatccaacagcaacaacaagtcaaattaagatctcaagcagttcgttggttggccattttctttttctttttttgatatacttgctagcttggaagttggtaaaagatgaactcaacacgccgagcttcaaaagcggcaaagtcaacaatcaattaccacaggttttcattagatgagcaccacttatttgagccagatgctttgattaccaaggagcgagatgccaatcatcaatcaaggcaaagttctcaatcttgcagaacatatgcatacagaagattgaccactccccagtttgtatctgcattgtctggaatctggaatcttgttggccagcctgaatcatctggcacagctcaaagatctagtattcatgggatttcgagtagggaagaccctgtgtgctttagcagggaccaacaaggaaatatactgacaccttgctgtgtggaaaactctagtggtctgagatctcaatactgtttctctacaccaaaagaaatttatgaggatcttatttacgtaaagaagaagatgttaacgctgacaccattcaataacattgttggtgcatcatccacatggatgcatatgcattccacaaataaggttgaaggtgcgcattatttgcaatttggaactatatactctgtgcaagctgaaaagatggaaaaaatcgagacttctcagaatagcaaaagaagcatgtgtgaggaaacttgtgctagttccaacaatatggatattagggacaatagctattcaaatcaaacaagacacatgcctaacgagctatttactatctcaaatgaagaagctagcagtacacatgattgtgaaagttctcggcacaatactgaatgcaatctagaaaaaaatcaagaagattctaattttttagcttgcccagtacatgaaatggaaattgccaaagaggtgaggataatgccagggagtcaggttttcagtaaggcgtgcacagatgctcagcttgacaaatcaaagcacatgtcttgtctggtgggtgatgctgttgttcttaattcagcaaatgcagatgaaagtgcttgtagggaggacgtgtgtctgcagctttctctagacaagtgttcacaagagctccaaccaacttttcagcatcgatttgatggtgctgttaccataaacaggcatgctgtggcaggagcattagctgggacagcagtcagtgtttctttgcatccaattgatactgtgaaaacgataattcaggctaacagttatggacagagttcagtctaccatacactaaggcgcacccttattgagagaggtgttctggggttatatggaggacttgctagcaaacttgcttgttctgcaccaatttctgcaatttataccttaacttatgaaacagtgaagggggctcttctgcctgtttttccaaaggaatatcattcaattgcgcattgtgctgctggtggctgctctagtattgcaacatcctttgtttttacacccagtgaatgcataaaacaacaaatgcaagtgggttcccattatcagaactgctggaatgctttagtaggatgcctcaaaaagggtggcattgcttcattatatactggatggggtgctgtcctttgcagaaatatcccacattccatagtgaagttctatgcttatgagagtctgaagcagtctctgttgaaatcagcacctgatagggccaaactcaattctggccaaacgcttttatgtggaggttttgctgggtcaactgctgctctctgtacaacaccgtttgatgttatcaagacacgagtgcaattacaggcactcagccctgtttgcaagtatgatggggtggttcatgcactaaaagaaatttttcggcatgaaggcttgtgtggtctttacaggggtttgactccaaggctggctatgtatatgtctcaaggtgctatattctttacgtcctatgagtttctcagtacattaatgtttcctgaacccgaacaagaggttcatgcgaggagcgtttgatcgtgaaatgagaagatggcacagcaaaatacagaactcggggatagtctgacatgtgatgtgaggggtttgaatccaattttgggtgttgtttacaaagttgtctgttaggaataggatagcattcatacatatttttcggtaatctcaggtctagctaggcgattgaaaattttgtagtagaacctgattttgtattttagtctcgtatatatagagaaacaatggccagttttggtatcctattgttttgtatccacatgtatctgcatacatggccaagtgaatctggaattaaacagcatgggacgcaagactttctattaaaaaaaagatcagttgcagagcgacttcaatgttgtcgtccggcagttctgatgattgtaaagaaaatta

SEQ ID NO: 36915 - DNA, 478 bp, Zea Mays
tggcatggggcctaggatgtcagcttcatcttcctaacaacctaggccgcagatcgagcgcgaccgcgcccaagtagattcctatgcccaacctcggatcttccccatgggcgtcctcgcgaggctatatatctatccgccgcggcatccccttcacccatcctttggtgccagcacctgtaccccatgccccgtcgctggcgcagggagctttggaatccgctgcaagtcgtactcacctccccgtcgaatcaaccttgattcttagccacgagtgaaagtcgaggaactctgggatctcgtgcaccgaccggccgaacctgaaatcattttgtgcgcaaggaattgctcgtcgaagctctgtctctgccgccaagtcgcttctcaccggggacaccactgctaacgcccaaatttgtggtaagaaaccatctctgttcctcgtcgtcatcctctttatgtgtagaatccctcggta

SEQ ID NO: 36916 - DNA, 4670 bp, Zea Mays
cacaaattcaggtaaattttacaactcaatcacattgtataaaagtgttattttttcttaatttcgtttcaaacattttatacttactgtgtattatatattaacttatacataatatttatgtatatttaaaatcttagatacgaatttgatatcgcgcatagtatgtgaaaaaaccaataaaaaatgaccataacggtagggtgcaacgcgaaatgacaagcacctccactccaactgaatttacccccttccacggcacctccagtccacttcgtcttcctctcttccccagttcagatctactccattgccaccttcctctcccggccgcttctcatgacgtctccgagcgaaaaccctaaccctaatcctaatacaccatttgagatcgggaagcttttcaggccaacgaatcccatgcccaacgccacccccaaccccatcttccccggcgtcgctggaggcccggcgccatccggcccctactcctaccctccggtgaccccgcccttccaccgcggaccctacatccactacccgcaggacccccacgccatgacccgcccagttgtctccttccccatgccaaacccaaacctcaaccccaacccgaacgctaaccccaacgccgtcgccccgggccccaaccccggcgcgcgcctcatgcagctgctcgggaactccgggccgacacaattcgagaccgccgtctccatgcccccgcccacatcggaattcgcacaactgcagttgctcccagcgatgccatccgcgccgccggccaggatgctgagcagcaccagcagcaaggtgcccaggggggcggttacttggcaccggggaacgagcggtgcacgatgttgactcgaggctgcccggggaagcgcagccaccgcagctggaggtaacaccgattaccaagtacacatcggatcccgggctcgtgctgggcagacagatcgctgtgaaccggacgtacatcgtgtatggcctcaagctcggtaacatccgtgtgctgaacatcaacaccgcactccgttcactcctccgtggtcacacacagagggtgacagacatggctttctttgctgaggatgtccatcgtttggcaagtgcgagcgtagatgggcggatatttgtgtggaggatagatgaagggcccgatgaggaaaacaaaccacaaattactggaaagattgaaatcgccatccagattgtaggtgaagctgaagcttaccatccaaggatatgttggcactcacataagcaagagattctttttgttgggattgggaactgtgtcttaagaatagacacaactaaagtgggtagaggaaaagactttactgtggaaggacctgtaaaatgtcatcttgaaaagcttattgatggtgtccgcttagttggtaagcatgatggtggtgtgactgatttgtccatatctcaatggatgagcacccgcctggcttccggatccaaggatggcacggttaaaatctgggatgatcgcaagcaagtgccattatctatttttaagccccatgatggtcaagcggtttattcagttgcttttcttacagcgcctgaacgaccaaatcatattaatctaataactgcgggtcctgttaaccgagaagttaaaatttgggcttctactaatgaagatggctggttgttgccaagtgattctgagacttggaagtgcactcagactttggaacttgttagctctctggaacctagagttgaagaggcatttttcaaccaggttgcagtgctgcatcaagctagcctgattttgcttgcgaatgctaaaaagaattctatttatgccgtgcatgttgagtatggcccagatcctgcctctactcgattagactatatagctgatttcacagttgcaatgcctattttaagcctaactggaacacacgaaagccaacctgatggtgaacaagttgttcaagtctattgtgttcaaactatggccattcagcaatatggtctagagttatcactctgttcgcctcctacagctgatagtactgggtttggtagagatcctgctatttcccgtgtttatgaggcagctctggaaatggcaggaacagagccatctataggaactagttgcacagactcttactctgtcactgctttgagtaaacaaccaaatgttgaccagtctgcagctcttgcacctaagattgaggttcctggatcaggaccagcacctggaactcgtgatatagagcaatcagcttttaactatacgaatacgacaaacagaaacatggagcgtgatgctctgaaaagacaagataccccgatgcccattagaaaggatatcttaggaaaagatgagccaagagatggtcaaagtaatgttccaatgcttccaaatccccatatggtgtttcaagttggagggaatgctacacgcttggttactccatctgaaataatatcgggtactctctcatctgctgaaaacaatgatgtttctgaatctggtggggaaaatcgagatgtttccagcggaagttcttgggttgcagaagtggaaccaaagcatattgatgagagtaaaccagatcaaaacttgggacttgaagcagtcaaggaaactcagattgtttgtgagaacatggcgaaaacttccatggagcaaactgttgaaatgatcactaagcgctcagttacaactgataagcacagtgtggaagaatcacagtcatcatctgatcgaccagcatcagatcagacttgtggcactgatgaaaatgttctgaagaagtttgtggaaatgcctgagaaaattgattactctgcttccagggagcaaccatctttgtttacaaaagagaaagttttgcaccctcaaacatctggtcagccatctcctcctgtgagtgctttcaattcaactgagccacatgagcctttgagctctacatacctacctgtcagctccttcccagaagatgctgccacacaaggaatgctgcaacagaaattgttaaacattttagtgcaacattgttcgctgcagcttgcagccacagcagctcttggatcaccagaaggacatggaaaagcagctgagtactgtggttcctgtgtccatcgcaaaggagggcaaaagacttgagacattattagggcgcactgtagagaaatcattcaaggctaatattgatgcgttttgggttcgtctccaggaggaaaacactaagcgtgaaaaggctgatagagagcgaatgcagcaactgtgtactctcattacaagctcaataaataaggacttaccttctaatctggagaagtcacttaagaaagaaatttcttcactcgggcctgttgttgctcgcgcaattacacctgttgttgagaagtccataacctctgttgtttctgattcagttcagaaaggggtgggtgacaaggtgtgcaatcagctggagaagtctattactggaaaacttgaagctacgcttgccaagcaaatccaaatgcagttccatacatctggaagacaggctcttcaggatgctttgcgtactagctttgaatcattgcttgttccagcatttgagcaagcatgcaagacaatgtttgagcaagtagatggtgcatttcaaaagggaatgtctgagcactccaatgctattcagcagcaagttgaggctgcacatactccgttagcgctaactctaaaagaaaccatcaattctgcttcatcaatcacccagagtttttcatcggagttacttgatggcaatcgcaagctattggcacttgttacttctgggaatgccaaggcacataataccagtgctttgcagcccattaatggtcctatgggtggtccccaagaggttgaggctccgttagatccgatgagagagctgagcagactgatatctgaacgcaagtttgacgaagcatttacaatggctcttcaaaggagtgatgtttccatagtgtcgtggctgtgctcccaggttgatttgcgggcactatgtgcaatggttccagtacctcttaaccagggggtccttctggccttattgcagcagctagcaattgacattcacaatgagacatcacggaaggttcaatggatgacagatgttgccatggcaatcaacccagcagaccagatcatcgcggtgcatgtgcgaccaatctttgagcaagtctacagccaattggcccaccaacggacactccccaccacgaccgcatcagatggcaccagtatccgtgtgatcatgcatgtaattaactcggttctgcttagctacaagtgattgcagctatgcaactgtgggaagtatggcctatttgatatcttgtatagagaaattttgaatggcaaatagaacacaacccacgagagtatacttggaagagggtggaggttactctctagtgtaaattttgcctttgaaattaaaatatttgtagtaattgggcatcctctaattttctaggtcatgttcatttgtcgtatgatcaatgggtcttgtatttcagtcataacttgtagctcggacagtttggaaccaacagcagctgcttggtgttggttggtccacacaaaattttgaagtcccatgtggacattgtttctggtggcaactgcaaaattggtgttattctaa

SEQ ID NO: 36917 - DNA, 308 bp, Zea Mays
caacaatttcgcgatgccgactcgagccagggtgtgatgcagcgtggttgtgggatgagagcatgattcggtgagcaatcgacggcactccaatttgccccccctaagtttgacaacactgagctcccgcgcgcacggtgaactgacgaggcgcgagcccagccacactcgttcggtcgccaaggataagcagcagggactacgggtgccgagcgccatggcagcggcgcggctgggttcatggcggcgaaggttagggttctaaggaaagaaagaaagggcaccaggcgcgcagctttaaagtccgg

SEQ ID NO: 36918 - DNA, 5924 bp, Zea Mays
gtgggcccagcggggaccaagaggagagggagaccgttcctcttcctcgcctcacctcacctctccacctgccgtcgtcttcctttcgttcctagacacgctagacttggctttggccataccttggactccccttccctctcctctccccgtctcccggcgtgcgtgcgtactacttactgcttgtccaatcgccgcgaccagagctcccgcgcacgctactggagaggattccagcgcccgtcgagcaacaggactctagcgcccgacccgacaaacgacagatagtagctactgcctccctacaccgtctcggcatctccgggggcacggcacgggaacggaggagcggagaaatccatccgccgaaccgcttgctttgcttggcaggcaccccgtacaattgggggttccggttcgaggaacgctcgggggggcgtgtgtgcggccgccttcgctcctcatccagaccacttgattacgccgcgctccctacgacaggaggtgcccaggccgaggtccttcgccggcgacgagcaccaaccagagcaaccaaccgcaagggcatgtgacaaactgccgcctgcggtgccttcgccccaggcaatgtgctccgacatggatcagcgcgaccaccacgcaaccagggaggctgcaccagaggctaatggttaccatcacagcccccatggtgtggaccagagtcaggttgtggatgctgataagcatataaaccatcattccacagacgacaatgctccctccagcgcttcaggccacagacatggtggtatcagccgtcatgcatccacatcttctgttgatgaccgctccatcaagtctggtgacgattctgatggggccgagagtaccaatggcagaagcagtaacacggagatctcgtttctagaaaatgataccgtctggataccacctcaagcggcagataaggaggatgaggcccagagttttgctacaagcattgcttatgacgacgacgatgacgattatagtgatgggataaagtggggccagtcaagtttcccatcccctggtaagcagcatgacgccggcactagcaatcatagggaggtacgagaaaaagcgatgctagaagctatgaatggccagctgaagatacttgtcagtcggtttctcgcatctgttggcattccgtcttcgaacgaggaggctagcgatagctggcttgacattgtcacctccctgtcatgggaagcagcgctacttatcaaacctgatggtagcatgggaaaggaaatggaccctggctcttacatcaaagtcaaatgcatagcatctggtactcgccggcaaagtgaggtgatcaaagggttagtattcaagaagaacgctgctcataagcacatgccgacaaattgccacaatcctaggcttctacttgtcaaaggagtccttgggcattctgatgtcggtttgtcgtcgtttaattcaatgggtcaggaaaaggacctgttggagagagctatcggtaaaataatggagatatgcagtcccaatgttgttctggtcgagaaaactgtttcacgaaacattcaagaacttcttctgaaagaagaagttttggataaaccgaagctgaagcaatgtgactactttcatatcggaaaatttaccgaggagcacaacaatgccagtgagggtggaaagatgacatctaaaacattaatgttcttggaaggctttccatgtccactcggttgcacgatcttgctaaaaggagcaaacagtgaagaattgaagaaggtcaaacaagtaatgcattttacagtctttgcagcatatcacttgatccttgaaacatctttctttgaagatcaaagggtttttctgaatgatagtactacaaaagaaacttctgctactgctacagaagggacttatggtgttgctgctcttagtgggcctattcctaactttccttcacatgatgattctccggcacttagactgttccatgccacttctaatagctatgctgatgtgaacaaacctttgatatctccaagaaatgtggataaattcagtgcagtatccagcagctcttcaaatgaccttgaacaaggtgcaaatgtcaggtccaataatgccgagaggttaacattaccagtccaagggccactaaggaaattgttcgctgacatgttatgtcaccagaatatttacttacccgttacatcattgcaagaggcaaatgataacaggaaggaagtcagggttgaatccagtcaagaaactgttagtaatggtttccataggccaaagacaggagagtctgtgatttccattgaaaatggggagtccataaatgatgcccagacacaagaaattactcaagcaataatgccaactggttcttctgtaagtgataaggatgcagaatcacctgttatgggagacaatggggcacatagtactacaagtatcattatcaaagagaagcatgctgacggcgatcaagctgatgatgcacttgattctcacagcatactgattttgatgtctagccagtgcacagaaaagcaggttatctgtgaacaaagccatttaacccgtataaaatactatgggagttttgatgtgtccttggggcgatatttgcaagacattctacagaatcagcagaaactgagttgctcttcatgtggagagcctccagagtcgcacatgtactcctacacgcaccgcaatggaaatttgaccgttctagtgaaacgtctggtgcccaaacactatttgcctggcgaatctgaaggaaaaatatggatgtggactagatgctcaagatgtgatcatgaacatggggtatccaaaccaactccaagagtactaatatcagctgaagcacgcaacctctcgtttgggaaatttctggagctcagtttttcaagccactctgcagcaagaaggttatctatatgtggacatctggtcaacagggattgcttgcgtttttttgggctgggctctaaagttgctatgttccggtactcacctgttgaaatttacactacctgcaaaccacaacctactctccaattcgtcaaccccatcagacaggattggtttgaaggacaaaggagaaatatttctacagaacttgaagaatgaacatcctgatgcaataacattagcagtcaattgtggcctcacactccctgttaaggacttcactgaactagaagagttgttgataaaagaaaaggcccagtttgagagttctttggacaaggccactgacgaaaatgggaaaccattcgggtctgtgcatggagtattgaatataaattggtactatcaggatcttctacttaagctttacatttgggaccgccgtctatatcaactattctattgcaaatctgtccaactagaaagttgttctaattacaagaatcctgctggtactgttgatgggaactgtgatgataactttggtgttgataagaaaatcggtgaaattacatctgatgaaattacggcagctttgggggtatccagtaccatggagtctgcaagtaacaaacttgatcatcaatcaggtgacaccacagcactcttacttcataaaagccaggaagctgggcactcggaatttccttgcaatggaggtagtaaagctgaagaatcttctattgctcatggtcaaataaaggtagatggcacaacagaaaccacaaatgatccttgttttgaaatatccaatgatatggaggtccaggccaatcttacagtagcagatccaatacccatggaacaggagcgttgtagcactccccaacaattcaaatatccttattgggatgacagggagaggtggatttggaattcattttctgagtctcaaatggcttacagggatgacattgaaattggatatttgggcaaatttgaactcattaacaattatttgccacattatctttctcccttgtttgaacaacatgatgattcatactctccgcagttcgcggtaggtccaggtagtaatattttgtgcataatggaagatgagatatccagcataatagctcgtgctcttgccatatctgatgaacgccaccatttgatagatttaaaattcgagaacggaatggattattccaaaggagagtatgctaaagcaatagagaaatcttttagttttctgtctgaaagttctttcagctcatcaccatggtcatctacagattctgaagcaagcttatcgtctctgtcttcattttcatctgatgacttttctggttatgatagctcatctttattgtccccaatgcatccagaaatgactgtgaatgggaaagtaactctcaaagacaaatattcagttactgttgtatatgacaatcaattctttgcactccgaaaaaagtgttgcccatccgagcttgcatatattacttctttaagccgctgcaagaagtggaatgctcaaggtggaaagagcaaggcctattttgcaaagacgacggatgacaggttcatcattaagcaaatcaagaaaacagagtttgagtcatttattaaatttgcacctgattactttaagcatgtttaccattctctggacactggaagccaaacttgtctcgccaaaatattaggaatctatcaggttaagcaaattaagcatggtaaagaggtaaagattgacttgatggtgatggaaaatcttctctttggccacaatatttcacgaatttatgacctcaaaggtgctacattttcgcgacgcatcactgactcaaatgatcatgatactgtttacctggatcaaaattatgttgaggacatggggttttctccaatctatattggtggaagaacaaagcatcttttgcagcgtgcaatctggaatgacacggcttttctcacttcggtgaatgtcatggactattctctacttgtgggagtggacaaagagaagcatgaacttgtgtttggcatcattgattatctgaggcaatatacttgggacaaacaactggagacatgggtgaagacttctctggtagtacccaaaaatgttttaccaactgtaatttcccccaaggaatacaaaaaaaggtttaggaagttcatggcgaagtactttctgtcagttccagacacatggagtcctgataatccgtctaagccatgcaaatcccttggtcagagcaatcgcaagttggcggaagtccagaatggtgataacctgtcagagcacccaaatgaagttgaggggtgtgcctaatcatgtgcaggatttcctggcagttttgttgaatcctatcatgttgttgtttggctatatttcactttgtaaaatggtgtacatagaaggacctcactgttgatttatccaaaagtttgcggtttttaggcaaattgttgggcaagtgaggtccacaggacgtgtacctatgttcattgttaatttcacaattattatagtgaaattaagaattcatatgatcatttttttggacctaccacttgtgagactgaagcagtctattcttcacttatgactaactgtccaagaccaagatagacatttcctacctctattgaaattaggtcaatttgagtattatgttgtactgtgtacccccactgtactgctgggatatgtaaaaggttccgtataaatgtctgctcccctgaccttgtttgttgcacgcagcacaatacatattttgtgtttgatggatgtccagtttctgtattgctgcccacttgcacttttttttggttctgcacaatgtacaaccttttcagatctcctggtatagaacatattgcaagctattttctttcgtaaaccgagttacattgttactcagaatgggtaagaataagttacttagtttgttcaatatgcatttatactctgaaaccat

SEQ ID NO: 36919 - DNA, 1302 bp, Zea Mays
attctataaaacctctgcccgggggctagggtttcctcccagccgtcatcgtttcgcgtccgcctcagcccgccgcaaggagagttcaggagacatcttcgagaagctgaaatggctcctaaaggtacacgcctaacatatttctataggtgccatatacttgatcaagaaatgccctgtgtcaaccttgaaattgctataagctgatcgtgcatttcctgttcccttgtttgtctcaccacgacaccatgtattaggaactagtaactagtgggtatttgtacatttaggtcttcgatctaacaacctcctctttgttgtactcatgccttgaccagaacatgagtcctctcaaaagggtgagtatagaattagcaaactgtatttgctgcattatctcttgaatacagatatgatctctaatgcattggcatcaatacatgttgtaatcctgtctattttagcgcacaatcatcatgctgaaattcattacctgtcttttttatcttactgtggtttcattagctgctcctgattacctgttttttttatctaactgtggtttcattagctgctcctgccaagaagggtgatgccaagacccaggccttgaaggttgccaaggctgtgaagtctggggcagccaagaagaagaccaagaagatccgcacgtctgtgacatttcaccgccccacgaccctgaagaaggctagggaccccaagtacccacgaatcagcactaccggaaggaacaagcttgatcagtaccaaattctcaagtacccccttaccacagaatcagcgatgaagaagattgaagataacaacactctggtcttcattgttgacctcaaggcagacaagaagaagatcaaggctgccgtcaagaagatgtatgacatccaggcaaagaaggtcaacaccttgatcaggcctgatgggaagaagaaggcttacgtgaagctgactcccgactatgatgctcttgatgtggccaacaaaatcggaatcatctaagtgctgcattaggcatctgttgtttcctagttcaatctgttgtgtcctagttctatgtgaaaccagagttttgtagctatggatctcaatcgttccattaccatgtgttatgcacacttctgaatttgatatcatccaagtgaccggttgaactagtttgcgttctgcacttcattacacttggacaccgtcagtctttatgaccagtaattttgtttgtcgtaataggttggttttgcaactcgaccaaataattcgaccaaataaccgtgtatgtgttgtatc

SEQ ID NO: 36920 - DNA, 768 bp, Zea Mays
agcgacagggcaaggagccagggccgctccgctccgctccgctcgtgctctgctcctgctctctctctctctcggcgtcgattgggcgaccgccgccgcctcccccaggtcttcgctgggcccgtcgccggcgccgagcacccaccagggcaagttttacttgataatgtggacatcaagacgttgcaattaaagcgacttagagaccagatcggattggtgaatcaggaacctactctttttgcaactacaattcttgagaatattctttttggcaaacctgaggcgacaaaggcagaggttgggtctacgactacttccgcagttttctcctaaacacatttgctctgatgttgtttgtcaccataactggcgctgaaccgcgctggtggcaaggctggaaacaagggtgctgaagctgctcttacttccattgagatggcctctctgttccggcatcacttaggctgacactttgcatattctggtttctatacacgagctcacaagacatgtttctaaacctggcacaatgaataattgtcaccatgaggtcatgaataagcacaactgtcacggcgtgtgctagggcagtggggctgtcgccaaggacatgcagcttgtgaagcagtgctggagccgtccccatcgccgagcagctcgtgagggtaattcaagcacgctaatgcagtctggtcctacaatagcgatccttggtcttcacctacatcttcacctaccgaacatcaggttttggaagaggtttta

SEQ ID NO: 36921 - DNA, 2052 bp, Zea Mays
gaagtactgaacccgttagggtgccggcgggaggagggggcttaaaaggggcaccgcagtggccaatggcgcagccagaaaaaggcagcctcctcccccaacccaagtctctctctctctcccaaaccaaaagaaggcttccacttccagctgcagcggagcatcgccagttcagagttcaccaccacgcctttgacctccagcccatagcccaatcccgcaagcatccatccacgcccaccgcacccgctataaaatctccccctctgctcccgattcgccacctaaaggaggcgcctttccccaaatccaccaccaccgagaaacaaccgcaggaaatccgctcggccctcggctccggtcactctgttgcggccacgatgaaagagggcagacccggcgccggcgactacattgccagcctgctaagctcgtcgccgaggctcgacttcggcggggaggaggaggaggactgcctggacaggttctgcggcgacccggggttcgcggctcgcgcggcgcggctgtccagcttcagcgggcagcgcttcgccgtcaccgcgggcctcttcgggctgcccccgccgctgcccgccgcgagcggcggcggcgagttcgccgggtcccgggaggcgtcgtcggtgtcggacccggcgtcggcgatgaaggacgccaatgccaagaagcggaaggcgcccgcggcggcggcggccaagggcaaaggcagggagccatctgcgcaggcacaggcaggggagccgaagggtccggacgccaagaggtgctgcaaggcggagggaggcgagggggaggaggggagccccgtgaagctgcccaagccggagcaggccggcagcgacagctccgtcgaggacggcggcgcgcagaaccagaagccgccgccgccggtgaagggaaagaatgccaagccggtggagcctcccagggactacgtccatgtccgggccaggagagggcaggctaccgacagccacagcctcgcagagagggtgagaagggagaggatcagccagaggatgaaggtccttcaggacctggtgccaggatgcaacaaggtgatcggcaaggcgctgatgctcgacgagatcataaactacgtgcagtcgctgcaacggcaggtcgagttcctctccatgaagctcgcaaccgtcaacccactggacctgagcaacctgcccacgctcctacaaaaagatgtaagcatgttccaggcctgcggcgcttcggcgagctcggtcttctcgctggagagctgcagcccggggttcccgttcggcgggcaaggggacgtgttccagtccttcgtcccgaacggcctggagaacccgtgcggcggcctgaacccgctggacctggctctgtcccaggctaccggcgggcagttcggtttccaggacggaacggccggcacaaacctgcagcaaaggaactactgggaggaggaggaggaggacctgcagagcgtgttccacatcgacgacaacgggcagagccaggagcacggggcctcagcttcagcacaaagcttccatggtcagcttcaaccacaagagggccacatgaagatggagttcttctgatcgggcctcgacacccagccgccgacggccgagggagcgacctgtacatagcgaagactcgaggtacaagtacaaaagcaccagcggcggtggcggcggcggggacggaagctctgaagctatagctaacagcaagtccgtacatgtaggcccttccttgcccttggagaggcgagttcttcgctcgccgtagcgtgaaccagggggtgggcgatcgtgtgatttctttgaacgttttcgatccggcgattaatttgattgattaacacagccaccccgacgatagcgtacgtagcaatcacccgaacagtgaagctgtcacttttgtgtataagataatgcatatggtgcagatattagtatcaccggcgcttctctctctctctctatctctctcaagtagtaatgtgtatgagctggatggccgagtagcaagctggatggagtggaa

SEQ ID NO: 36922 - DNA, 4123 bp, Zea Mays
ccctcctccatcccccctcctaggctcaccaagtcaccagtcactaccactccgccagccaggcgctccctccatttccgacgcggcgcgccgaggtctgcacggacgcgcctcggtcactccgtcttcccacctctccggtctccgctggtcgtggtctcgagttccctcgcttgcttacgggaggcaacgacacgaccccgattcgagtggcgaccgggggaaccgcgtcttcgttccgtcgggggccgcctccgggtagtattagtgattttaaatggcttcagcaagaaaagtaagaaacgcgaataagcgttatgccaaaatcaatgaagactggcaggataaagatacaccaagtgtacctaaaagtaaagtgcgaaagaaaaagttatcggacatgcttgggtctcagtggagcaaagatgagctcgagcgcttctatggtgcctacagaaaatatggaaaagattggagaaaggttgctggcactatccgcgatagaacatctgatatggtgaaggctctttacaacatgaataaggcatatttatctcttccagagggaacagcaactgctgcggggttaatcgcaatgatgaccgatcactataatattctggatggaagtaacagtgatcgagaaagcagtgattcaccaaaagcttctaggaggctacagaagcgtggtcgtgcaaaacttcaatctgtgtctaagacatctgatacacattttactgatctgttgcaacctcagcctgcttcatcgagctatggatgcctttctttgttgaagaaaaaacgttctggagacctatttgtagggaaccggccacgtgctgttgggaaaaggactccaagagtacctgttgcaagcatgtaccatcgagatgacaggggtgcaccaaatagacaagctaaaccggatgctaatgatggtgatgatgaaggagctcatgtagctgcacttgctctggcggaggtacatcaaagaggaggctcacctcagatttcccatacacctcggagatctggtgatcatatgtttttgtctcctgctaaaagtagtggcagaaaaaacgctgattcagagatgggaagctcaaagctccatggatttcagttggatgctgattaccctgaaggtagcttgggaagtagggaagccgagactggtgattataccaaaggcacatcctatttgatagccaacaaaggatctccatctagcaagcctcagaagaaagtcaagaggcctcaaaagaggagaaaaaaagctgtacgcagaacggatgatcagtttgaggatgatagagaggcttgtagtggtactgaagaagggtgcagcatgaaaaaggcaaaagaggaaccagagctggagacattgggaaccaaaactgcatggccatctagcacatcaaataaaagaagtcgccaactcttttttgatgatgaaagtttggctctagatgcattacatactttagctgatctatctgtgaatatcctacaaccatcttctgttgttgaatctgaatcatcagcacagatcaaggatgaaaaaagggacaatgattctgatggaaagcctggtatacctgcagcagctgtatcggtgtatgagcagaaagataactccaaaagtacatcaaagaaactcaaaaggcagccagaaatggcaagcactgatatggttactaggaaaaaaggcaaacttgctaaagatactcatcctgatgggagcaccacttctgaagtaaaacagcaagcttgtacatgtggtgtgaaaacagaaaaaaagaagaaatcttccatgggaaagattttaaaagatgaaaagaaaatgccaaaagatgttgagaagactgaggtttctcctgaagaagagaagacatcttctaacaaaaccatggatatcgcagagacaactacacaagttgcaacaactctgcatgctgacttgatggcaaagggtaaaagccgtcgtaaactaggcattcaaaaatcactaactcaagaatgtaaacctgccgagggtgctggcgattctggaagtgataaattgtcttactcactaagtaatattattgatctcaaggacaaactctctcattgcttatcatcacgtttgctccgtagatggtgcatgtttgagtggttctatagtgcaattgattacccgtggtttgcaaagagtgaatttgttgagtatttgaaccatgtcaagctaggtcatgttccaagactgactcatgtcgagtggggtgtcatacgaagttctcttggaaagccccgtcgattgtcgaagcagtttttgcacgaggagagagagaagcttgcgcagtatcgtgattcagtcaggcagcattatactgaacttctatctggcgttagagaaggtctaccaaccgatcttgcgcgacctctagcagttgggcagcgtgttatagcctgccatcctagaacaagggaacttcatgatgggaatgttcttactgtcgatcataatcagtgccgggttcagtttgatcgacctgaactgggtgttgagcttgtgaaggatatcgactgcatgcccctacatcctctggaaaattttcctgaatctctcagacatcaaagtgccatcaatggatactacagccacttatcggaagcaaaatatgaggatcagatgaaagagttggctagcggaggtgcagcaagatccacatcgaatttgaatggtaccgatgcaaccttctataccccttctggtcatccgatgagtaccttaatgaagcaagcaaaggtagcatgtttgatgtggaagctatttacctttctatagtcaatgtagaataagctaactgcattccttttggaatttgtgcgagagtgactcagtttattctattgcacaggccaacacggcagttaatgaggttgcagttgcgacacaacagtcaatgtacaatcaaccatgcacactttcgcagatacaggaaagagaagctgatataagagctcttggtgagctatcacgtgctcttgataaaaaggaagctttgctggtggagttgaggcacatgaatgaagaagtgtctggaaagcagaaagatggagaaattattaaagacttggagcatttcagaaagcaatatgctatggtgcttgtgcagctaagagattctaatgatcaagtggctgcagctttgctttcgcttcgccaacgcaatacatatcatgggaattcagggcagtctaaatctatggaaaatggcatagcccttgctggagcaccagatccgtataaccttttcagttatattaatccagagtctggttctcaagtgatcgaagttatcgagacttcaaagtccagggcaaaaatgatggttgatgttgctatccaggctatgtgcaaagtgagtgaaggagagaatgctttttcaaaaataggggaagcactagatcacttgaatagccgcggtactggctctggttcaagtatacttggcataagacggatacctcccgattcaggacagtcaaatgcatcttatcatgacgactgcacagcggcccctgcagcaaacagcagttcaaggttgccgaacggctgtgattcggaagctcaatttcccaaagagttgatatcatcctgcgttgctatgatgcttatgataaagaactgcacggagaagcagtatcaccctgctgaagtcgcgcacatcctcgattcggcactgtcaagcgtacaaccgtgcagctcccagaacatcccgatcttcagagagatcgaaatgtgcatgggcatcatcaagaaccaaatgctggcgttgatacccactccaagtggctaagcttcaatcctgccgcgggtatttaactaatgtactctgaaaacgaaaaaacggatacctgtatgtgatgtgcaatattcctttttttgctgttgtctgtatgtacaaggcgtgtgttattattcattgcctgttattattatattcaactggggtaaaaaaaaatatcatgtactctgtctccctttctccctctttctcaaggatgcatttcactccatctttttatgtctaactaataactaattggtaattgctttctttgtgtaatttcattg

SEQ ID NO: 36923 - DNA, 209 bp, Zea Mays
cttgcataatatcttcaataacaaccacatcaagaaaccaatactaaatagaagtaacatatcatatcaagcattacgtcattaacgacataccccatcaaaccataaagggatttggagtaaggaagttctagtcatctatacaataaaatactaatatgaaagagatacgaacccatacccttcctatatgtgcaagtgtgtcaaat

SEQ ID NO: 36924 - DNA, 2806 bp, Zea Mays
cgtctccgtactggtacggggacgtctctttctcgaaattctctgcccgcaagcctactactacaacttctgcagccgcccgtccgtctccctcccccaaccgagtatatttatcaggccccttcccccgccccggcgccctccttccccccgctcctgtgcgcgttgtttctcgtcgccgtcgtccgtcctccggcgtccggcaacctgcaaccggcgacgacgatggaggcggcgctgggggcgctgtgccgcgccggaggctggtcgtacgcggccgtctggcgcttccatccccaagaccctcgattgctcacattgggggactgctactgtgaagatgaggcaaaagcaatggttcagaagatgcttaatcttgttgaagttgttggagaaggcatcctaggacaagctctagtaagcggagagtgtcaatggatttacgacgatacttgccacgcgttgaatcagataagccatgctgataacggagatttacatcagggttatacttggtggcagcatcagtttctcagtgggatgaagactattgcagtgttacctcttcagttgcatggactggtgcaatttggttccacacggaaggttcccaggagctcagtttttttgaatcaggtcagagatatatttgatcggatgaagaatgcttcaagcgatggtccaatggagtatacccagaataactctcttgcatgcgcagtatcagggaaagttaaagattgcctgcaaactgagagtgacaagtttctatgtaaatctgtatcattcggcagcaacccttgtgcttctaaattccaagaaaatcgcctatcaccataccatgccctcatgcacgaacaatccctgatacctgaccctggagaatctgtgaggctcctctcacaagaagaatcctttattgttcaaggtgactcaagtcaattcaaggatactgccgactttacaggccagggtaacagtacatttcctgaattacctaacagatcacctgaagaagctactgctgaaactctagaaaacaacatgaaggactgtagtggaaacaacagtctgctggaaactatgatgcttgatcttagcaccaacagctttgtgcaagattggtgggacaacagtgttctactggcagaaaaccttccaaattcaagcgaaaaggacccagagcctgctatggaattggccaataggcattcattgccaactggggagagaggctcgcctttcatacctgtcatcgaacaattgctaggtgatgttgcacatccacctacacctaccggacatagttcacttgaggctgaagctactgctttagctggccgtgtttcagattatcagctgcctcagtttgctttccgagactgcctaacagtagacaacgcacaaatcccagcattggcctgcagtaattacacatgcagaactagaagtgcacaaaatggttcttcagaagtgccatcagcaaacgtatctgtggacgacacctgcagtttgaacacagcaaactccaatggcagtcagtcgagcaatcctgagggaacgaaggttgctaagagaagagctagagctggggagagtacccgacctagaccaaaagaccgacaactgatacaagatcgcgttaaagaattacgagagattgtccctaatggtgcaaagcattgatgctttgttggagcgaacaattaagcacatgctgtttctacaaagtgtaaacaaatatgcagagaaaattaagcaagctgatgaaccaaagataatcgacaaagggagcggtgttatcttgaaagacaacccagttgctggcacaaatggtggtgccacgtgggcctacgaggttgctggccaaactatggtttgcccaataatcattgaggatctttcgccacctggtcagatgcttgttgagatgctttgcgaggaacaagggctctttctggagatagctgacaacatacgtggaattggtctgacggtcttgaaaggacggatggagctctgtgatggcaagatatggtcgcggtttcttgtcgaggcaaacagagaggtcacaaggatggatatatttctgtcgcttgttcagttactggaacagaacagccttgttcgatctactgaccagatggccaaggtcatgaataatggggttccatcctttgcaaaccaccaacggtctccgctgctagttccagtgggcattcctgagagactacagtgacatgcagatgcttcaactagatagagttaggtaccacgactgttaacatatctggtagccggaactccatgcattagactgagcctagtgataacatctgaatgaagatagtctcactgctgctaaagatgactgtatcaagaacatgcatgactggtgcagacatgagcctctagcgcagaaattatgaactttccctgattattagtggtgtgatcagtgaaatggcattatctcctgcttagttggttgacaccttgctcctgagtaactgggtcttgatagtggtgtttcttatgcagcgatggcagtgtattagggtagtagtgctagcttgcagttcgttgcccctgagtcaaccttgggcagttcgtggtaggttcttcatgggcttgggcccaggaccgggccccatgcacgtgcaataagtgcgactgcacagggctcaaaattctgaggggccaatatgtatcaataagcagactaatattacaccatctaagttgaactcagttagcagctagactgttgctcttcaaacacatctattaatacatatgtttattt

SEQ ID NO: 36925 - DNA, 3246 bp, Zea Mays
tttgcgtgttctgatccttctgagatatcccttcctgccgcttcagagtttcatttgtttccgactcggcatcggcatctcgtataaaccgaggagacacggcaatttcaagggccttcgtttgggaccaacagaataacctgttcctgcctgcaattttttggttctgaagactcaaagattggattgagtgatctttgaaaccaaatcttccttcggtgttttttggcattttgggcactatctgtgaagtgtagcaggaccgcctctgcttttatgctcggtagacttctgtgatcaagtattcaagtactggtaaaagattataagcttgtctaaagcaagcccttagaaggaaagttatctgaccatgttctcagctatcatggcaaagaagaattacaaacagcattccaaatctgagaaaattcaggggggttgtatgtctgggctgattcgcatgcttgatttccgtcgcagtccaaaacttctttcagacgggagagtcaaaagagataaaaaaggtcttgacgatatccatggaaacatatctgctaataatggaaaggaccacagggttgaattgatttatgttggtaggtcaagtattagaactttgatggaagaagagatggccagcagcacacagcccttgaagcaagcacaaagcaatgtcgctgggatatgctctgaagatattgatctaaacttggctggaagtctcatggaaatctacagatctcatactgaaggccaagaaaccaggaggtcgattgagtcaggtcgcagttccatttcgactgacgaagagaagaatactgaccctcctgctcatcactatcagatcccatctagtatccagagagctctagaagatgttgctgaagcagttataagacatcaatctgcaaacaaaaaatacataaacagcggtgatgaaactaggtccagagaattcgttgatgccctacagctactgagctcaaacaaggaattgtttgtgatgcttatgcaagatccaagctctaggttgttagaatgtctccaaaacctttacatgtcactaggaagtaccaggttagactctgaagaatatgacgaaggaactgagttgcaaggtacgacagatagtctagagcagtcagcgacttctccaagtaaggtgaaaagaaggcataattctttcttgaaggaggatgggttggtcacgaggaagccaccaaagttaaatgatggttctcgtggccttagcagaatagtaatcttgaagcccagtcctgcaagaggtcatagcagtcttatctcaggtagcgcaacttcatcaccactatcaaatcatattgattggcaagttcaggaaggcagtgataaacatgattgccatttctcgcttagagagcttaaaaggaggctaagaattgccattagcaataatcagaaggatcaccagttaaactccacgagtagtgatattcatgaagctgaggctgattctggcaaactgcttccagtcacaagtatgtcggagacggagagtctggcaagtacagattcttctgacagggctaaggaaccatctattgttgacgagaaaatagtcccggaagatagtgaaagtgggatgagaaatgatgttgctcatggtgtcggagtcagctctttctcatatgaaaaagctaagatgtatataattgagagactaaatgatcaaggcgaagaaagttgtcaaattgtacagaaatctgaatcttttgagagattgatttcactgcccgagaatggtacattttctccaattgatttccctcaagaggagaaaattagcatagcgcatgaagctacaaaaccattgaacttgcatactgttgagcaagaggatggttcagcaagcccttactcaacaatgcagtacgaggagacagaatcagccgacactagcaacttaggtacagaaacgttgattgagcccacgatagatcatggtagttattcacaaaatgagggcgctatctcacaggagttggtccgtgaagatcatgctagatataatggagaactcatcgctctgtgctgagactggaacttcgcaggaaggagtgggagtgaaaaatccagatgaatgttcattggaggaaccacaatccatgaatttgttgccagaaccggcactgtattctccagatgacttcgttaatgaacaagagaaccatagtccgtcagaaattgttgaattagtcaaaccatctgtattgacatttccttactcgccggaaaatactaatgacaaagaggagaaattgagtccacaatccgttcttgatcccattgcagaagttaccagtcctagacacaaaactccaaagcaagatgaattctccatgcctacttccagagtgctattcaaagaggttgacgccccttcagcatccccaactttgtggaatgggccacaggtagccattttggatgacagagccacaagggtgtccttcatcaaggccgtgctagaagcttcaggattgctgtctgaggaaaattcgcaaatttggtacacagaagagccactgcttgatgtatctgtattggctgaagtaggaaactcgtactgcctgacagacgatgcagtgctcttgtttgactacgtggaagaggttcttctcgagataagggacaagttctttggtagcgacccttgggttaattctctgaaacacaatgtacggccagctccagtaggaagacggctggttcgagaggtggctaagggaatcgattctcttgtaggtaaagaatttccacacactttagaacaggtaatgatgaaagacttggacagtgggtcgtggctggatcttggaggcgatactggaagtgttgtagttgagttgtgggatggtttacttgatgacttgctggaggaactggtttttgatttgtggctttgatactgtagtgctttgtagtaatacatgcagaggcatattcgactagtactgacatggggttaatagatacagaaaccttttgcgaaaggatagggaaaagtgagttcggcagactgccagatgttgtagagctaggcatttcatcaatatagttgatttccattttcttttgaatttgatttctttaagctccctttgttctctgtagaggcatggaaacataaaaaataagtgctcctgtatataaagtaccccagtatttatggtaaattttcattgtgaacataatattgtttccgtt

SEQ ID NO: 36926 - DNA, 3031 bp, Zea Mays
cctggtcgagttagatccttatcttaacactgatgctgggactatgtctccattcgaacatggtgaagtgttcgtactggatgatggtggcgaggtggacttggatcttggtaattacgagagatttttggacattaaacttactcgggacaataatataaccactggaaagatctatcagtctgtaattgacaaggagaggaaaggggaatatttgggaaagactgtccaggagtggatcgagcgtgttgctaagataccagttgatggcaaggagggacctgctgatgtctgtgtgatagaattggggggcactataggtgatattgaatctatgccatttattgaagctttgggtcagttctcttatcgtgttggtcctggcaacttctgcctggtgcacgtcagtctagttccagttttgaatgttgttggtgaacagaaaacaaagccaacccagcatagtgtacgtggtttgaggggactcgggctcaccccaaatattttagcttgtcgcagtactaaggaattagaggaaaatgtgaaggagaaactctcccagttttgccatgttccggcagcaaatattatcactttgtatgatgtttccaatatctggcgcattcctttgttgctacatgaacaaaaggctcatgaggctattcttaaagttctgaatctggaaaggatggacagcatcgctcgagagccaaagttagacgaatggattgcaagagctactatatttgatacccttcatgacactgtgaggattgctatggttgggaagtacactggcttatcagattcatacctctctgtgttgaaagccctcttgcatgcatctgttgattgccacaggaagcttgttgttgattgggttgcttcaacggatcttgaggactccactgcaattgaggcacctgattcatataaaactgcgtggaatttactgaagggggcaggtggaattttggtacctggtggctttggtgacagaggtgttcaagggaaaattttggctgctaagtatgcccgtgaaaaaaatgtcccatatcttggtatatgtcttgggatgcagatcgctgtggtggagtatgctcgtcatgtcatgaatcttactgatgcgaacagcactgaatttgatccaaataccaagaccccttgtgttatttttatgcctgagggttccaaaacacacatgggtgcgacaatgcgattaggatcaaggaggacatttttcaagattgctgattgcaagtcttctaaattgtatggcaatgtcacttatgttgatgaaaggcatcggcacagatatgaggtgaaccctgatatggttccagagttcgaaaatgctggacttcagtttgttggcaaagatgatactggaaggaggatggagattatcgaaatacccaaccaccgatattttgttggcgcacaattccatcctgagttcaagtcaagaccttcaaaaccttctcccctatttgtggggctaattgcggctgcatctggacagttggatagggtcctgcaagaccgctgcactggtcatgctgtttcagagaaacatgttctgagcaacggctcatatacacccgcaatacaccaaaatgggcacccaaagaagctcccaaatggtctatcaaacggaacatactatggcaatggcaatggcgtgcatgcttaggagcatcagtggatggatcgaggatttgcaactttttgcttacagatttgcgattcctaatgcatcagttttgtcgtggctggcttgactgactaccatcatggtcgctcgagaaacaaaaagttcctgtgctcgatgtggactgtctggtagggatagtgctcgttcggtggtttctagcgaagcgcgagatagtggtttctgtgttcgccgatctctaccctcttctgtaagcaaatggagcagatttgggtcagaagagtttacatgctgtacatcctaaagaaaagctgaatgttttggttgctcaaattaggttttcagtgaggtctagagctgatgcttagaaatgcgcagcagtgcaagagagtatttcgaaattaagcaagtctgtattttgaatttggatacttttttttgtgcttgtgcgcaaataagttgatgccctgcttcatgatcatatcaatttgtcttccctctagcgcttgcttctccggagagcatctcgaagagatcccaaaatttaatgtcccaataccagagaattaggatcttctttccagaaaaaagtgaagagatcctaaaattaaatgtcccaataccagagaattaggatcttcttaaatctcttaattcttaaatctcttaattccaaaaataggtgaatcatctctaacagcttccaatatattctcaaaaatgcaatgaatagagccctgcacaactgtatctacggccatcgttcacaataatcctccctgcgccaccaaagttgcctcgcccagcaacctccgtcgttgctcacgtgtatgcagtcatttgcttgaataccggcatcaaaggatcaccgtcgctttaaatttagctaatattagaaaaaagcgtctccaataaactatgtaaatagctttttaaatttagtggctctatatgcttccaacttcgttctctatttttggatagtctgctttactgttcctttagtccttaagtttactgagtctattggattatcctacactttttctgtaaaatctatttccaagggtatctaaatcagtaaatttggctatctttaggtgctggtaggcaagctgaaaacatataagctacaaacatccaaaacttcaatccatataccacgataaactctttgtgtcaacaactagaccttgaaaaggtttgtataattgttattcttacaaccatcgagaacttaaaaaaaaatgaacgttcttctgtcaacaactataacgtcaaaagatagaaaaaatataaaactgaaattctatcaagagagctgaaacattattctgtaaggaacaaggctcggtattc

SEQ ID NO: 36927 - DNA, 2385 bp, Zea Mays
caaacgaaaccctagaataatacttgttgcccgccgcccgccgttggactccctgctcacctgcgcaccgctggctgctactcgcagcgccgccgtcgcctgtagttgatggcacccactggaggagcaccgtataatacgacctctagatctgtcccaacccctcgtctcttgttggagccgccttcacctcgtcttccattaatcgttggccaaactgcaccttcaggtagtgttgcggcatcaactgcaagtgcaaatccaatcgttagtcctgtggtgactgaaagtagtggcattgcacaagcagcacaaccaattctagtggattctgaaccagttaatattaatgatgatgatgatgagcatggtgcaaagaggcaaaagaagtgcacatcagaagtgtggcagtatttcaccagggaaacaaagactgtgacgataaatggcaagaattacacagaaaagtgggcatcttgcaattttccaaggtgcaagacaaaatatagatgtgagagcaccaaaggaacaactggattttggacccatcttaggactacacatagtgtggtcaaaggccaacaacagctagcagtagggaaggatcatgagaaagacataaatattgttgagccttacaagtatgatccagaagtcagcagtagaaagttttatttggcaatcatcatgcatgagtacccttccaatatagtcgagcatgagtatctcattgacttcctcaaatctttgcgccctagctttcctatcaagtctcgcatcattgttagaaaagagatcttgagcatatactctgaagaaaagaaaaaattgtatgcttacttgaagacctttaactgcagatttagtacaaccatggatatgtggacttctaatcagaacaaaggatatatgtgtgtcaccgcccattggatagatgatgattggcgtattcaaaagaggattattgatttcttccatgtagaagggcgacacacaggtgcaaagttgtatgttacctttagtgaatgtatggtcagatggaatcttgagaagaagttgttttcattaactctagacaacgcatctgcaaatgaggtagcagtcaaggatatagttaatgacctcaagacaagtgttggtgtatctatagtttgtgatggtgttttggaactaatgaaacatgcaaccgagtgtggtttggaaacaaataagggtatctcacttgatgtgtcaacaaggtggaattcaacttttctgatgttgagggatgctttatactataaggatgcttttactcaactcaagcttgctgatcggcgtaggtatgaacacatatctccaactcctgaggagtgggacaaggccaaaatgttgtttcatgccttgaaaaaattttatgatctgactgagcttctgtccggtactttatatccaactgccaacttgttctacaaaggcttttgtgagattagaagtttgcttggtgactggtctactagtgaagatatcaatattcgtgaaatggctatttccatgagcaaaaaatttgagaaatattggaacaaaagcaatgttgctcttgctgtggcaagtttccttgatccaaggtacaagagaaaagtagtagagttctacacaagaaagttctatggtgatgcacaataccatgctaagcttgaggaatttaattagactgctcaaatgacttagacaagtacatggctgcaaaactttttaagcatagcggacagttcgacattttagcatggtggaagaaccagggaaaggaatatccgactctttcacaaatggctcgtgatgtgcttgcaatacaagtgtccacagtggcatcagaatctgcctttagtgctagtgggcgagtggttgatccatatcgtagtcgtcttgatccagagatggtacaagcattggtttgcaccaaagattgggttgctgcagcaagaagagattctaagagtgttgcttccattattggtgaccttgaggttatagatgtcatgactaatctggcagctcaggatgatgacatagagagtgattcagatgtcatggatgaagacaaggagctgtagctcgtaggtggacaatgatacaactatcttagtttattaatatgtttggtcaggtgtatgtataacgcattggaagtttggaacttcccctatctggcaatttccatcgttagtggtagactagtagaaatgagacacaatgatgtcatgacatgtcttctagttaagtttctataaattgttaagttagtatgcgaacattttttttgttttgaatcgatatcgatgtgatttcgttccgacaacatcgatttcgatattttcgaaatctccgatatcataaccatttctg

SEQ ID NO: 36928 - DNA, 690 bp, Zea Mays
cagcccgtgaaatgatcgagccgagccgagccgaactcggtcagccaccgagctgcaccgagccgagccgagcttgactcggttcgtttccagccctacacccaccgagaatggaatctgcagcgccgttggccactatacggccagtgctcgcgcagctccgtgccccgcgcccgcgcaaggaaacaacaaaccaacagaaaacgccgtgggcaatcggccgccgccggcgcctcggcgaggcgaggcggggggacaaggacaaccgccagacacacccagggtcggccacggcgcgaggagcgtgacggacgtggacgcgcggcccaatctggctctggaacgtggacgtggcgggaggcgcggacggacggacggaacgggtgactgcgaaccgcgcctcgtctcggggcgtccgcgcgcaaccgtgaccgcccggtcgcttttgcgggtacggccggggccggggccggtgcagtggcgcggcgcgtgccgagcagctgggtcacatggcctgtccatagtccagacaggccaggcggtagccgaggcgcatctgcactgcaccgtgccgtgcaatctctgcgatgaagtgaccggcaacagcatatctatctataaaagggaaacacgttgacgagtcgtgcatggtacagggatgacctggtgtactcgtactcatatactccc

SEQ ID NO: 36929 - DNA, 1097 bp, Zea Mays
catccacctgcgacacatttccccccttttcccgcaacttccgtgacgacttcaccactacatccatgccaccggcgacttcatggcctccccattcagcctctccttcccaagacaaagatggttccagggaggaagggatttaatgcacaagggaacccagcaggactgattactcttcacctcctcaaggaaagcagaagttcaggtgcaattcaaggatgttcctgatgacattttagaatgatatgggctgtcatattgatagctttattgttgtggtcacatacacatttaattgaaaatgggcttgtcacaggtattttcctgcacaagttctatggttttgttcttagctaacactacaagtgtggatgaatctgggaagcagcatttccttgatgcatcagttgcttacaagcgtgtagtcctgaacgacatcgaataccttgctaggtttgggtactccaaggagcaggatctctggaatagtagactctccttatgcagtgtcaactcttgacatccctacaacaatatttgatcaggatgatatggagcaatggtggcagcactagttgaagatgatcagcttgtgaagtcttttacacaagttgttttccacgttttgtcgagctcaagtaaattccttcacaatgttggccttcagtatgtctccaagacaagcttagtttcatcaaaagtgcaagaactctaatctcaactagagactaagacaagaaaaacgatagactttggcgaaaatggaaaccttgaaggcgtcacaagaatttgcagccactgtagctaatcaaccaattgaggtcaaggcgtcacaagaatttgcagccactgtagctaatcaaccaattgaggtcgaagattttaagaagttgctaatagaaaataatactcggtcgaagatttaaagatagactcttaatgtttgatgaaattatatgcacaatttggattgcattcaagtgtacgttgatttttattaattggtgatgaaataaaaatgtcatagtttgtttgacatgtcagctactatattatctgccacttcatctcacttgcgacaaaactaatggtca

SEQ ID NO: 36930 - DNA, 3247 bp, Zea Mays
acacactctctttctctctctgttctcctttcatctccactcgtccgctttgtcggaaccgttgctggtggctccggggttctgcgactgcgcatagggaatggcgatggcggcggcggttttggaggaggcgctgcgatggggtggaggaagcgttggggacgacaacgtggccgcgcgcagggcagaggaggccgcgataagaaggcatgaagcagccagttggttgcgaaaaacggttgggatagtgtgtgcaaaggacctgccggaagagccctctgaggaggaattccagcttggtctgagaaatggcattgtcctctgcaacgcactgaataaggtccagccaggcgccatacccaagattgtcggagtccagtcagatactgcggtccctgcagatggctcagctttgtgtgcttatcagtacttcgaaaatctgcgaaacttcgttgtcgttatacaagattttggcctcccaacatttgaggtgtctgatttggaaaagggtggcaaaagtgttcgaattgtggactgtgttcttgctctgaagtcattcagtgaaagtaagaaaacagggagacaagctgcatgtaaatatggtggcattttgaagcctttggtttccggaaattatttcatacttaagaattgtgatgcttttatgaataaaaatgcgagaattcacacagaagaggctaccctgaatggttttcgaggagagcaaaacttatctcttgattgttctccagaatcctatgaggtaattacttcagacaaccttagcacgattattcgcacaattctcttagataaaaaaccagaagaaatcccactgattgttgaatcactactaaacaaagttattcaggaatacgagcttcgctttgcaaatcagaacttgatggatgaagagaagcaaaataacttgactacgaaggaggaagccagttttgcagtaaatggtagtaatgcagctcaaaagttccatctgaaggctgaaataaattttgatctacagcacaaacagatcaaggggttgagaggtactgtttcttctatcaagtctggaatggaacaactgaaattgcactactctgaggagttcactaaacttgggaagcatttgtacactatatccaatgctgcttctggataccataaagttcttgaggaaaatcgcaagctgtacaaccagatacaggatcttaaaggaaatattagagtttattgtcgagtgaggcctttcctacctgggcaaataagttccttaagcagtgttgctggaatggaagaaagaaccattacaataatgactcctacaaaatatggaaaagatggaaacaaatctttcactttcaacaaagtctttggtccagcagccactcaagatgaggtcttttcagatatgcaaccattgatacgatcagttcttgatggttttaatgtctgtatatttgcatatggccaaacaggatctgggaagacttatacaatgagcggacctaaagttttaacagaggaaagcctaggtgtcaactataaagcattaaatgacttatttaatcttcaagcacagagaaaggggacaatagattatgatatttctgtacagatgattgagatatacaatgaacaagtgagagatctccttcaggatagtggaaacagaagattagaaattaaaaatacatcacagaaaggacttgcggttccagatgcaagcatagttcctgtcacatctacgtctgatgttgttgaactgatgaatcaaggccaaaagaatcgtgcagtgggttcaacagccataaatgaccgcagtagccgctcccacagttgcttgactgttcatgtgcaaggaagagatttgacatctgggacagttttaagagggggacaagcaaaaacacttatgtttgttcacataagcccagaacttgacgctgctggtgagaccataagcaccttgaaattcgctgaacgtgttgcctccgttgaacttggtgcagccaagcaaaataaagaaggcagcgagattagagagctcaaagaacagattgcttccctcaaggctgcattggctaagaaggaaggagaaccagagaacattctaagcacacggtcaagcccaagcatatacagaattagaaaaggcaatgcaacacctgcaactcctaaagacaggcagccaatggaagaagttgggagcctagaggtccagaatgtcttcactccagctcaaaagaggtcaaaaatgcatttgcttggcatcctcactgagaacaactcgtctaactcggttcagaattgcaatgttcctcagaaggaaataggattaggtggttgggttgacaagatggctcttggagacaaccactttgagaactctaattccatcctagagttggagcctgacacagcacagcttccaacttctttttatcatcaaagatatagtcctgtgcaacaaagctgtaggaccgaatcagtaccatcattgggcctacatggctttgattctgctactagttgttctaaccaagagattgtagtgtcaaccatgggactaaaagcttctggtgttgccaatagaggcgcctcaactgtaaaaaagtatgaagctacatcaacgaggagtacaaatctagcaagcaagtctccattgttgcagaaaaaactgcaaacaccaaccaggaacaggaaccagctaacttcgagcaccataggtggaagaagaacaccaaatggaaaaattggcattgcaaagtaatcaattaatgtgaaggcagatttgctgtgaccatgcttagaatggaaaaattggcattgcaaagtaatcaattaatgtcaaggtgggatagcacggagcctaaaaggactgcggtttttgaacctgcagaaggatcaagatcaatcatgtaaactgatgcacattccgataggtagcacattttatttattacattgaagttggaaacagacaccaaagaggacagaaagatgataaatatgaaggaaattcgaattgaggcttctgtacattttccacacttataaagtaatgttgtatcatgtgcctattagccatgacacatcatcacctgaaagttgcttgtattagacatgtgctaagtttacagtttctctgtctcatgtatgttaccctttctcataatggatcgccactcacagactaagagggtgattggtttcacccaactaaaatttagtcccttttacattgaat

SEQ ID NO: 36931 - DNA, 3914 bp, Zea Mays
cgatcgccatctgctcagctgtgatttgtgagcgcaaagcccgacatctataaatatcccgcatccatccatccagccagccattgcaaccaccggccgggctgggagcactcagcactgcgacgaggagagaggagacggagacggatgcttattcctgtgcctgccttggtgagtgaggcgctgctggtatgcatgagctaggaggtaaggaacaaccatacgagggcgagcagagcagagagcacacggcgcgccgagctagcagcattgcccaatctcgcggcggggagagattcgtgagcgcggaggcgcgaatcttcgacgcagcgacggcagccatgccggagtcctggagacccgccgaggcgaatgcctcgtcgcagccggcggcaggcacgtccggcccctcggctcagagccctggcaatgacgccaagggacgcgcggcgggggaaacccccggcgcggcggaggcggcggcgacgcgagtgccgttccacaagctgttcgcgttcgccgactccaccgacgtggcgctcatgctcctgggcgcgctcggggccgtggccaacggcgccgcgatgcccttcatgaccgtgctcttcggcaacctcatcgacgccttcggcggcgcgctcagcatccacgacgtcgtcaaccgggtgtccatggtctctctcgatttcgtctacctcgccatcgcctccgccgtcgcttccttcgtccaggtgacctgctggatgatcaccggcgagcgccaggcggcgcggatacggaacctgtacctcaagacgatcctgaggcaagagatcgccttcttcgacaagtacaccagcaccggcgaggtggtgggcaggatgtcgggcgacaccgtgctgatccaggacgccatgggcgagaaggtcggcaagttcatccagctggtggtgaccttcttcggcggcttcatcgtcgccttcgcgcagggctggctgctgaccctggtcatgatggcgaccatcccgccgctcgtcgtggccggcgcggtcatgtccaacgtcgtcaccaagatggcgtccctgggccaggcggcgtacgcggagtcgtcggtggtggtggagcagaccatcggttccatcaggacggttgcgtctttcaccggcgagaaacgggcggtggagaagtacaacaagtccctgaagagcgcgtacaagtccagcgtccgggaggggctcgccactgggcttggcatgggcacggtcatgctgctcctcttctgcggctactcgctggggatttggtctggcgctaagctgatcctggagaaggggtacaccggagccaaggtcatgaacgtgatctttgcggtcctcactggctctctggctctaggtcaagcgtctccaagcatgaaagcgtttgccggcgggcaggccgctgcatacaagatgttcgagacgatcaacagagcgccggaaatcgacgcgtacagcaccacaggaaggaagctggaggacatccggggggaaatcgagttcagggacgtccatttctcctatccgacgaggcctgacgagccgatattcaggggtttctccctcgccatacccagcggcacgacgatcgcgctggtaggccagagcgggagcggtaaatccactgtcatcagcctgatcgagcggttctacgaccctcagctcggcgacgttctgatagatggcgtcaatctcaaggagttccagctgaggtggatcagaagcaaaatcggccttgtcagccaggaaccagtccttttcgctgccagcataaaggagaacatagcctacggcaaagccagcgcgacagatcaggaagtcagagctgccgctgagcttgccaatgctgccaagttcatagataaaatgcctcagggtttcgatacctcggttggcgagcatgggacacagctctctggtggacagaagcagaggatcgccatcgcaagggctattctgaaagatccaagaattctactgttagatgaagctacaagtgcgctggacgccgagtctgaaaggatcgtgcaggaagctcttgacagggtcatgtcgaataggacgactgtcatagtcgcacaccgtctgagcaccgttagaaacgctgacaccattgccgtcattcatcaaggaacactagttgaaaagggcccacacaatgagcttctaagagatccagaaggagcttacagccaactgataaagctacaggaagcaaaccagcagaacaaccggaagggtgatggcaatgctcgtctaggcaaacagatgtcgatgaacaagtcagctagcaggaggttgtcccgtgataacagtagccaccattcgttctcggtgccgttcggtatgcctcttgggattgaaattcaggatggttcatccaacaaactgtgcgacgagatgccacaggaagtgcctctcagccggctcgcgtctcttaacaagccagagatcccggtcctcgtactaggttccattgcctcggtcatcagcggagttatcttcccgatcttcgcgatactcctgtcaaatgtgataaaggcgttctatgagcccccacatctcctaaggagggactcacagttctgggcttccatgttcctggtgtttggtgcggtgtacttcctgtcgctccccgtcagttcctaccttttctccatagcggggtgcaggctgatcagaaggatccggctgatgacgtttgagaaggtggtgaatatggaggtcgaatggtttgatcacccagaaaactcgagcggagcgatcggtgcaaggctgtcagctgatgcggccaaagttagaggacttgtgggagacgcgctccaattggttgtgcagaactcttcgacactagttgctggtttggtaattgcattcgtatcaaactgggagctatctctaatcatcttagctttgataccactcattggcctaaatggatggatccagatgaagtttattcagggcttcagcgcagactcaaagatgatgtatgaggaggcaagccaggtggctaatgatgcagtaagcagcataagaacagtggcctcattctcagctgaagagaaggtcatggatttgtacaagaagaaatgtgaaggtcccctaagaacaggaatcaggacagggattataagtggcatcggttttggagtttcctttttcttgctgtttggggtctatgcagctagcttctatgccggtgctcggcttgtcgaggacaggaagacaacctttcctaaagttttcagggtttttcttgctcttgcaatggcggcaattggagtgtcgcaatcaagtacccttacatcggattcttccaaagcaaaatcagcggcgtcctctatatttgcaatcgtagaccgaaaatcaaggatagacccaagtgaggatgcaggggtgactgctgagacactacgaggaaatatcgaattccagcacgttagcttcaggtatcctaccaggccagatgtccagatcttccgggacctttgcctgacaattcatgctggaaagactgttgcgcttgttggggagagtgggagtggcaaatcaacggcaatttcattgctccagaggttctatgacccagatgtaggccacatactactagatggcgtggacatacgcaagttccagcttcggtggttaaggcagcaaatgggcctggtcagtcaagaaccggccttgtttaacgacacgataagggcaaacattgcctatggaaaagatggacaggcaacagaatctgagatcgtatctgccgcacaactggcaaacgctcacaagttcatcagctcggcgctccagggatatgacacaatggttggagagcgtggagctcagctgtcaggagggcagaagcagcgcgtggccatcgcccccccgatggcagcg

SEQ ID NO: 36932 - DNA, 3277 bp, Zea Mays
acagatatcgagcagatactgaaggaagctcaacaccgatggttacgccctgctgaaatatgtgaaatactgaaaaactacaggaatttccgtattgctccagaaccaccaaacagaccaccaagtggctcactttttttatttgatcggaaagtattgagatacttcaggaaggatggtcataattggaggaagaaaaatgatcagaagactgtcaaggaagcccatgaaaggttgaagtctggaagtattgatgtgcttcactgttactatgctcatggggaagagaatataaacttccaaaggaggacttactggatgttggaagaggactatatgcacattgtacttgtgcattatcttgagacaaagggtggcaagtcatctcgtgctagaggaaataacattattcaagaagctgctgtgggtagtccttcacagattatggaggtagaaagctcacttagtggacaggcctcagaatacgaagaggcagaatcagatatttattcaggaggagctggatacgactctttcacttggatgcaacagcatgaaaatggaactggacccgtgatagattcttctctcttcagctcttacacacctgcttcgtccatagaactggacgagcctggtcaaatgccccatctccagtttcctgtcccttctgatcaaggtgctaccacggaaggcctgggagttgattacttaacatttgatgaagtatattctgatggcctcagtctcaacgatattggtgcagcaggaactcatgggaagtcatatctgcagttctctagtgctactggtgatttgtctgcaacagagaacagcctccctcaacaaaatgatggttctctggaggaggcagccattggctatccatttttgaagactcagtcatctaatctatctgatatcctaaaagacagctttaagaaaactgacagttttacaagatggatgagcaaagagcttcctgaagtggaagattctcaaattcattctagttctggggggttctggagcactggagaagcaaatgatatcatcgaagcatcaagccatgagccgctggatcagtttactgtttccccgatgctctcgcaggagcagctctttagtatagtagattttgctccaaactggacatatgtgggttcaaagactaagattttagttgctggtaacatcctgaatgacagtcaaatcaccgagagatgcaagtggtcatgtatgtttggagaagttgaagttccagcaaagattttagcagatggtactctcatctgttattcgccccagcataaactcggtcgagttcctttttacattacctgctccaacaggttggcctgcagtgaagtgcgggagtttgaatttcgaccaactgtttcccaatacatggatgctcctagtccacatggtgaaacaaacaaagtttatttccagatacgccttgacaagttgttgtcccttgaaccagatgagtaccaggcaactgtatctaaccccagcctggagatgattgacttaagtaagaagataagttcactgatggcgagtaatgatgagtggtccaacttgctaaagttggctgttgataatgagccttctactgctgatcaccatgatcagtttgttgaaaaattgattaaggaaaaattgcatgtctggcttctaaataaagttggtatgggtggcaagggacccagtgtgttagatgatgaagggcagggcgtgcttcacttagcagctgcccttggatatgattgggctataaggccgacacttgctgctggcgtgaatattaatttcagagatgttcatgggtggactgcactccattgggctgcgatttgtggccgagagcggactgtagttgcgcttattgctctaggagcagctcctggagctttgacagacccgactcctgatttccctggaagtacaccagcagatatcgcatcagctaatggccaaaagggaatatctggtttcttggcagagtcttctctgaccagtcatcttcaggccctcaatctgaaggaagctaatatggctcaaatatctggtctacctggtattggagatgttactgagagagattcactgcatcctccaagcggagattcattaggtcctgttcgaaatgctgctcaagctgctgcgcggatatatcaagttttcagggtgcaatccttccagagaaagcaagcggctcaatctgaggatgataaaggtggaatgtctgatgagcgtgccctctcactcctttctgtcaagccacccaagtcagggcagcttgatcctctgcattctgctgcaactcgcatacagaataagttcagaggatggaaggggagaaaggagtttcttcttattaggcagcgaattgtgaagatccaggctcatgtgcgaggtcaacaagtgaggaagcattatcggaaaatagtttggtctgttggcatcgtggagaaagttatattgcgttggaggcgtagaggggctggcttacgtgggtttcggtctacagaaggttcagtggagagcagcaatggcggaacgagtagcagttcaatccaagataagccttctggggatgattatgattttctgcaagaaggacgaaaacagactgaagaacggctccagaaagctcttgcgagagtgaagtccatggctcaatacccagaagcaagagatcagtaccataggattttgactgttgtgtcaaaaatgcaggagtctcaggctatggaagaaaagatgctggaggagtcagcagggatggacttcatgagtgaattcaaggaattgtgggatgacgacacacctatacctggttatatttagttttcaaacctactttgttggatttctctgtagattgcctcctttgtcttgagtgctactgaattgatggcgcacatagctgataacccgaagtagcgttgctggagcagtggagcatgacctgacatgcttgaatttggacttagatgtagtatttcatttgccttatgtacagtagaatgttctctacatttgaggaagccttgtatttactgtgtgaaatcggtgtaaagagtttgacattagagatcttaccagatgacttaacggttgcatgtgtggcgtgcagtccagaagttaggaatttgacccgtcgtggctttctgaaccgatcaaaggctgtggccgtgctcatcatctactaccaccatcgcctcggccagaaccacgccgctcgcctagctagctggggtttgaa

SEQ ID NO: 36933 - DNA, 1071 bp, Zea Mays
gtgcacccccaccatccccaccctcgccccgctctccatccgcggccgccccgccatccccgccctcaccccgctctccatcgatggaagggcgccattccagggatttccctactttccatccgcgacagcccccaccatcctcgcccccgccatccacaagttgtagaagctgcaatggaggggagtacgtcgatgtccgttggtcccaccatcacattcatggtcgtttcggtcacccacccctccacccaaactggcatctccttgctccctggttcaaaaggttacacttcccaccacactttgccaacggcgcaaaatggctggagtccatatgcttggaacaaaattgttactgaatttaacaagaagcatgagtatatcacattcaacaagattcagattcaagagaaggagagggaattgaaaagggattacaagatgttcaaagaggttagaaagcaaagtggtgtttcctggaatgagaaacgatgcatgattgttgttgatccaccaatatgggaaaacatcataaaaatcataacatctacacatctaccacaagaatggaacacaatttcaaatgaagaagaacaagtgaacaccacaagaatggatgaggaaggtattattcaacaacaaccacaagaagaggattcaagattggaacaagatgaacatcctatatttgaaatgattgaacagaggagggtacatgtaacaacgagaaggtctactgcatcaacattcaatcaagataaggaagcagagaggatgaagaaggattctttggaaggacttggtgggagatatctaaatctaaaatcaaaacaagttgagaatgaggttacacaaatggcaaagggaaaagaatctgctcaaggtaatgaattctccatcttgagatgcatttctattcttagagccatggacgtgacaacagatgagaagataaaagcagctgaggtgttcgacataccaaacaacagagagacctttatcaattttagtattgatgagccagaaactgccctcctatggttaagacggaagatggataagatctaa

SEQ ID NO: 36934 - DNA, 1889 bp, Zea Mays
ctccatggcccgacaccaatcctggtctcatcccttctggattgaaccctgctgtgatgcgagacagcgcaatgctggcggcgcgggaggcgaataagcggccgcgcgcagcgccgacgacgaccctccccattgccttctcactgatccctacaacaccaattatagttggggaaggtgaacctccctcttgggatccggtaccaactctaaaagttctacaatgagtatgtcattacgagatcatattagaaagaggagggaagaagaagatgatgacatgatgttgtttattttccctgccttatatctgatgggttcaactagaagtgggggacaaaagaagaaacgccatacatcagatgagacaactccgtatgtgtattgtcaagtattgggaagacaactccgtaggtaagctcacaactctgagggtaaaacagagttcaggaagctattgttctttttcgttggcatttcaaaatgatgatcaaaagtcagaaggcagcatggaattgctgaattcagtgaaagctatttcgatccatcctctttccaataacaagtttttggtactggattcatctggagtgttgcatgtcttcattttttcaacaacacaaatggtctcaagaggtgccatcaagcaatgttctgaaaatatccatacatatcgcttgcattatcccatgaaagtgcaattatctgctgtcttttcagttacctctataaagtgtttgtgcagagacacaatttttttgggtttcagatggtggacatactgtacatgttatgtccgcagttgagactgaatcccctaacggtgataatggagacgttactggagaaagagagttagcacctatcaagctttcagctattgaagcaatctttacaagcgaaagagttgaggacattgtatctatctccaaggattcagttcttatccttggtcaaggcaacatgtttctgtatggaacttcttgaatttggttctttatcatgcatggtaagtataatcaaatcaccgtttttgcgtgttactaacaacaattgcttcagcatacgcccttgagtttcatttgatatcaggtggatacctcactgttctttagggcatggttcaagactttgcagctttggatggtcttttggctaaagacaggatgagttttggtgattttgaagatgaacttatccaccagtccttgaagtcgtgagctttactatttattaatcacagtaagcagatgaaaaaagctcatgttttttcagaggacagcaagaatctgaaggtgacgccagattatggacggaccacgccgtaatgaccctattgctctgcatgcgtactttacatgcaaagactggcacaattcttgttgatatgacttggaaagagcaatgctgccaaatctattcccagtctcagttgtcgtggaaagtggatcaccatgagggccattcagctatggaataatacagctggtgctagactgctagtgtaattcagggactggacttgcggtgtggtggagtcgaggtttgggcatgttacttactgcatactacctctgttcttaaatatttgtcacccgctagtcatttttgaattaaacggtgacaaattaaaaagaacggagggagtatatcaaaaaaggaataatgtagtactcttgtaagagttaagatggaatgttgaaaggcgcgactttgagccattcttatcattggttttttattgctgtattttttttgtgacattccactattccggtatacccaaatcattcctggttggttgtgtaatcacgctttaggctgtcctcactggtaagtggtggaccccccattttagtgagtgctcacaacttgacatgtttattgga

SEQ ID NO: 36935 - DNA, 6023 bp, Zea Mays
atggcgccgcctcgcgtcaccaggaagaaggggaagggcgccggcggcaagaccgacctgcgtcccgaccggaagcagttcaaaaggcaccacaaggaggatgcagccgctgagcagggggatggcaacggagagcggcagcagtcggcagcgccgggttctgcagcgctcctcgccgcagcttctgacgaagctgactttccaagagggggacacagcctcctgagcaaggatgagatggcggaggctcgtgcggaggcggagcaggatttcgagagggaggcgaagaaggggaagggaaaaaggaagaggagtggcggcgagtcgtctggttttggcgtggatgacgacttggggatactcttcggtggggccaccactgggaagctcccacgctttgctaatcgcatcacagtaaagaatatttcaccaaatatgaagctctggggtgttgtaattgaggttaaccagaaagatattgtgttaagtctacctggtggaattagaggctttgttcgctcagaggatgtttgcgacattgctttgcaggaaaatcgtaaggatagtgggaacaatttatgcgcagaagttgttcatgttggtcagcttgttccttgtatagtcctacgagtcgacgatgatagtagagaaggaaaagtaaacaaacgggtttggctatcattgcgattaagcctattgtacaagggacttgccctggatggcttgcaggaaggaatggtacttactgcccaagtcaaaagcatcgaggatcatggttacattcttcattttggagtatcttcctttagcggatttatgcagaaggatgacaaagaagatgtgaagactgagcgccgacaactgatgcaatgtgttgtgaaggcgattgacaaaactcgggccattgttcacttgagttctgatgaagacttgctttctaaatctactattaaggatctgaaaggcctttctattgatcatttgattcctgggatgatggttaatgcacgtgtccattcatttcttgaaaatggactcatgttatcatttcttacttatttcagtggaacagttgatatttttaatttgttgaattccttcccctctggtaattggaaagatgattacagtaagaataagaaggtaaatgctcgcatcctgttcgttgatccatcaacaagagcagttgggcttacattgaacaaacatttacttcatcttgaagtaccccctattaatctaaaagctggagatatctacgataaatcaaaggtgctgagggtagataaaaaggccggtctctttcttgaaataccttctccaactccatcacctggatttattagtatacgtgatgtgtcagacaaggatgcaaaaaacttggagaagttcaaggaaggcagtagcttacgtgtccgtatacttggagtgcggaatcttgaaggagttgcaataggcaccataaaagacagtgcttttgaagggtctgttttcactcatgatgatgttaaacctggaatgttagtgagagctaaggttgctactgttgagccattcggtgctattgtacagttttcaagtggcgtgaaagcactttgtccgcttcctcacatgtcagagttggaacatgttgttaaaccaccaaagaaatttaaggttggagctgagcttcttttccgtgtgttgggctgcaaatccaagagagttacagtgacatacaagaagtctctggtgaaatcaaaacttgatgtgctttcatcatatgctgatgcaaaaattggtttagtgactcatggatggattactcatattgaaaagcacggttgctttgtaaaattctacaatggagttcaaggttttgttagcagatctgaccttggattagaggctggaactgaagcagaaaatgtttatcatgttggccaagtggtcaaatgtagaattatcaatgtgatccctgcttcaaggaaactaaatgttagttttgtcatatcccataataggattgctccaatagacactccaaagttgggcagtattgtctctggtgttgtggaacggcttactcctgcagctgttgttgttagtgtaaatggcttctccaaggggacaatactgaatgaacatttggcagaccatcatggtcaagctgctcagttgaagaatgtgttgaaacctgggcacgagttcaaccaactcttagttctcgatactgaaggtcaaaatttagttctttcggcaaagcactcacttataaattgtgcaaatgacattccttcagagatatcacagatgcatcctggtgttgtagttcatggttacatctgcaacattattgaagctggttgttttgtccgtttcctcggacatttgactggtttctctcccaaggacaaagtaaatgcagaaactgctagagtaaaactcgcacttcaacagtcaatgtgctcctcaatggattcttcatttattcagggatactttcttctggatcagaagattgcagcattgaagtactcaagcaatgactgggctcgccattttggcattggtagcttagttgaggcggaggtgggagctatagaagaatatggtattatccttaacttcaaagaccatctggatactgttggtttaatcgagcaccatcaacttggtggcagtagtgtggaagtgggatcttctgtgaagggtcttgttttggatttatctgatggagttgttaacttgtccgtcaaaccagagctaattgacagtgtcagaattgttggaaaaaagaagaaacgccaaagggccgtagttgcagacttggagcttcatgaggaagtgaatgcagtcgtggaaataatcaaagacagctatatggtcctttccatccctgagtacaattatgcaattgggttttcaccactgatggattataactcacaactgcttccccaccaccactatgataatggacaacgcattactgtggttgttggaaatatcccaagttctgactcttctggaagacttatcttactaccaaaagcttcagcacagtattcttccctctctgattctaaaagggctaagaagaaatcaggctacaaaattgggtcacttgttgaagcagagattattgatatcaaaccgcttgagcttctactgaaatttggtggcaatcttcatggaagaatccatattactgagattcttgaagaggattctgctgagcatccctttagtgaactcagaatagggcaaaagcttactgccagaattgtttcagaggctgaaccttctggaaagagtggcaaaaaattcaaatgggaattgtctattaggccatgtatagtcaatggagagtttgctcaaaaagaacaaaatcacaccacaaatgggattgtacgtgcttatgttgtcaaggtggataaggaatgggtctggttaactgtatcaagaaatgttatggctcatttatttttacttgatagttcttccgagcccagcgaactgaaagaattccagcagcgctttagtgttggccaagcagtgaaaggtcgtgttatcagtgtgaaccaggagaaaaggttacttcggttgaaggcacttgataaccaatgcacacaaccgaatatagatgaaacacaagaaccaaagtcctctgtgtttggacaaacaaaacaaggagatatcattggtggacgtgttcaaaaaattctacctggtgttggtgggctcgtcgttcagattggacctcatctccatgggagggttcattatactgaaattgttgactcttgggtgtctgaacccttgtctggattccatgagggccagtttgtgaagtgcaaggtcctgtctgtgagccgctcatcagaaggatcacttcgagttgatctatcactccgttcatcaaacctgatcagagactctaacaactcaagactagatgatctggaaacctgtacctcccggattgagaagatcaaggatctgctccctggaactgagattaagggctatgtgaagaacgtgaattccaaaggatgttttattatgctttctcgaatggttgatgctaggattactctatcaaatttatcagatgaatatgttgaaaatccacagaaggatttccccgttggaatgcttgtacacggaaggatcctgtctacagacccatcatcagggagagttgaggcatcacttaggaagaccactggttcaaaattggaaaagctggatgatattagttatagtgacttgcatgttggggatatcgttgatggccaagttaagcgggtggaatcctttggattattcgttacaattcggagaagtgaattggttggtctgtgccatgtatcagaactttctgatgaacctgtcgttgatattaactcttgctataaagctggtgatatggttaaagccaaaattctgaagattgatgagacgcggcatcgagtatcacttggaatgaagaagtcatactttgattctgatctgactgctgacacaaatgatgatgaaagtgctcttatggacatcagcgttgcccctcagatggttgaatatcataacagaaatttagttcaccgcaaagcagaaccaagggcttctgttctgcctcttcaggtttccttggatgaatcggaaggttccgacctagaggataatattagtaatacatgtcttgaaattgctaatggaactgaagcaaatgctaaaaagagtgataaacagttaaagaaggaagcaagaaaacaaagggaactagaaatcagtgctatggaggaaagggctttgcaggaagatataccacaaactccagatgattttgagaagttagttaggagctccccaaatagtagttttatctggataaagtatatggcaactttgttagatcttgcagatgttgagaaagcacgtgcagtagctgagagggctttaaaaacaataatccccagagaagaagaagagaaactaaatgtttgggtagcatatttcaatctggaaaatgaatacggtagtccaagggaggatgctgtgaaaaaggtattccaaagagccttgcaatattgtgatcccaaaaagctgcacttggctcttcttgcgatgtacgagaggaccgaacagtatgagcttgcagatgaacttctagacagaatgaccaaaaggttcaaaacttcctgcaagatatggttatgccgcattcagtttgctctcaagcaaggcaaggatgttgagtacatcaaagccattgtaaaccgtgcacttctaagtttgccacacagaaagcgcataaaattcctctcacaaactgctattctagaattcaaatgtggggtgcctgaagaaggaagatccagatttgaactaatattgcgggagtacccaaaaagaacagacctttggagtgtttatctagaccaagaaatccgccttggtgacgtagaagttatacgggcattgtttgagagggtgacttgtctgaccctacctccaaaaaagatgcagttcttgttcaagaagtatcttaatttcgagaagtcactgggtaaagacaacgaaagaattcagcttgtgcaacagaaggcaatcgaatatgttcagagttcactgccgtcacaagacaactcttgaactacatggagacttaataagcccacaaacaatcattaggaaataccagtcgtactgtagatgtgatctctttgatgactccttgaacattattgtgaaaaggtcaatgtaaaatgtgggctgttcaaaattttgtttgaaacctttatataagttatgagtctagtatgtcatgtttcacccaattttttggaaggaactattctaagccggatctggttcgaatattgaccttttctatctgtggtattgactgatgaggcacaattgaatgggtaactgtctgtgctactctgtcacacccgggtttcggacaccaagacacgggcgcgaacataatcacctggtgttgctgggatcaggtcttacacatatgatgaatcatg

SEQ ID NO: 36936 - DNA, 1660 bp, Zea Mays
gcagcggcaatccaccctgcctctgcctgccacacggaaaggcctggcccagaccaatgcgcccgttttcactctagtgtagtgttgccacggccggaagaggaaccgctgtcggcctgctccacctccacggctccacctgtctgctctctgtctgtcccgcgtcctcctccgcagcacgacgaccgcatcgcgttctacgttctccgccctctccgctccccctactctgcttggtttcccagaagatttgattggtttccccaaatccggtgactccattcctgttgttcttcacgtcgaccccgggaacctcccagaaggctctagcgaccccggcgctctgagtgctgtgctgccggcggcgagatccaggagctgcctgccatggtgaaggacagcgcctactacgacgtcctaggggtcagcgtcgacgcgtcctccgccgagatcaagaaggcgtattacatcaaggcgaagctggtgcatccggacaagaatcccgggaaccctgacgccgcactcaagttccaggaacttggagaggcctatcaagttcttagtgatcctgggaaaaaggaggcttatgataagtatggaaaggagggtattccccaggataacatggtggatcctgctgctgtctttgggatgatttttggaagtgactattttgaagattacgttggccagcttgctctagcatctatagcctcagtagaggttgatgaaaactcaaacagtcaagaagcaagagcaaaggttcaagaaaagataaaagagttacaaagagagagagaacaaaagcttacccagagcctgaaagaccgacttcaaccatatgtagatgagagaaaggatgaatttgtgagctacgcaagcacagaagctaggcgtttatctgaagcagcatttggtgaggctatgcttcacactattgggtatatttacgtgcggcaagcagcaagagaacttgggaaaagtagaatttatatgggtgtaccgtttatagctgagtgggttagagacaaaggacaccacattaaatcacaggttaatgctgcttcaggtgctatttctctaatacaacttcaagaagggatgaaaaagatggaaggaagcgagaacagtgaagagcaacttatgaagagttttgaggagaaaaaagatgccatgcttagctcgctatggaaaattaatgtggttgatattgagtcaacactttcacgtgtctgccaagcagttctgagagataacacggtctccaaagatgtcctgaagctgcgagcgaaagcgttgaaaaagctcggaacgatattccaaggcgcaaaatctatgtaccgtcgtgaaaacagcctgcgcgttgaaacgagcacaaatcagcaagctaacccgtcacactgaagcccatggaccaccgtgtagcaagggatcggatttgatgtgagcatttaacacgaagctgtgaattgcgcttgatgcagcactataatctgtagctgtgtttttcttccaggattttaagcattgtatttgtatacttatgtgccaagtatgtcttgcttcatttcactctgaatcgctgatgtcctggccgttctgcaccttttcagggcacgggaattttccctgtataatttcaaagaaaaatcaaaattta

SEQ ID NO: 36937 - DNA, 1545 bp, Zea Mays
atccgttacatgatataaattagttgttgagcgattgagtgatcctaaacatcattaaaaaatgtttataattttaggatttttgtagcttctgtgaaattttggtgcaaatttatgactaaagttcacttggggtctgatttatgttgatcttctaactatgttgtaatgggtcagttgatagctattaaggcggcgtttggttcctagcagattttgagtattggatactgtacaaaacccaatgcaaaatccattatcaggttatggatagattctgagattctggcacacaatccaatgcagaatttaagaggtgtttggttcataatgggattctagaatgaaattctgaaaatgaagtacgaaacaaacagggcttaagttggccaagtttgcaactgctttaggtggccatctgaagcataaattaggaagttccttaaagtgcatgtaaattttctaggtgaatacgatattacacaacaaattaaattcgcaaaatggtccagcaatgtgttgcaattgatggcattcacatttttttcttgttccttggcccatttagttgactacatcagtctgcctgaattaggatcaacttcaacatgggtttcagttttgttagtgttagacaaacaaattttgcacacatacttgtttttaaagctacatgaaaactaatacttctttctgtcggagaacaaggtggtggaagaaatgtccaaccaaattgggccatggctgttttttctatcatcaattgtttttttctcccccagcatggaattaaccactttaagcatctttcaggctgatgctatcatgtccagattgaacattgatgattatcagaaagaaggcagtcaaccaacactcctgatcacatctgacatattgactttgaggtggtcgtccatgaagggattattagagaaaaaccaaccaccaaggaagaagcacggcaattcctgaaaggtttatttccacgatataccagatgaggtcatcaagagcttgatcgatgagggagtagtatttagggtcgcaggtggtttgctgcttgaacatccattgacgctgccgtttgtcgaagcagtggttggttctagtgacagtgtcatggggctgtcaaaggaggttgcaaacaagttaattcacgacgcactgtctacttagcgtagcaatttcagcactactgtttctgatcaaattcttactgcactcacctggagatgtgatcaagcagagagcatatctggggatacccatagtgattcatgtatttttaaacgttaaaccaagacaggcgcacctggcattgcaaattgtgatcaggttgtacttgccttctgtttcacttgaaggatacgttgatgcttcttttagtgggtcagttggtatgatttgtaatatactgatatacataatctcgtctctgatatgtgactgttcgttgcaattgttaaagaacacaacaaatgcatggatgaaaatggatccgatatgaacagctacgcggaataaaaagttggagatcatata

SEQ ID NO: 36938 - DNA, 8644 bp, Zea Mays
ggataatattcaagtttgcgtttactaaaagaatgcaagctagcttggtactaggagaatccagagaaatctgccgttatatagcagaaaagtatgaaaatcaaggatattcattcctccttggaaaggatgcccttgagagggcttcagttgaacaatggctccacaacgaggagcatgctttcaaccctccgagccgggccttgttctgtcatttggcctttcccttgggtgaagaagatgatgatattgatgttcatacaaggaagctagaagaggttctggaagtttatgagcaaaggctcagtgacagcgaattccttgttggaaacaagttcactcttgccgaccttgttcacctgccaaattcccactatatcaaagcatctaacaagtttctttacctttatgattcgaggaaaaatgtaaggaggtggtgggatgctatttctgaccggagttcttggaaggaagtgctgaggtatatgaagaacgtggaggagaagaacaaacaagaagaactcaagaagcagcagcagcagcaggaagaggctccttccaccgacccaattcgggtagactcgagaaagcagagcagaacagagcctcggacaatattggttcctcctgctgataatgagtcatcagcttccatagttcctcgaacaaagaagcctcttcctggtgatcacttagtgtctactcaacaaggaaaatcaagaaaaaatgtgcatcagtacccatcacaagattcagaactggcaacctcacattctgttcctcaagaaccaatgagcatggaattggttcaagaacgagaaaggacgactcgaagaccctacactgatcagagtcaagatgtcttcaaagaggcaaaggttgctaagtctacaccatctagtgcaaaacctatgtaccctcaacaacctgctcctacttcagggcatggagaagtggaagatacttgggacaaaggggtgaaaggtagagaaactgttcctgaccgacaacaaatgttgcaaaaatgggcaggtacagccagagagcaagtttctgatcgttggaaagcaagtcctccatcaagacaggctgcagctgaagatgttcgtggtgccactggtgatacaacacagtctgcagatgttcttgacacttccaagaaatctagaggtgcctatgaagaagctaaaggccctggctctgttaaggaggagaagacatcctctatttacaagaagaagcctctggtggcacaagacagtcaggagcaagctcaaactatcccagctggtgagaaaacagatagttctatacaaaagcatcaacaagcttcggatgccccaaatacttttgttgagaaattaaatgcttcagaaccagcaagagtaaaaactcacagtgacttcagtgctgaacagccatatagaaaagacaccactgatgaccagaaagtgataccacctctttcgactagagaactaacttcccaagtccaacctccctctaaaccatcgtatgatgagaagccaacaccaatgagtcagcaaaaatctgataagcaaagagtggaacctccaatacaaatagaagcagaaatatctggtgttcaacatgcttcaccatcatttccaagagcttccatggatgatcgtgccactatcggtgataagtttgccatgcagtcaattattgatgaaagagttggagaaccaacacaaatgcaaacatcaagtccagatgctcatcctgcttcattacctactaagagagaaactcctgaaggtcatgaaattggtgatttagggcttgccagtacacctggtggccaaatatcagaagcaaaaaaagtgggagatgacccagacacagtccatggagatgtttattatgtcaatttgtcaactcaagatgtgggcaaggatgccttcaaagaaccaacggtcactgactctttaccatctagtgcccaaccgattcagaaatctgctattactccatcaaggcaaacacaagttgaagaagctagggataaaagcatgcaaagtagagaaactattcctgaacaacacaaaatggtggaaaggaagacaggtacacctggagagcaattatcagaacgccagaaggagattcgtccatcaagacagtcagcagctgaggatgctccaataagtgatgcaatacagcctccagacatccttgacactcccaagaaatctagagccacctttgaagaatatataggtcctggatctacattgcccaaagcacaaattttggatgctcaagattctcaggtcaccaaaggagaatctacagtgccaactactgaccaaaggaaggactggaaatatgaaaaagatgatgaaaccatcgtgactgaagaaaagtcactatcaacagagcgatctagggagatgttccaggaaagtgcatctactgcacctaagacacatcttaccgattctgggggctctaatgcactggaaaaaacatcctctgtttatcataagggtcctctggttgcccaagacagccaggaggaagctcaagtcatcccagctgatgagaaagtagatggttctgcatcagagcatcatgaatcctctggtactccatacagttacaatgaaaaattaagtgcttcagcaccagccagaggagatattcatgatggtcacagtgcagaagagcaacataaaaattacactgccgatgatcagaaagtggctccatctctatcaaacaaagaaccagcatcccaagtgcaacctgcctctgaaccattacaaagagcagttcctgatggggatttgcctagcaaatcattcaccattgatcaatggcaacgcatggctgcttcattacatggtgtaattatggattctgctgatgatgaggcagccatatctcttaacaatgatcaaaagtcaagacccatgaatcaagaagcagctccaagttcacagagtgtcaatcagatggccaaacaatctggtgagcaaagggtcgaaccacctgtaccaattgttgtagaagcatctgatgttagacgtgctgcaccatcactcccagaagctgccagaactgatgttgccactatcagtgataaatttactgagcagtccaacattgatgaaagggtggggaaaccaaaacaaatgcaagcaccaattacatctgctcatcctgcttcaaaaggtaccttgagaagaactcctgatagtcatgaagctggtgagcttctcagcacatatgagggtcaaagattagaggctgcaaaagcttcacaagatcctgccacaatccacgaagatgtttatgatgccagtttgtcaactaatgatgtggctgttgataaaaagacagcaacagatcatgctattggtgatgaggttgtcacaagatctttacatgatcagcagacaccgcgacctgcatcaactcaagcacagccaactgctgaggctccacaagactctgattcattccaatatgtacgtactggtgacgtgggaaaaactgaattggcaaaaccaactgtaactgatcaagaagcaacagcgcctgcagctggcccaacatcagtcgatccccaacgtgctaacatcataccagctggagttgcccattctgaacagaaatccactccaccagataaaggatcagctcgtgttgcacaacctcctacccctgttgaaccaataaaggaagacggtaatgtttctgcagctaattatactaatgagctgcaaatgagttttcagcaacaggccagatcatctgcaccaaccacaataggaattccagcctcagatacccagagtgttatagggaaaatccaggtggtaactccggataaacatggcactgatgactcaggaaaaccatttgatctaaatcaaggacatgtttcacacgcatcacaagcaatccttggtcaagaagaactgacatctccacaaggcgcaagagtttttccaacgtcagatacccaacaaaattttgctgcatcagatgaaaaatctgataaggcctcaaaatcatttgactctgctgaaccaagggaagaagatacagatgctgccactgctgaccaaacgactgtaccaccgacagatgttactcgtcaggtcacaatctcgacaccagatgctagtgacagtgtatcaagggatcaggaatcctctcctgacgatagtcagaccagaaatttggggagcccacttattgctagtcaagaagaagcctctcgtgccggaggtgaaggatctactcctgaagtgcatagtaccattgtagatgagaagaagacacttccatctagccaagcacaatcttcaagcactgggcctgattcaatacaaattggtggtgatgctcgtcttagtgatgctggtgtgccagccacaagctctatagagaagcaagaggcagaacctcctgcagaaacacaagcaccaacttctaagggtctacaagactctggaagtatcgagtcaccaagacaagccttaactgatcaaaccgtggcacctgcgatgaactcagtggcaccatccgattctccagaaggtccaaattcttctcgatctgtacagaccccttatcaacaagccattacaaaaggagacactgttgttactgcagctgatcaagccgagaacatgcaaacaataacttatcaacaagccattacacctgttccatacacagctaaaccttcattcccaggtgctcaggatgcatcaaggcaggaaactattcctgatgaggggccaatggaaaattattctcctaaacctggagcacagacacagccacctgcagcaactctagatgtatcaccctatgcctcgagcaaggttaaatcaactgggcaaggagccaagccaccaacagggcaccaagcatcttctccagaaactcagcttggttcctcacaaccaggcgaagatgccccagcagtacaaaaaattgctgcatcagatgaaaaatctgccacggcctcaaaaccatttgactctgctgaaccaagggaagaagatactgatgctgccactgctgaccaaatgactgtaccaccgacaaatgttactcgtcaggtcacaagctcaacaccagatgttggtgacactttatcaagagataaggaatcatctcctgatgatgatcagatcagaaatttggggagcccacttattgctagccaagaagaagcctctcgtgctggaggtgaaggatctactcctaaggtgcatagtgccattgtagatgaagagagaacacttccatctaggcatgatgcacaaacttcaagcactgagactgattcaacacaaattgatggtgatgctcgtcttagtggtgttggtatgccagccacaagctctatggagaaacaagaggcagaacctcctacagaaacacaagagccaacttctaagggtctacaagactctagaaatattgagtcaccaagacaagcctcaacttataaaaccgtgacacctgcgatgaactcagcagcaccatccgatgctctagaaggtccaaattcttctcgatctgtacagacccctttatctactggaccaacaaaaggagacactgttgttagtgctgctgatcaagctaaggacatgcacacgataccttatcaacaagacattacacctagttcaaacacaggtaaacctccattccaaggtgctcaggatgcatcaaggcaggaaattattcctgatgatgggccagtgggaaattattctcctaaacctggagcacagacacagccgcctgcagcaattctagatgtatcaccatatgccttgagcaaggctaaatcaactgggcaaggagccaagacaccaacagggcaccaagcatcttctccgggaactcagcttggttcctcacaaacacaaggcaaggataccccagaagaacaaaatattgctgcatcagatgaaaattctgccaacacctcaaaatcatttgactctgctgaaccaaggggggaagatattgatgctgctactgctgatcaaacaactgtaccaccggcaaatgttactcgtcaggtcataagctcaacaccagatgctagtaaaactttagtaagagatttggaatcctctcgtgataatggccaaatcagaaatttgggaagcccacttattgctagccaagaagcagcctcccgtgctgggcatacttctgatgatggatctactcctgaagtgcatagtaccattgtagatgagaagaagacacttccatctagccaagaaaaatcttcaagcactgggcctaattcaacacaaattggtggtgatgctcgtgtgctagccacaagctctatagagaagcaagaggcagaacctcctgcaggaacacaagcaccagcttctaagggtctacaagactctggaaatatcaagtcaccaagacaagccttaactgatcaaatcgtgacacctgcgaagaactcagcggcaccatctgatgctctagaaggtactgaaccaggtccaaattcttctcgatccgtacagacccctttatctactggaccaacaaaaggagacactgttgttactgctgctgacgaagctaaggacatggaaacaataacttaccaacaagccattacacctgtttccgacacagctaaacctccattcccaggtgctcaggatgcttcaaggcatggaagtgttcctgatgatgagccagtgggaaattattctcctaaacagacacagccacctgcagaaattctagatgtatcaccgtattccttgagcaaggctaaatcaactggccaaggagccaagacaccaacagggcaccaagcatcttctccggaaactcagcttggttcctcacaaacacaaggcgaagctgccccagcagaacaaaaatttgctgcatcagatgaaaaatccgccaaggcctcaaaatcatttgactctgctgaaccaagggaagatacagatgctgccactactgaccaaacgattgtaccaccgacaaatgttactcaggtcacaagctcaacaccagatgctagtgatactttatcaagagttcaggaatcctctcctcacgatggtcagatcagaaatttggggaacccacttattgctagtcaagaagaagcctctcgagcgggaggtgaaggatctcttgaagtgcatagtaacattgtagatgagaagaagacacttccatctagccaagcacaatcttcaagcaccggatctgattcaacacagatgggtggtgatgctggtcttagtgatgctggtgtgccagccacaagctctatagagaagcaagaggcagaacctcctgcaagaacacaagcaccaacttcgaagggtctacaagacattggaaatattgagtcacaaggacaagccttaactgatcaaaccgtggcacctaagatgaactcagcagcagcatctgatgctccagaaggtactgaactaggtccaaattcttctcgatccgtacaaactcctttttctactgagccagcagaaggagaaacaaattcaaccaatgaagaatccaagtcgcaacagaaagttggccagtttggtactcaatcatttaaagataacaacaaagaagctgatggaacagtaaggtctaatatatcgagatcaactgaggaactccaagaaccaccttcgaggcctaagggagaatcaagtgaagaaccagagaaccaacaactggctgaccaagctattgttaaaccactagagggtaatgagcagcaagctgaacagacaaaaccacatgagactgcaattgctgaggattcggaaaataccaatctgaagaacaacagaatatcacaagtggaaactttagattcatcaggaaagcaagcctcagtatttcagcagctaggaaagaacacaaaagatgccctcaactcaactgaggatgcaccaggtgatggaaaagcagttagtaaatccgagcacagctcgagatctgaagaatccaaggtgcagctacagtctgaagacaaggcacgagttcctggaactgatgcaccaagcttagaaactgggcatcctagcaacggaggccttcaagcaaatagctatcaggataacagtagccaatctcaggaagaagcttcaaacaaatctgtcgagcaatcttctggtattcggaacaaagacaatgactccagcagattggatgactcgaccggctccaccaagaccgagagttgaaaaactaagccctggtaattgataaacctttgtgctatggttcatcgaccaacacattatgtgagcaagtgttttgcgaattcatcgcttttcaatttttacccttttttctcatttgcttatccgttgtaagtctaataaggtcagctctgctgtcatcgttgggttatgccccctgtattcttgtgttgttcttgtccaagtacatttttacctttgaacaatgagtgagaatgcaatgatgtcgccattcctgtatattatcacttacatgtttttacaacaacaacccagccttctagaggatgtgatgtaatgttcctttcgttatgctttgaattaaagcatatgatctaattttacttttgttatgaatattg

SEQ ID NO: 36939 - DNA, 1636 bp, Zea Mays
cttagaaccaaaaccgtgttagctcgtaccaaagtaatacgtgccgaaccgtactctaggctactgatttcgggtcggcccgacccattctccacttcttcagcactagtcgcgggctcgcggtcgcggccgaggatatcgaagctgcgagcaacgcgatcgagcgcgacgcgggtgagacccgagagagccgtgagggagccagggagggaaccccgaacccccgtcgtcgtctcgtgctcggtctctccggctggcggcatggagagtgccgtgctcgcctgcgaggcgccaaccgccgccgccgctgcggcgcctggagcgggaggggacagaggagccgagggcgtggtgatgctgaggcggtcgggcctcgcggcgtgcctcacgtgtccgctctgcggccgtctcctccgcgacgccgccaccatcaccgagtgtctccacaccttttgcaggaagtgcatatcagaggagtttgtaaataaggaagtgtgctgctgccctgtttgtagcattgacttgggctgtgctccactggagaaactcagaattgatcatagcctacagtatgtaaggtcaaaggtatttccttctaaaaaacgaaaggttgaggatccagaagtcacatcgccaattacatcacctataaagacgaaacactcaaccttgcggggcagtagtaatatcacaaaaaaatctggggggtggagacctttagggtgtcactttcgagcagctaaaaagaaaaggtctcttagacctaaatcagacgatataaagacagctggaaaaaggactgatgatccagttgatgtaactcttgccagtcaagcaaagactaggaagcagattacaagacgtggaaatctggagaagagaactggaaccaagaaagtattgattttaaagggaaaacagaaaaatacgaagacaaagaatacgcctaataagaggagattgccagcattatggttctaccttcttgctgcttttgaccagaaaggacatcctcctctgccgcagataccatcaaaatttctgaggatcaaggatgtaaatttgcctgcttccttcatacagaaatacctcgcgcagaaacttaatctttcaagtgaaactgaggtggagatattctgcggtggcagaccagtgagcccagggatcaccctgcacgacctagcagaccactggattggcaaacgatcgaagggccgagtgcggtcatctgtgggcacgcccgccgctgaattcgtgctgaaggtattttacgccaggtcaggagcgccccttccaaaaactgaaagcaaccaagactgatggagagcttcgagcttcccttcgtttcagaaccagcagtgtatcgtttgactcgtaggaccaattgattaatggtatcttagtaacatgtacatagatgttagtgtcacggattagaagctcccatgggcttactgttatatatatccccctagttcagtgcatttttaccgcttatatttttactgacaaagtgtgtagtatctaggctgtgtaattaaaactggatgagatgtcgagatagagtcaaatttcaagttgcactggttcagctggtatgaatcctggctgaaccggttttaaacctgctcaactt

SEQ ID NO: 36940 - DNA, 170 bp, Zea Mays
ccatgtgcaaccgccccccttcccatctcctcctctctccattcttgcagccaccaaaaccctagccgcccccccccctcaatcccctcctcccaaggtgctaatccgtgccgctcggatcatcgtctcttggtgcgaatctccaatcgttttggtggagggaagaaggg

SEQ ID NO: 36941 - DNA, 3835 bp, Zea Mays
catctctctcctcatataaaattcgaagcatcctgccgtgcgtccccgaagttccgagtccccattcggtcccccccctctgctctctcgaagcctccaggctccagaacccccaccccctctcctctcgcgccgcgaggggttgatccgtccggcgatctgggccctccggccggcgcccgcgcctgggaggcttttccttacccgccgcacgggcggagatgctctcgctccaacagcagcacggcggcgctgtcgccgccggcggcgatgcgcgccaccacgcaccgcagccgtcggtgctcggtggaggcgcggactggctagtgttcgggggccgcgccgacctggaggagcccgcgaggaatgccccgtcgcccgccttgttccttcttccgcccgcggggctcgatgacagggcggcccagcccgagcccaatcccaagcccgcacagctcgcaggaggcgatcgtgccgactgtttcgactttggactgggagaagtgggcacaaaagctgttgatgaagagcgacatttggcacttgcacatcaaaactacaggtcagggaagtaccgagaggctctagagcatggtaatgtcgtttacgagaagaatccacgtcgaactgataacctcctcctccttggagctatatactatcagattcgtaattatgacatgtgcattgcaaaaaacgaggaggctcttgccatagatccacattttgctgaatgctacggcaatatggcaaatgcttggaaggagaaaggtgatattgatcttgcaattcgttactatcttactgctattcagctgcgaccaaacttctgtgatgcatggtcaaatctcgctagcgcatatacaaggaaggggagactgaatgaggcagctcaatgttgtagacaggcacttgctataaatcctcgattggttgatgcacatagtaatcttggaaatctgatgaaagctcaaggctttattcaagaggcatacagttgctacatcgaggcgttacgtattgatcctcattttgcaattgcatggtcaaaccttgctggtctgtttatggaggcaggagacctcgacaaggctttaatgtattataaggaagctgttaagcttaagccatctttcgctgatgcatatcttaatcaagggaatgtttataaggctttgggaatgcctcaagatgccattatgtgttatcaacgtgcactgcaggcacgtcctgactatgctatggcttatgatactcatctcgggtgagatgcgaacaagcttacaagagaatggtcctttctttaccttcaaagtagagccttagtatacctcgtaatacaaaggtaggggaacattttcatgcaggtaatcttgctactatttactatgagcaaggccagcttgatatggcaattcgttgttacaatcaagctatagtctacgacccacagtttattgaagcatacaacaacatgggcaacgcacttaaagatgctggaagagtagaagaagcaatcaactgctacagatcctgccttgcactgcaagcaaaccacccgcaagcccttactaatttaggaaacatatacatggagtggaacatgataagcgctgctacttcattttacaaagcagctatatctgtgacatctggattatcttccccacttaacaacttggctgtgatatacaagcaacagggaaactatgctgatgctatcacatgttacactgaagtactccgtatagatcctacagcagctgatgcactagttaatagagggaacacattcaaagagattggcagagttaatgaagcaattcaggattatgttcaggcagcaacaatcaggccaaacatgccagaagcccatgccaacttggcctcagcatacaaggacagtgggcatgtagaaacggctataattagctacaagcaggctctccggctgcgtcctgattttcctgaggcaacctgtaatctcctgcatactctacagtgtgtctgtgactgggaaaacagagatggcatgtttcgagatgttgaagaaattattagaaggcaaataaagatgtcagtacttccaagtgttcaacctttccatgccattgcttatcctattgatccattgcttgctttggaaataagccgtaaatatgcggcccactgttccttgattgcctctcgttttgggctgccgccttttgtgcatccacctcctgttcctgtaaaagcagagggtaaacactgccgactgaaagtaggatatgtgagtagtgattttggtaatcaccccctttcccatctcatgggatcagtatttggaatgcatgatcgtgccaatatcgaggtcttttgctatgcactcagtcaaaacgatggtactgagtggaggcagcgtattcagtctgaggcagaacattttgtcgatgtttctgccatgacttccgataatatcgccaagcttatcaatcaagacaaaatacaaattttgataaatcttaatggctacacaaagggtgccaggaacgaaatttttgcaatgcagccagcacctatccaagtttcgtacatggggttccctggaacaacgggtgctgcatacatagattacttggtcacagatgagtttgtttctccatctagctatgcacatatatattcagaaaagctcgtccatttgcctcattgctattttgtcaatgactacaagcagaaaaatcgagactgtctcactccagtatgtccacacaaaagatctgattatggattacctgaggataaatttatttttgcttgcttcaatcagctttacaaaatggaccctgagatatttgacacatggtgcaatattctcaaacgtgttcccaacagcgcattatggcttttaagattcccggcagctggtgaaactagagtgagagcatatgctgctgccagaggagtaagatcagatcaaattgtattcacagacgttgccatgaaaaatgagcatatacgacgcagtgccctggcagaccttttcctggacacgtatgaagttcttcatctgctattcttttttccaaacataagctgaaaatgtaaaattaatttacaccctgtcctcatgattttttctggatcagtcccctctgcaatgcacacacaacaggcactgacatactgtgggctggtctgccaatgatcacccttccactagagaaaatggcaaccagagtagctggttccctctgcgtagctactgggcttggggaggagatgattgttagcagcatgaagaagtatgaagatagagcagtagaactagcgctgaatccggtgaagcttcaagcgctgactaacaagctcaaggaagttcgtatgacctgcccgttgtttgatacagctcgatgggtgcgcaaccttgaaagggcatactacaagatgtggaacctttactgctccagtcgccacccggagccattcaaggtggtagaggatgacaatgagtccccatttgaccgctaacgagatctcatcagcagcccggctctgtaaataaggcgagagttgtagaatatttagcatcgtgaccgctgttgctccaggtgcttgtttgccgccccctttcctgccgtgcacatcacctctgtggaggctaacttcgtagtatgtatgtactacactgcaaaagaagtcctagggttagcctattgttatcactatttagtttgctatattgtatcgcggtcgtggtttctaaaataaactgcaacctttaggagtgttgatgtgaaatctcattcttaatagcttctgtccaaaaatgagcaaaaaggacttgagtgtg

SEQ ID NO: 36942 - DNA, 3661 bp, Zea Mays
ctgaactttaaaacaaagaaatccgaaactttatctcgtttcctccccgcctctccccctccccggctctaagggctcttctacaccgaagcaccgcacctcccgccatgcactgcatcgccccccgcctgctcctcctcccgctcccgaccgtctcccgccacgcgctatcgccaacccagacgccacctcttcctcccctcctcccctcccgcgcctgtaagttccacctcgcctcggcgcgctcgccgtcccgcgccgccgcttcggtttccggcgacgacgaggatgaggaggttgacgtggatgacgacgaggacgacgagacaaccatccgcaacgtagacgatgaatacgacgacgatttcgaggacggggatgagggagatgagggcgatgaggaggcggtggacgaggagagcggtggtgagtacgaggaagaggcgggggaggacgaggacaagcgggaggataccgcagcgcggaggcgggactcggaggagtataagtcgcggcgggtggcgaagctggtcgccgaggtgcgggagttcggggaggacgtcatcgactacaacgagctcgccgggatctacgacttccccatcgacaagtttcagtttctgcacctacaagtagtgggaaaacattaatagcagaagctgcagcagttgcaacagtagcaagaggaaggcgtctcttctacacaacaccattaaaggcattgtcaaaccagaagttccgtgatttccggaataccttcggtgatcataatgttggccttcttacaggagattctgctatcaacaaagatgctcagatcctaatcatgacaacagagattttacgtaacatgctgtaccaaagtgttggcatgacagcctctgaaggtagattatttcaagttgatgtcattgttttggatgaagtccattatttgagtgatatctcacgtggcactgtttgggaagaaactgtcatatattgtccaaaggaagtccaacttatatgtctgtcagccactgttgcaaatcctgatgaattagctggctggataagtcagattcatggtaaaacagagcttgtaacatcgaacaaacgtccagttccgcttacttggcacttctcgaagaaatattcattacaaccgcttcttgatggaaaggggaaaaaaatgaataggaaactgcggatgtctaactcccaaaacttagcatctccaaagagtgagttctattatgtgaaagggaagaggaggtttagaacaaataaaattgagcaaggtaatagcaggcctttggacatatcgaaacaggttcagttatcaaagcatgaactcagcaatatgcgtcgttcccaagttccactaatacgtgacactttatcacaactatgggaaaatggcatgcttccagctatctggtttatttttagtagaagagggtgtgatgcagctgttgagtaccttgaggattgcagactgttgcatgactgtgaggctagtgaagttgagctggaacttaggaggttcaagatgcaatatcctgatgctattcgagaaagtgctgtgaaaggactcatgcgaggagttgcggcccatcatgctggttgcttgccactgtggaaatcatttattgaagaattatttcaacgtggccttgttaaagtagtttttgcgacagaaacccttgcagctgggattaatatgcctgccaggacggctgtaatttcttctctcagtaaaagaatagatgctgggcgccagctcttaaccccgaatgaactattccagatggcaggtcgtgctggaaggagagggattgatacagttgggcatgctgttcttgttcagactccatatgaagggcctgaagagtgttgtgacatcatctttgccggacttgagccacttgtctcacaattcactgcatcatatgggatggttttgaatcttcttgccgtatgtatttatattttctttttattcctatctattcacatgttcctgctttctccaggtcctaatctgatggattggaatatgttctccagggttcaaaagttacacataaacagaaagaatcggatgatgttaaggacaagcattctggaagaaccttagaagaagctcgaaagctagtggagcaaagctttgggaattatgttggtagcaatgtaatggttgctgccaaagaagagactgaaagaataaggcaagaaatacaatacctctcttcagaaattactgatgaatctattgatcgaaaatgcagggaagaattatcagaagaagactatgctgagatttccctcctacagaagagactaaaggaagagaagcagatcagaaatgagctgaaaaaaaagatggaactggagagaatggctgcatggaaaaatcggttagaggaatttgaaagtggccatcttcctttcatgtgcctgcaatacaaagataaggattcaattcagcacacgatccctgctgtatttattggaaacctcaactcatttgctgatcaaaagatcatgaacatggtggaagatgattcacttgtttctggcaagccgaaacgtgatagtggggaacaactttatcgcccatcttactatgtagctttaagttcagataattcatggtatctgttcacagaaaaatggattaaaactgtttacaagacaggtctacctgctgtcccttctgttgaagggggcacactccctagagaaaccctgaaacagctcctcctgcgtgaagagttggtgtgggataaagttgaaaaatcagaatacggctctttgttaagcatggaaggttctttagacacatggtcgtggagtctcaatgttcctgtgcttaatagcctttcggaagacaatgaggtagaacgattctcccaggaacatcaagatgctgtagaatgctacaagcaacagaggaggaaggtttcacatttaaagaaaacaataaaggctactaggggtttcaaagaattccaaaagatcatcgacatgagaaattttacaaaagagaagattgagcgcttagaagctagatcccgtcgcttgactcgacgaataagacaaattgaaccgaccggttggaaagaatttctccagattagcaaagtcatacaagaggctagagcattggatatcaatactcaggaacaaggtcctcttggatctaaagccatctcaactggcagcagtttgtggaagtttagtttccgaagggatcaaacttcgtccttggaaaaatagcagctatgtatatgaaccttcttctgttgttactggtgttataagttatttagaagagcagagaaattcgctaatcgatctccaagagagacatagtgttaagataccttgcgaaatagatgcccagtttgctgggatggttgaagcctgggcttcaggactgacttggagggagataatgatggactctgcaatggacgatggagatttagcccgtctactcaggcgctctatagatttactagctcagattcccaaactgccagacattgatccggttctccaaaagaatgcacaaattgcttgcagcgtcatggaccgagtaccgattagtgagcttgccggttgaaaactcaacctatatagctgctgacagtaggggttcccccctcaaacaaag

SEQ ID NO: 36943 - DNA, 270 bp, Zea Mays
atcatgttcattgattaaaagtaaaacgctagcatagaactaatcataataaccaatacccaaagggtaaacaaggacatgaaaacagaatactagtcaatccttaggttgatcatggtatgtgggttgatgaattataaagtaaatgagacataataggccagaggacacttgtcttcaccaaaccgatgcttagggtcttcaactttgtaggactcaaagaacttcatctcaggaccagtggttcaccaaatcttgattgtcgattcc

SEQ ID NO: 36944 - DNA, 1942 bp, Zea Mays
ctttttgctccccttccctccctcccaacgcagcgcagcgactgctgctgcttccccacaccgccccccggtaggctcaccgccggcgacgcgcacgcgtcccaccgcacccaaaccgaccgccacagctgctcgctcgcttccgcccaggaccagagggggggagcctccagatctcggcgcgccatggcgtcgtcctccgacgagcagcccaagccgccggagccgcccgccgccgccgtggtcgccgcaccgccgcagacgcacgccgagtgggccgcctcgctccaggcctactacgccgccgcggggcacccctacgcctggccggcgcagcacctcatggcggcggccgcggcgggggcgcccttcggcacgccggtgccgttccccgtctaccacccaggcgccgccgcggcatactacgcgcacgcgtccatggccgcgggcgtcccttacccgacgagcgaagctgtcgccacggtggcggcggccactgcgccggaagggaaaggcaaggggaagggcgggggcgcgtcgcctgagaagggcagctctggggcgccctccggtgaggacgactccaggagcagtgacagcggcagcgatgagtcgtcagagacgagagatgatgacactgaccataaggtaccaatcaacttgctgtgccacaaggggccatttttaaattgcatgttttttcctgtaattagctggctttctgtggttcatgtttgttctcctcagggttcatctgcgcccaagaaaaggaaatctggtaacacgtcggctgaaggtgaaccgtctcaagctgctgttgtgcgctatgctacggttgagtcgccatatcccgcaaagggaaggtctgcctcaaagcttccagtgtctgcacctggcagggcagcgcttcctagtgccaccccgaatctgaacattgggatggacatttggaatacttctcctgccttggctgttcctgcagtgcagggggaagcgaatcctgggttggcgcttgcccgacgtgatagcgttactcaactgttccttatttcttcaggatgaacgtgaattgaagagggagaggcggaaacaatctaacagggagtctgcaaggagatctaggttacgcaagcagcaagagtgtgaggaattagccaggaaggtagctgacctaacaactgagaatagtgctctcagagcggaacttgacaacctgaggaaggcttgccaagacatggaagcagaaaattcacgtctattggtaccaagtgtcacaaccacactgggaatgagcatcgagccgccaaaggcgcagcagcatcatgacgacgagggccagctccacaagaaatctagtaataacagcaacgggaaaggaagccacaaaccggaggctaacactaggtgagagacaggtgaatgagaaagtgacagagatgagatgaggtgtttcctatctaaccacaacacccatcatcaaccagtgcgttttcacagcccgctggggggccatgtagagtcgccccccactgcagccatgtattatttatggctcgccgcggtgtgcgttgtgtgtttttttgtgtgtgtgtcgtgtaaacctattgatgtagctattgtaacaaaaacctagagagcctagaatttttatgtctgctaactcctgatgaggggggatgtaaccggccaatttggtgcctggtcgatcgtttagatgaaatgcgagcaaatatcatttgatagcctgcctcgccttgttgttgttttggattttttttgcgactttgcgggagtcttttatacaggctattgaattttcgatggtgcttttggatgttgtggtggattaatgtagtggcacgaccagatttagaccaacactgctggaagcttcaaagttgttaattttccatggactgatgttaattttcttgaaatgtaa

SEQ ID NO: 36945 - DNA, 2036 bp, Zea Mays
cgctactcctgcacggctgcactcgccatccgtccgtccgccgacaacacgagacgtcgcgacactcacccgtccggccgtccgccgaccgccgtccaggccatcctgctgttcgccgaccgccgtccaggttgtcctgctgttcgccgaccgccgtcgaggccgtcctgctatcgccaacactgctgtccaggcgtccaggcgtcgttctccagcctccaggctccatctgccgtctgccgagccgagtgccgaagacacggccagtaccgcagccgcagtacgtacgtgacccggaggaggaggagcacgccattcagactcaatgcctgcggagtcagagactgggaacaacaacctaggtttggaaagcatattgccactgcctccacagccgcagcgaccaccactacctccttctgtgagaggcagcagcagcagctctgtttcagcaggaaacaagagaaaaacaagtggaagctctatgggtgcaccaattgttcagtcgtcatcttcagcacaagcagctgaaaataaagatgcaaataaattggttgtcgcagacacaagtaatactggtactagagctgtagcttctgttgatatagcgggccttgatgatgatgaggaggacataccagaggatatgactggaacaggaaagagacaaaagaggcgcacatctattgtatggaagtattttaccaaagaaactgtggaagtggaggtgaatggcaagaagtttgagcagctttgggcctactgtaactttccaaaatgtaagcagagatatagagctgagtctaatcatggaacaaatgcattccgcaaccatctgaggtcacatcatagtattgtcaaaggacagctagaactaaaggcagaaaaggataatggaaaagatgtcaccactattcagccttttaggtatgatccggatgctagtcttagaaaattctatttagcagtaatcatgcatgagtacccattcaacattgttgagcatgattattttgttgatttcatcaagtcgttgaggcctaattttgccttcaagtctagagtgactgctaggaaagatatacttgacatatactttgaagaaaaagaaaaattgtatgcccaattgaaaaatgtaacatgtcgctttagtgcaacaatggatatttggacatcatgccagaacaaatcatacatgtgtgtgacattgcactggatagatgattcttggcatattcagaagagaattgtggggttttttcatgtagaaggaaggcatactggtattaagttggcacagtgctttactgaagtgatggtaaaatggtttgctgagaagaaattgttttcattgaccttggataatgcatcaaataatttagtggcagtcaaagacattattcaagatcttagagtgaatgcttcttcttgtttgatttgtgatggaatattctttcatattagatgtgcatgccacatactcaacttggttgctagagatgggcttgctgttatttcaaaagcactggaaaagataaaagatttggtactaactgtgaagggctctcccttgcaatgggaggaacttatgaagcgtgctactgagtgtggattggatacatcaaagggaattcaactagatgtttccacaaggtggaattcaacttacatgatgctaagggatgcattgcactatgtgtgtttgatgtccgagatagtgattcccaattcatgaatgaagatggcgagctgtgaagaaatcttgcaaatgtgtgtttgatgtcatggactcatgaagacattgaagaacttatattgtgtccatatgtgtgtgtccgtgtgtgactgagactattattttgttaactattattgtgtctggactgaatttatgtaagtttacttgttggatttggatttgtgctatgtgctcatgtactattgtggacttattttcttgttgttcaatggctatgtcggtggacttattttcctgttgttcaattgctatgtggttaacttgtcatgtaatcatg

SEQ ID NO: 36946 - DNA, 4090 bp, Zea Mays
ccccccgcggccgcgctgcaccagagcctagagccgccactccccgggcccacccgcagcgaccgaacccgcgcagatccgcgattggtcgacgtctcctcctccttcccgttcccctccccctccccctcccccctccccgcgtcgctcgcagcagccccgccccgacaaatcccccattcccaaatcccccctgccccccgccgaaatcaacgccgccggctccgcatcctcgacccgctcccgcctccgttcggctgccgtacggaatctcaggtaccccgtcgccgaggccgccccctgtctctcgcggccccgccgggattctagggtttcggtcgggccggcccaagggagtctgcaaacagcgcgggtcaggctcccccgcgccgatcgccgcgagctgcccccgcgcgggcggccgtgggcaccgcttccactcgctagccttcctggtacatgcggccgctgccacactggtgctcctgctcaatcgggaagccccgcgcctcggattccgtgcagggtagacaatttcctgctaccgcgctgctgcgtgtgggatgacctgagcctccgcctgccgccaagatgaatgtggggcaggctgcccacctgtccgggcagatgtctgggcagacagcgcagatgaatcaggtccctgccaccggtgtcggcattggcgttggcactgccgatgggctaccgcagcaccagccaatgcaggagatggcggcgttctcgggaacggaccagcagtttgtcatgtttcggaccacaatgcgcgaaaagatatttaactatataggaaggaaacagtcatcggctgagtggcggaagcggttgccagaactggcaaagcgacttgaggagatcttgtacagaaaattcccaaacaagactgactactacaatatgatgaagggaccagttgagccgcaattgcagtttgctattaagaccttgagcgctcagaaccaacacaatcaacaaaacccacaaatggcaaggcaaatagcatcatcctctagctatggtactatgattcctacccctggtatgacgcaaggcaccaatgcaagttctaggattccttatgtcacagaaaacaatggcctttcatcgtctggtgcaggcatggttcctcagaatgctaacatgggtgcctcgatgcaaggtccaatgtctaatggcttccaacatttaaatgccagcattccacaaaattctaccacaaataacatacaatctacaatgggttcagttggtgtccagcgacaactacctcatatgattccaactccaggatttagtaatcaacagaatgtaccttcaaatcctgactattcaaatggaactggatatttcaatggtgagccagctgtggcatcacatatgcagcaccagaaccaatttcctagcaaccaaattcagcatattgggggccacaataattctggaatacattcaagcatgctggacagctcatctgcatacggtttatcagatggacacatgaatggtggaataggagtgcatgggtcaaatatgcagctaacaaacaggaccacggcaccacaaacatatatgaacatatccccttacggcaattcgtccaaaccgatgcagcagcaattcaatcagcatcctcagcagagaataccaacatcagttgaaatgactggttctggcagcttctatgctactggctctacccctttaaccacagcaaatagtcagagcatgaatgttgcaaatttgcagtctagatcaagaatgaatcagatgttggtttccaatcagttaaacattcagtccattcagcaacagccccagataaaaaatgaggttttggatcaaacagaaaaggtgaattttcagtcaccacagttgactcatgatcaactactacgccaacacccaatgccgcaacatcaggtgcaacctaattcccagtttgttcaaaatcagtatcatataaatcaacagcagccaaattcacagcatcagcaggctatgctaaggaacaattcctttaaacagtctcaaatggcttccacccattcaatgcaactggcagaacaggggtcactgctacacactgaactggtatcttcacaaactagtgatcctgctgatcttccaagcttccagggtcaataccagcaaagaaatgctcttgacaatgttaaaggagggcagatgcttggtcatctatctagctctcaaaattttcatccttctgtctcacatggttctcagcaattgttgccctctaaccagcagcttgatgacggttctaatgctgtaagctatgtgctgaaaggatcgcaggcagagcaaatgctgcgtcctcaatggcagccacaaacaatggaaaaggctcctgttactactaattcaacactcgaaaagcaaatacaagaagatttttgtcaaagagcaatgtcgcaagatggagcacagcaaccattttcatcagattggcgtctttctaattgcactgcagcttctattgatcctgcattgccgaagcctgcagctggagggtttgaacaggtcaatggaaatatacattacctccgtcagataaagtggttgctgctactgtttcatgcaaaaacatgcacataccctgttggaagttgtaagttccatggttgtgttcaggtgcaggagcttttgaagcattttcagaactgccaaagtaaagattgttcatacaggagctgcagtaagtcaaaaatgatgtctcaccattataaaacttgtgtcgatgaacaatgtcctgtgtgcagcgttgtaaggaagtttttgcgccaatcaactgaacaggcatctaagcaaaaagctctcgagtctagaaaacttgctcaacaaaatgtgcctcagagaatcatgaacgggatagaaggtgatagaatggatgttgacccaatgtcagttgaagcatttgatgatcaaccattcgttccaaaacgcttgaagacgcatcctccatcacccagtggcctagagaatgatatctctgtagtctccaattatcatgtaaactcaggctttgcattgcaggaaacacagcctgagcagcttgaccacaataacaggacatcatatctgaaacgagaggtagatgcaaaggctgacatgcgagctcctcaaaagcccataaaaattagttatggtattgatggaaatgtgactgcatcaaggcataatgtgattcctggtgttcccagtgagattaattctcatatcaagcaagaaaacttgttggttgacaaagagacaagtgaaaccgcccttgaggttaagaatgaaacaaatgatccaactgatgcgactgtgtctaaatcaggaaaaccaaaaataaaaggtgtttcaatgacggaattattcactccagaacaaataatggaacatattgacagtctaaggctgtgggttggtcagagcaaggctaaagctgaaaagaatcaagctattggtcattctgagaacgagaactcttgccagctctgtagagtagagaaacttacttttgaacctccaccaatatattgttctccttgtggagctcggataaagcgaaacgcgccatactacactgtgggtactggtgatacacgtcattatttctgtatcccttgttacaatgagtctcgtggtgagactattgaggttgaaggtcaaacatttccgaaggcaaggttagagaaaaaaagaaatgatgaggaaacggaagaatggtgggttcaatgtgacaaatgtgaatgttggcaacatcaaatttgtgctttatttaatggaagaaggaacgatggaggacaagctgaatatacttgccccaattgctatgttgaggaggtcaaatgtgggctacgcaaacctttaccacagagtgctgttcttggggcaaaagatttgccgagaactgttcttagtgatcatatagaagatcggctatttaaacgacttaagcaggagaaacaggaccgtgcagctgctgctggcaaaaatattgatgagatttgccttaagaggatgtgctgggattcgaacgcggaccgacaaggggagaacccccctg

SEQ ID NO: 36947 - DNA, 159 bp, Zea Mays
gttcaagcataggagatcgaggaggagtgggggcagcgcggccagcgaggacagctcgggcagtgggctttttcagggcacctcacagagccgacagaggcagcagcaacttctcgactgtctagacgaattgcagggtgaggagggtgagcaggagac

SEQ ID NO: 36948 - DNA, 131 bp, Zea Mays
tttatcaagtggctaattcggtactacatcatagccaagggcccaacagcgcggtgttgttcccttggtcttataaccacatgccaattcggtacttcatgatctaaagaacaatttacaatactaaatat

SEQ ID NO: 36949 - DNA, 654 bp, Zea Mays
aacaaacaaaatggatcgtggcccactggaccacggtcgtagacgggctgggcgtcgaagtctctccgctcaagacacgggcccacgtccacagatcggaggagagcactggcttgtatccctctggcctctctcgtctccagcgacggcagcgggcgagggttacgcgaaggcgaagcggagtagtggaagcagaggcggcagccatggcggtgatggagaagctcaagatctttgtcgttaaggagcccgtagtcgcggcctcctgcctcatcgctggattcgttgtccggccaatcctggattcatggcagaccgcggaacaagttcctccacctcttctaaatgatgtggttgcaggtgtcaccggcaagaaaaagtagtaaacttgcattgttttctcatgccaatattgccccacattttcttccccgtgttttttctggcgaccagattggaaggcttttcccaagagtgtcttgaactctagatggtatccgcggaataatcattgtacctgaatcatatactgcaatgtggcagttatgaaaatctttcccctcctacaaaggttgatagaatgccataccctttgaactgtgttcgagatgtcatcgtttatgatttctcggtcgagctgtatagatttcgttt

SEQ ID NO: 36950 - DNA, 1031 bp, Zea Mays
cgctttgatgagaatgcgcattgtatcagtggcgccaaaatgggccacctctattagatcattttgcggttcatgtttcatcataaggaatgaacagtagtcgacaaatggaactccactacataaacactggatttccatacacaatcaccgagagcttcatggatttctttgagggtctcacttatgctcatgctgactttgctctcacggatggctttcaagatcagggtaatccatactgggcaatgatgcatacaaactcgtacaagtatggatactctggtcctgggaactattacagttatgctcatgtctatgacatagacgattacatgcgtagagcggatggtgggcgcagaatatgggataacactacacctgtaaacaatgttgattctgccaatgttgtcctgcagggtggtgaagctccccacacaacgacaaatactattaacaaggaatgcatccaacaggtacaccaaagtccaggtagtcctcaggttgtttggcaagataacattgagcctgataatatgacatatgaggaactgttggatttgggtgaggcagttggaacccagagccgtggtctctcccaagaacgcatttcatcgcttcctgtcacgaagtataagtgtgggtttttttcaaggaagaaaacacgccgtgagaggtgtgtgatttgccaaatggagtacaggagaggaaatttgcagatgacacttccatgcaagcatgtataccatgccagctgcgtgacaagatggcttggcataaacaaggtatgccctgtttgctttgctgaagttcctggcgaggatcctgaggcaatgagtcaacagttatgaggccactgggaagttgttgcactttgaagctgagtactgcccccaatgaatgcatgatgttgcttgaaggcagcttattgtccccactttataatgtgtattagcacgtatacaaatataggtattgtagatcagatgtatttagtgttgggtcagcgttttgtacgtaatcaatcagga

SEQ ID NO: 36951 - DNA, 3157 bp, Zea Mays
atggtcacaaggaacaagcgctcagttcctaaccactacagcttgtgttgggataaccctagtaatcagatgcaaggagttatgcagctgaaagctactaacagtggaatgcccatgaaggttgcacaaagaatcgatgtttcaaagtttatgtcatacatcaaagttagtagaacacagctcaaccatataaagagactgaagcaatctggggatggtattcagaccaagcatgtttcacgtgtaattggcggccttgataaatctcatgtgaaaccttatggagctttattagaggatgaacagaggagactgcgcgagcattggctggaaatgtcttgcaatgatttacctgctgcctttgaggttcttagggaaaggaaggtgctgatggagaaatcaataaagttattaggccttgagcttcagcagaagaatgtatctgtcttgagaaaggttcgctgtgacttgtccttcaattctttttcttaagtctctaatttttgtcttgagggaagtgatttacttgaatgtgtaaaaaatacagtggatgagaataccgttgtatgcttacttctgttatgtatcttccccatttacaatgtatcatagcattcgccactatagatgagaataccatgactataaagatactgaattgtaatagaggcatctagtatgaaagccataggcagtatttcattatgaatggtgaattgccctgcagtgttatcttatttgtataagctaatatattgtcacatttttgtaagtatactttgttgtaatcttcataatgaaaataaattcttataaaaaacaatcttaatttgtttttaatacccaatagatgattatggtttatttatgtttgtttatgatgagaaggcagaccagttaacagacataatgaaagggctaggacaacctggtgctagtgaaaatgatggtaccccagtttttcaaaatgaccaggtagaatgctcaccccaaagtatattgcaaggtgggcatgttcagagcacatctcttcaccatcaggatgatgagcagtctgtttaccatattcaccgtatgaatgtggaagatcatgatctcatggtagtcaggggtatagacataactagtcagagtgagaaaaactctgatgtgccagatcaaagtcgtaatggtatcagctgcgtagataaaggcatttactgctgtgccaacaaccctgataagcagagtgatgttctcatggacatcaaattatgtaaaggtggactggttgtttacaatcctgactgcaaaaatacgcaactagaagatcttgatggagtttcttacaaaggtccatcagttcatgcttgtgaccaagatcaggacctggaaagcatcggccatgctgttgtgaaccacaattgtcacaatagtccaaatatttcttcggaaatgagtcatccgacgacgaacgctgtaattgaccaggaaactgagaatgttatggaaccatcttgcagttcttcacaactacctaagtcgtctggagaacaaatgcatgtggaagattttctgtatctaaatgaccaagcagcaaaatttgagaaagtcagtgggcagttggcaggccctcttggccctccagagaatatgatgtataatgactcaggtgacttgcagattaaacagacttatctctcttcaggacaacatttttcttcagtttacttgaataatggcattttaagccatcagcaacctcaacttgccacaccagcttttgctttggacaatccagcatcatttattgagcctttctcaaatctgcagagcaatcgtcagcccgagacagaaaaggacattggagcagtcttctatccctttcgacacgcaactaacatcaaacagtcagcgagtttgcattgtttagtgaataaaggcttggctcaatctgcttcatttcccaggttgttgcaagagcggcatcagttaatcgatcagagtgacagtgacctctatgcacaacctcatgaggattactgcacagatgtgagttgtccaactaaagtgaaccttcatatctccgaacagcattcttatactgcttttgcttcgatggatcataggtataactggttccccgagggctgtcagtcacataataataatgataatctgttggggttgcagtcaggtaacttcttaccccaggccttaccaagtggaagcagcaccgatggagctctgttcagcaccgcatcccagtacaatcagccatcagtacacatgggacatggtgggtcaaaccgcagccaactcattgagccaaggaatcaatttggcccacctcagaattttctttctaagagtcaagacacaaaccctatgtttccggatatgtatggcttcacccagaatatagccagtggcacaagcagtcaggtagcacctatagggtctctggattgctcacattggacaaatttcatacaacaaaattctggaatgccgtctgactttacaaacaggccatctcgagggccttggaccagataactctatgacaccctggactggatgtactagattggttggttttaggcgccacctaagttggttaataaggaaactggggcaggttggaacagaatgttttccagcatccatgacttatgtcatgtagtggttttgatctgtttgaatggtgtggtttcaggaattgcttttgcaccatacctgtctgaacgcaagcgctgggaatctggagtcaaagctgaggattcccgcttttgctgtcttgccctgctgattttttttttattttgataataagctgtgccccagtttccatgtgtagtctgcctatggtgccctcagcaaaacatgatgctgtgttgttctcaattattttgttatttttttttgggttgacatgccagttatatatgaagacaagatatgtataccagtcgggatgccattttaggtatcaagagcgggcagttcgaaatgaacaagtacctttccttttggttgggaggcactaggatttctttattcaggcgtgtttacattccgtttgattagttggccgcaccgtttcgtcctaagtcacttagtgtattgactttatctaaatgtttgtttggttgtctgtacatagtgatgtataaag

SEQ ID NO: 36952 - DNA, 906 bp, Zea Mays
ctaaaacttccacttgttctagccgtcacggcgctaccagttctctgccgcatctctctgttcctctgtttcttcctcttctctaatacattccactagtaatctgttaacacttcgtcatgaagttcggcggctcgtcgctcgcgtcagccgagcggatgcaggaggtggccgacctcatccttagcttcctcggcgagatgcccgtcgtcgtcctctccgccatggggaagaccaccaataacctcctcctaggaccctccatttctagctctcagcgcctgggccggagagaaggcagtgagctgcggtggaggaggggcgtccgaaatccctgagctcgctgtcatcagggagctgaatcttaggacaattgatgagctcggtttagataagtcgatagtttcagggaccgttctccccaacacgcaggggtagcgtaggaggtgttgtggcggcattatctaggaagcggtctgtggacgtgaggcggatcaacccgaaggtgcctaaggaggaggctgtcaccatctccggtcgactcgtccagatcctctccgaccatgggcccctcaccatcggcaacacctggaacaacaccaaggtacccaatcaaccagtcagtcaagcagagtggcaaaagccggggagcgatgcaggcgtcggagcagcaacaacggaggaatgagaaggaaacacacaaagagcatcaaaagcaagttcaacgatcttatgtcaacccatccacctctgaatgaggcatattcagatgtgtgtgtattcagcactcatgctgccttcagtttacggagctcaatatgttacatcgacctttccaacctgccggcagaactcaagaagctcaagcacaagaagtgcctcgtccagtccccccaactccttcat

SEQ ID NO: 36953 - DNA, 925 bp, Zea Mays
ttttttttctaaaattctaagccgcaaaaatccggctccacaatcccgctgttcgcgagccactccctctcacgagtgacgacgaaaccctaggccatggcttggcgcggcgccgcctcccgctccattatcgccgccgtccgtgctcgcgccgcatccccgtcttccaccgccgcctcgcgcctccgctcgacggctccacttcccgccccctcgcgccggtccgtccccgccttcgctttcgcgaccgcgaggccgttggcggcgatgtcggggtccccggcggcggccgtggtgaagctcaccgggcactcggcgacgagcgtgcgggcgtgctgtgagctctcccagggtaccctcttctgccgcacttgtcaggatcgctagcaagccaaaatgggaaggatggttgatgaggagatcagacggaatgattcatatcctgatgcacttaatgcgcacttttgtccttaaatgcaaggattggattctttggaggttgcatcccttggaaactcatcgggcttgcgtccttttccatgcattttgcagagtacttagcgcctcgtgtgtcggcaaacggacagtatatctgctgtaacttacataaataatcatatgttagcctgctgctactcactgccccgcatcgattggaactaagttgatgtttggttcacataattgtataacgttaaatcatgtttgtttaagtctaaccttaatcggattccacactaaaaactgatattggcctattcaaatttattactgctgttatttatgttatattttgttttattttgcgaaccaaacggcactgtacaaattgttcctttgtacgagctcatgaaagaggaagatttttgtcctgcccgtatttgtattgtggttggttgatgttatctaatatattctaacaaat

SEQ ID NO: 36954 - DNA, 356 bp, Zea Mays
ccccaaccaagctcgaactcctgtgttcggactataaatcacgcgcgccgcctttctgggacccgtacgcatggcatgcacgccgagggtcggatctcgccgagaaccacacttgaagagccaccattaccgagcccgcgtgaagaagaataccgcccggttggattgtggatgctctggcgtcgggctcgcgatatcctggctaggtgctccatggggtcctcagggaggtacccatgaccttctcgggcaggatgaacctccgaggcaattggaatttctcaccgtgcctgtgacacaaccgcgatccgcgccgctacatgggcaatatgctggcgccccaatccgaggtgagg

SEQ ID NO: 36955 - DNA, 1534 bp, Zea Mays
ggagacggccacacccgccaccaatcctcctgctgcaatacgtgccatttctttcttcgcttgtctcccgcgaaaaaatatctacagcggctggacctacatgtcacagactctaatgcagtgcgggaggctacatataattagctgatgcagaaaataagaggagattgttcatcgagctgtcttgtccccctcttggcctcttctttccggcgatgggcgccggcgtcctcctcggcgacgccgccggcctgggggcccacctcgccgtacgccgccggaggacgcgcctctaccttcgcaactgggcctccaagcccctgcgcccctcggtctggctcggcgtggccgcctgtgtttcacagaatcgcgaccgccgtggccacgtgaccaggttctccgcctccgcctcgagcggcagtgacgagcccggggagctgtccgaggatgaggcgcagagggagtgggaagcggagctgaatcgccgactgaaggaggccgaggagatggaggagttggagcgcaccgccgagcagctgcaaagccaggccgccgccgaggcccccgaggagtcggaggaggagaagcgcgagcgtgtccgccgcgagctccagaaggtagcgaaggagcaagcggagaggagggagacggcgaagcaaatgtttgagttgggtcaaaaggcgtacgggaaaggaatgtatggacgatcaattgaattcttggaggctgcgctcactatcatacgtccctcctctctactcggtggcgaggtatctttgtgatgtagtctatggctaaaatcctgtagacatctttgtgatatatagcgtgtatcttcttctagatccaaatttggcttgcaatggcatatgaagccaataggaggcacaaggattgcattgcattgtacaaagagttggagagtagccaccccatgatcaacatcaggcgccaggcagctgagcttagatacattttagaggcacccaagttgaagatatcaaatgacgaggtggtcacaataccacaaattgggagcagctgggattggtatgctggaacatggagtgacaaaatcaaggaacaagaggacaagaaaaggaagatgagtgctgctagcaaccaagttcaaccttctccaaacatctttggagacctctctttcttgcgaccgccaaatgaatggaagaagagtgcatgggtggttgttaccttgtggatccttttgataggaacagcaatctatctgcaatcatgaatggctcctgcagctctgaaacaagccattcacatctctgcgaggcactggtccatggttcaacagaacccagagatgtcgctaatatggccgtgtctcagactgttgcatttgttgtttttttttgctgcagtgtaaatactaactactgtaactagcaatacaagcagatgccatctagttcaattgattagaaatcaatctgtctgctcatatacacttgatgatattgcatctggagttgatttgatattaccgtggtaggagtttattcta

SEQ ID NO: 36956 - DNA, 1746 bp, Zea Mays
gcagtcctgtggtcgcacggtccttcactcctgcgtcctgtgcctcggtgcctcccagacccaggcggccaggatcccagcctcccaggtccccggtggcggcagcagcctcccagtcccagatggccaccagttctaaaccctagccgccaaaccaacacgagcagctgtcgccctccaggccggccgagcggggcgccgggcaccgtcgcgccgagctgagcggagagtggagcacctgcaccgagcggccagcggtgcgccgacgcgccgtgcgccgagcacctgagtggccagcggggcgcccagcactcgtctagtcgtcttctctgcccatgaaaggagaacagcccaacttacctctcgcttcatgcgtgagcgtgacgttgacggcgtaggctagcgcctagcgctagacccgcccgcggcccgccgcaccctcgcagtcccgactcctgcacaacgacgctgtcgagcctgcctggcgagtgttgtccggcggccggcaacggggaagagagcgtccgacggcgacgcactcgagcggcacccctcccaactcgctccctcctcggcccctgcagccctgctccgtggcgcgcatcactgggcggctcgccgtacaatcagcgagcgggtggcggctacctccatactagcaagactcaatcggcgaaatcctgggcgtgcctgccaatgagcaagaagaggaagcatctggatccagcgaactcgttgaaagacagcgaacaagtagtcgcctcagatttcataagaggagacgatcttgatgacctattatcgaagcttatcaggagtgtggagattgccaaggcttcaaggggaggcttaccagaaaagatatggatgaagcaacaatttgctatcggcgtcaatgatgtcacaagggttcttgagcgaatgccgcattctgtcactgctcatcctgctcaaatgtctaatgaagcaccaactgtctcaggccgacgtcaagctcctttggtgccattgcaggctgtccttgtagctgccgactgcaatcccaaatggttaacaaaacacataccaacactagcgtctacaaggcaggtaccggtattgtgcgtgaaggacaacaagggaggctcagtaaggttaggccatgtggtgaatgtcagaacagcccttgccattggagtaaaggccaaagatagcgttctcaacaagaccattgatgagttcctgaaagacagtaaactggttgccaatgaaccataaagtaaccccaagtctagtgacacgtttgtactaaaaagcctgtacttccgggcatgcaacatcccaggatcatctcataaatgggtttaagtttgagaagggggtcaagtatcttgagcagattgtggcaatatcaatttggagggacttcttgagagaacagtcatgggaaataggacagactatttgtttggtccgtgcaatattgtttgactggtgaacctagttatccattgtgatctagaacttgtatcaaactccaatgtaacgagatgttaggatccttgtttattgggtacagttttttcttcttctcgaggctcgacaccggtacattaatttttcttgttttttatattctatagtatatataataatgtgaaaaggcttatattgtgatggttaagtctttcgagtagcatcgacgaatttttagcttgattaaaaaatcatctcgttatgccttgccagctcccggattatgtcctg

SEQ ID NO: 36957 - DNA, 5094 bp, Zea Mays
cactgcctcgcattttcccactcttccgcttccacgagcagatgccggcgaatggcaagctctcggcgaagccctccccctcgccgatggttgctcccgcctcgcgccccaaatttacagctgttacctttctcggtgactgcgacgacgacgatgacttccaacctcctcgcccccgccccttgaagccttgcattggcgccgccgcacttcggttccgtaagaagctcaaggctccatcctccgggaaggagaatagttccgccgccggtggtgccgttactgtggtgggggtcgcttcgacggccgtgaaggatgccgaaaccctagccgccggctctagggttagtggcgacgttcccaaaacgaagagacgaaagaccggtgaaagttgcggcctgtcgaggtacggatctgatagcactaaactaagctgtaaaccgaagatagaattggatagatacggatatggcaaagggtgctgcagtttcttgcccagtgcgatagactcgacggttttggcgctcggtgcggtatgtgattttggagttaggcgttgtgatgaggctcaaatagctgtctccaggcattgtacctcagttcttgaggcggggcacgccacagaagagctgacaccgacaggctctgggtgtgatccacccaaaacggagaagaagccgggcagttctgaagctgtggagggacatcacgactccaggttgattgaaccgaggcttgttgaatcagatgcaaacctcgagtttgtaactgggattcttggctcactgactgataaacaggacacgaagaaagcaaacggggtggtatttggatgtggtgttggatttcagaatgggaactatcacttggattctctacagccagagcttctaacgtcgaactcaaagtatgattctagagtttgtgttagcaatgaaatccaagagcctggtttgggagcctgtaacttgatttcacaggagaggaaagtagcagctggacattctgcatgtgcaacccctgaaaatgtgactgcagagaataaatcaagtgcacctgaggcttgtaaggggcaatgccactccgattcatctgcatcaaagcttccagaatcccatatgatccatgactttgaagttgatggttgcgataattttgagattgggacccagctcagtgagctcattaacttgtgtatgaaggattccatagagggacaatcaaactttggtgcagctcccatggaacagaacactttagactctaagagactcagttcagactatgaagcgaaatgccctctatgtggatcggatatttctgatttaagcgaggagctccggcagctgcatactaacaattgccttgacgaaccagctaaggaatctagtcccaaccataaaaaagagcccagtgttggacaaaatgttgaaactggacgtgttgtcgaatggttaagaaaccttgggttatccaagtatgaggaagtttttatcagagaagaagttgactgggaaaccttgcagtggctcactgaagaggacctgttgggtattgggatcagctctcttggaccaagaaagaaaattatccatgctctaggagagttactgaagaaacatgatgatcccagtgaaatggaagctgtgttaaattcaggaaatactaagaagactaaacttccgatgaatggtaataaattaattaccgaatactttcaatgttcctcatttgatcaaagacaaagaagggtatgcaaagcaaacaagccatctaatctgaacgagaagaaaatttctagtgctaaagtacccactagaagaactgctggtaaaggaaagattaaggatacgcctctttggtgttgcatcccagggaccccttttcgagtggatgcatttcgctacttgagaggtgattgttctcactggtttctcacacactttcatgtggatcattatcaaggcttgactagaagcttttgtcatgggaagatatactgttcgtcaattacagcgagtcttgtgcatcataagattggtatcccatgggatagattgcatgtattgaccctaaatgaaaagctcaatattgctggagttaatttgatatgttttgatgccaaccattgcccaggatcaatcattattctctttgagcctccaaatggtaaagctgttttgcacactggagatttccgtttttcttccaagatggccaacaatcctgttttgcagtcttcctgtgtccacactctaatacttgacacaacctattgcaatccacggtatgatttcccaagtcaagaaatcgtaatacagttcgtcattgaggccatccaagcagaagctttcaatccaaaaacattgtttttgattggaagctacacaattggaaaagaaagattgtttatggaggttgctcgtttgcttcagaagaaagtatatgttggagctgcaaagctgcaaatactgaaacatttagagcttcctcaggagattatgcactggtttacagccaatgaagcagaaagtcacatacatgttgtccccatgtggactctagcaagcttcaagcggatgaaatatctatcgaatcaatatgctggccggtatgaccttatagtggcgttttgtcctactggttgggcatttggcaaaggtaggaaaaagacaccaggcaaaaggtggcaacaaggatcaatcattagatatgaagtgccctacagtgaacacagcagtttcacggaactgcagcagtttgtcaagttcatatcaccagagcacataatccctagcgtaaacaacgacggccctgagagtgcaaacgctatgcttgcccagctgttaaacgagtagaggaattcgttcgtcgcttcaatatcttcggcttggctacagttttctcttcgaaaaccatttgatgaaagggatggacgctggacgagctaacttccaaggactaatacagtgatggcggaagcattcctgatggtgccacccagagttctgacgtggaaatccagagatacagggtgcatagatgcgcacgcagacacccgttggcgccgtggaggtgctggttgacaaatcgtcagccaagattctgtactggaatgggtaccggcgatagcgtgtattgccgaaaccatgtgaaccgtgatttgtgactgtcaagccaagcgagtgaacttgcatgtcattatgagcccatttgtacacgaacttgtccagggtttttctagtgatggtgaaaagtcctgccatgagtgtcacctttctttaaaaaaaaacgtcgatcaaactggcaaaatccgtaggagacccacttgtcagctaaccaccccttgcagtcatccgcaccagggcaccaccaccactccagatgttctagaactatcaggcggcttcctccccctaaccgcaacagttaaaacgccgtagcaactagcaacgctaccacagtgcgcgcttgaagatagtgtcatttgcagttcccggtagcagccatggcgtcggtgcagctgtctgggccgcgggtggtggcggctgcgaaaccggctgcgttgggcgggctcctcctgacgccgtcccttgcggtgccaaaggggcggagggccaggggcctcgtggtgagggccgccacggtcgtgtcacctaagtatacgtccataaaaccattgggagacagagtacttgtgaagatcaaaacctctgaggctaaatctgatggaggtattttacttccagtatcagttcagacaagaccacaaggaggggagattgttgcggttggagaagggagaagttttggaagtaaccgcattgagatcagtgttccggtatttacttttacacagctaactgagctaagtttattttgtataagcagacatgtctgtaattctatacttgtgtatttaaagttttaaacatttacgtcaacgaactaaaagtgctattgctgctgcactgccacccatgacaaaaaggtaagaaagtagctgtatgttttctatgctgagattttttctgtatccaaaatcttcttctaggtttgaacttctaattttggaagacaattttcctcatggccttgtcaccagacaccagtaacatgtttttttccgttgtaacacacttgtactgtcctaagccaattgagtaatttgacatcgaattataatcttgtacaggttggtgcacaagttgtctactcgaaatatgcaggcacagaattgaaattcaatgacgccgaccatctcattttgaaagaagatgacataattggtattcttgacagtgatgatgtgaaggatatgaaaccactgaatgatcgcattctgattaaggttgctgaagctgaagaacgaactgctggtggtttgctattgacgcaggcaactaaggagaaaccttctgttggatcagtggtagccgttggcccagggccgttgggcgaggacggcagcaggaatcccctgtcgatcactcctggaagcaacgtgatgtattccaagtatgcggggagtgagttcaagggcgaggacggtgagtacatcgtgctcagggcgtctgacgtgatggctgttctttcctgatccccaaaccatacagcgccaggtgcgcgataggaagttttgatgttgaggccgaaccttatcttttatttgctcttgtttggaattggtggaggcttttgaactgtaatctggtgcgaattataaggaaaataagccgagttgtgtagacttgagacaggactgtgctgtgctgtttggctggtaggtgagctaaccagtgttcagctggtgggtgagctgaccagcacgtcgggttcggctgttcttcctgatgtcagcgttgtacgccaaggttggccaacggcatcaatattactaatagcatctaggctaccgtttgagtttttcatggattaatgacaacacaagatgtgactattatatacttcctctgtttttttatttgtcatgttttagttcaaaaataaacctgttttagttcaaaaatgaactagcggacgacaaatattcaagaatagaagatagtattttgcaaagataactaggcttat

SEQ ID NO: 36958 - DNA, 1956 bp, Zea Mays
ctggctgctctcggaccttggacgacacgtcgacaccagtgcagcagccaccaaagatccggcccgcccgcgccgcacgagaccgccgcccgcgccgcacgagagtcatgacgacgccgcggcggcacgctgatccgtcgccctcgccctcgccctcttccccgccgcagcttctctcccgcctccgctccggggcctccagtttcctggcgcggcagtacagcacggggaagggaggcgataacaccggtccttcgaagccgaaaggtggtggctcctccgcgccaaggcacctcaggccaggattcgtggatccttcatcatggaaacattttgactcaagggctgttggcattaaaccgggtgctatacatacagatgcatgggcggttttaaaaaagctcagacgtgaaggttttcaagcttaccttgttggtggctgtgtgagagatttgctactcaaaagggtacctaaagattttgacgtgattaccactgcaagtctcgaacagcttaagaaaaatatattcaggagatctaggattgtaggcaaacgctttccaatatgtcttcttaaaatgcgtgactctgtaattgagatttcgagctttcgaacagttgctaattatgggaatagaagtgaagtggtagattatgtggcagagttgaatggctctgacgttagggatattcttcgctggaaggattctatgagaagagacttcacaataaatgggtgtgtacagtgattcctgctcacatttctttcatggaggaccctgcaaggattttacgtggcttcagaattgctgctcgccttggtttccagttttccagtgaaacttctaatgcgatacgtgatttttcttcatctataaataatatcgataaggcaaggctgatgatggaaatgaattatataatgtcttatggagcagcagcaccttctgttaggttgcttagaaaatatggactacttgatattttgctgcctttccagtcagcatatttgtctgagcagatgaaaggtggttcaagtgacagacatctgatgcttatgaaattactgtctaatcttgataggttactctctgcggaccgaccatgccatagctctttgtggctggcgttgttggcatttcacagtacattggttatatatccacaagacaccttggtaataagagcttttgctgcagtgttgtatttcggaacatgggaaacaacagtcaaatttctgagagaagaagttggagctgaagttccatttgccccagagacaatggggccttctcggaccaaactggattgtcttaaggaacaaacgtcacatctagcatcactagtcaattcttcagtagatatattgacatgtcctcatgatctggagcaatcgctagccagattctcggaacctctgcaattttcaggagtggtagtcgcatctaacaatgataggaaaaagttgtcggccgtatttgagggccttgcttctgacctacattcatatgatgggagaagagggatgcgtgggattgattactcgtcgctgaaacttggggatcttgccgaggtccgatttgttctcggtaaagtgatcatggacacaatgtacgacaagttaccatgcgaatctactgaggatgagggcgctgctgcagatgttgctggtggaagcctacctccattgtccgcattgttttaatcgtagtgaagcatagggttcactcaacaaactaggcagcccttttctggttttagtcagtgctgcaaagcaatcgagttgttcagaattttcttgtgttgcaagatgaccacaacgacaactgtagacgtatttcagaatttttatcaaggaactcgaatgtgcagttgtagctaaactcccatgaatcctttcggtgaacatagggcgtgcacttatcaatctctttgctagggaaaactttaggcctg

SEQ ID NO: 36959 - DNA, 3043 bp, Zea Mays
cgtctgcccaccgggctatatgcgcatgcggagtcactcacactgtccatgggcccacgtgtcagcctcacactaggctcgcccaggggcttctgtgtcacaggcatgtggacctcaacccttcttccacctcgcgttcattgcgacctggcgataagttcgcctaagaacgcgatcgcgtaaccactgcggtgcccagaccgcttcggttgaaggaatccctgccttggcttcgcactatatctctacaattccttaagagtataaggagggcgtccaccaccctcaccctggttccgccctccccccgccgctcgccgctaatctcgccgcgcacgccccctccctcgcgtccacagctagcttgccctcgccttcgctgaatccgcccctccccgcactcgcgcatggaaccacccagcctccgcccccgtccaccttggccccggcaccgtaggcggatctgtgcctttcctcgcccgcgtccacccccatcgcctcctcctacaccttctccgccatcggcatcatcgcctccgtcctcggccctccctgcacactgcaaccgcctcctgacgatgctcgcgtgggatggtgacggtgacgcggcgatccgtggcttgtgccccctccgccgcctccagcaccttctctgccatcggcatctccatccttggcgcggcatgttcgtggccgggcaattctcagggagggcctcggtgtctgtgtttggttatgctactcagagtgatttgaagttggccctaccctgctctttttaaggctgaaatgccctggtcagcctgaagaggaaatctctcagagaaacaaagagtcttcaaaatggtgaaaggtatactgaaataacttacacaggagaaatttgaggtaaagtattttagaaccggacaaccttcagtttcagtattcagagttagacaatcacacttttccaaaggtatccaatatacaaatgcattagcctatgtgcgagtaaatgatccagtatatatagtcagacacatgaaaaaagccactttaaaaatcataagatttagccttattataagatagtatggcttatctgcatcttccagtataaaaatcatgtcactttaaatcattgcattgcagttcattataggatacatttcatctagagccttattatggagacatgccactgctgaatgtttagcttcaagttgttctctagagccttatatggagactgactgtttggcctgcaaaacatttctctgcagttttaacaatatatttagcattcatggttagtgtacaaagttactactatacacttgtgaagtggaacttgatgatatcttcattttttgactttttgtgctttaggctcctcttcttggatcgactgcagcagttagatctgcacatgtatatctttgtttaattatcgtctccgtattgtaagattaatttgagcttccattctacttttgctccacatatgaaacattaaaagatactctaattatgctatttaactccaagggtggaggtggaatgggtgattataaccacctgcaggttgtgtacatatctttagtacatatccattatgctatttaactccgaaaggagacaatatgcatcagtttcaacaactttgttgtttccttttcatgctgtcttataggatggcattttctgctcaatttgtccgttgctgatttcagtcgggtaatgttctttctgcacaatgacttttgcttgcaaagtcgagtttggcattatgctttgtgtagatgtatctgagaattgcatgactgcatacccttaacatgaaatttcatttttagagattagattagattagatatgtcgctgatggaagtccaactaatagcgaactgaagaccgccgaccttgtgtctacacccgcacattctgttgcatctatacctccttctacaccagcacttcatgttgctcctgcacttttgtctacccctgtcagatgctcatctccatttatcacgccaccatattgttcctcagttgattgactggcatgagggtggatacttgactgttgatttaccaatgtctcggggagaagttgtcattgggggtccaaatgtttcgtcattcttgcctaccgctgtccctttgcttcagaatacggtgaaacagaagtccttcattggctcttctcatcttggctcacatgcagtacttgaataccagtttcttcctgagcagccaagtgatgcatatgagaggggaagccagttgcgcttctatgatgctctagcagaagtgttaaactcaagggtagattcgttttctataggatcacactttacccatgtagttgagcaggcacctagctatacatttcacagtcaatcatctggttctagctgtttgtcaaatattattgctagcatggctcaaatccaaatattattgctagcatggctcaaatccacggtcaaaaattggcatccctcaagttgtcagatttgaaagctccctcgcatcccctaaaagattgggttatcatgatgaagaacatgtcacgtggacagaaaaacacaagaactatatttatggatatactatttttttcttcttttgtattattatattcatatccttttttacctttatattattattttttatatatgttgtatttgtctaatattacttcatcataatgaggaagctaagattgctagggaggttgaggctcatgaaaagagaattaaaaaggagcttgagagttgagaagcaaggtctactaaatagaaagaaagaagaacaaatgtagagggaaatggagagacatgatcacgagagatgtaatgaagagaggttcatgcgtgaaaggcaaaggaaagaagaaaattccattagcaacagagacgtatacttataactattatggtagataaaaaatgttacaatgtctctcttctatagaacgaaactgggatatcattcattgatatatgttcgattttattcaataattattatataattgtgcaccgtcgca

SEQ ID NO: 36960 - DNA, 609 bp, Zea Mays
ctccatgatcgctactgccataactcgtttcgacatctccttcatcctcgtcgctgctgctcacctacccagtgggcccaggcgccaggccgcaccatgtctcacgcgcgtgctcgtcgcgcggacgcgcagcagcccatcagctgctccaagttctcctcttgtccaaaactgcttctctcgcgcagcagagcaaccgcgccaggcttcttctccaggtccgcgtgtgagaatcgcagcctctgttcatctcccaaatttcaaaccatctcctaccaacgtcgcgaagacctgggatccatggcgcccttgcagcagaccagccggtcttggcaccccaacccctgcggctcccctgccatccgtgtcccctgcgttctagggtggtcgtcccgcgttgttgccgtcgaggacctccatgatcgctactgccagaactcgtttcgacatctccttcatccttgtcgctgccgctcgcctgcccagcgggcccaggcgccaggccgcaccatgtctcacgcgcgtgcgcgtcgcgcggacgcagcagcccatcagtcgctccaagttccctcttctccaaaactgcttctctcgcgcagcagagcaacc

SEQ ID NO: 36961 - DNA, 308 bp, Zea Mays
cctgattgttgcatcatgtttgtcacctatacatccaaaatgcttcactcatccttattccagaaaccagtgattgtagataatctggtgtaatgttgaattatgaacttcgataaaatagctattcttcgatcattaggtattatgtttagatgctatatgtgtgctcttgtgcttaatatgtcggtagaaggttagtgacttgtttgcctaaacccaaatctaggccatgttcttagttggtgaaccatgaccaaagttgatttttccgttacccctccttgacccaaacttatacaaataaatgc

SEQ ID NO: 36962 - DNA, 2746 bp, Zea Mays
atatggcgcacggttctgccttgcacccgcgagaccctccactccgcgcagcaccagccgccatccccgcccgccatctgcgcgcgtctggcgtctccctcgcccccgctctcctctctgctgtccacgccctctgctcgcgtgtcttccagccacccgcgagcagagccttcgcccccggatcccacgcccgcgagcagagctgctgtccatgccgtcggatccgctcctccctcggaaggagaatctccaaatctcgccaccatccccgcctaccatctgcgcgcgttggccgtctaccggctacgcgcatgtgactgtcgttggatcccaggtctcgcccaattccaagcgcccccgcttcgagcgtcgcccccaacaagacgtccggatctgcgctagccctagctcgcgaggtcgacgccgatggatccaaggacaccagcgtcgcccctctccgagctcccccaatggccgccgcggggatgttctgctggtccacaccaatgttcgaagaagagggaaatcgagcgccagatggccacggccaagctattcgcggaggaacagctcgcagaggttgtcgccctcaagagaggcatcttcgtggggactggttgttttgctgagaaaaaaataccgatcatggaggtgtgtccacacatttcttggccttggaatctttctgagcctgctgacttgctctaggcatattgctactgaaattgcaaatggtcactgcctctattgtgtatcctttagttgatagatacatgttagacgttgcttaatatacctcgcgagattgattgagtttgcttgctgactacctatggttaattactagatacatggagccaaatgttatctgatataccagcttccatcgcttgggtttttcttgttggctacctgtaatgaatcagtggttagcaccttctgttggtttatccaaggtttttagttaagtgcagaaactacacttattttttcgctcaaacaagcatttataagctaccagctcctggcttccgcttcaaccatgcacatatctctgtccgcagaatttgactactcggttggcccaacaattgccagaggaaggatctcaatattcgatggtgtacagaagagtttaccggttgtttcacccatcttgttattcactatcttgatattcaccatcctgatcagaatgtggccaccaatggccaccatcgagtttttgacatcacacctggtaggcaggcactgacctctagacatgctgccttccacagttccactcatctttctaccatccttggttgcagtccttcctccccccagttcctagagcccagaggtttggcgctgcacatcactgttccttcttcagtccactcatgtagtcatgtccatggatgaggttttttcctcttgaattcagtgggacaaccgttatgttgtgtttcttggaaaaatgtctttcgttagtgttggtcttctaaataagcgtcacttcataccactttggatctgactacttatcacaagaatgatcaggtaagaaagtccagattcctctatcctttgtagtcttgcagatgcttattattctaactatattagtttatttaacctttgcaccagaaaatagcaatattcttggtcctcacttagatacatgtctgaaaactttggtattttctgaagagtggtctgaatcagcagtcttacttgtcctatcaggaatgaaagagcctggaccaacaactcttgctttagggattgatttgacctcattggggttgaatttgaactcccaagataatctttacaagacatttggctctccgtggtcaagtgagccagctgtaggagaacctgattatcagatcccagcttgtttctctgcaaagccaccaccagcactgcaaaagtttcaccctttgacactattctacatcttttacagcatgcctaaagatgccactcagttatatgctgctaatgaactgtaagcatagaaactgcacaatttgtagtatcactatttgtattcttgatgtatagcttgcagtcttgcactaatgcactctaccacagtttttaagtaaattgctgctccatgttttcagatacaataaagggtggttttaccacaaagactaccgtgtctggctaacaagagcgcctaattccgcacctcttgtgaaaactccacttcactcaaaacatctaccactaatgtgaaggccattttttgagcctgctggactggaccccgttgtgttcttccgatgatcaatcagtcaatcacaaattcaaaccatacaaatcaacagctcaatatctagcgtgcttttggaagtctgttcaaggggtggagtgaggagaagatatattttgctcccacatacaagtactcttgcaattcagattcttatgctggagagactgccacatcaaagaaaaagaggagaaccccagcctggtgtgaaagaatactatggcatggagatggcactacagcagtctgtgtccttaagcaaatcacaaaacactgcactagaccagtgaaccatacttgcatagctacggcccatggctaactactattattgttatgacatcaccggtgctggggcggggcccaaatcatcgattaaagcctaggtttttgtgtgacttgggaacacaatacctcggaacctttctaaaggacgctaagttatctgttcctcgaggaaatttcctgtgacca

SEQ ID NO: 36963 - DNA, 394 bp, Zea Mays
aggaaagctcgtgcaaaatcctacctgtcgtgggcgcgtgctcgcacagttcacggggttgctgtgaacaccatggctgcccttgccgcgatcgcctataaaaaggggcttgagctgccctcgacgccacgcatcttcccgagctgagccaccaccagtcctccgttcccgagctggttcgtcgccgccgtccgtcgtcctgctgttgcagcacctccggaggcaagccgagccgcagagccgatcccggaggacgaccagctagagcctgctgaccaggagcctgacgtcgaggaggagtacgtgagtgaagaggatcctgactttgtgcccgatgagtagcgcgttcctacacccaagtcccctgtggtgccattgtgttgtagcagacgcc

SEQ ID NO: 36964 - DNA, 721 bp, Zea Mays
gctcttccctcccaatgcaatgcaagctgtgcactttatgttgcgaagctagctatttatctccccggccccccccctgctcctctcttccacgggataacgggaggacgacatcacacagccatcgccggccggaagctctcagctctgagcagaaggaggcgggtcgtcacacggtcacacacccgtcagcatgagcgaccgcagggtactacaacaacggaccaccggtgatggcgccgccgccgtaccagtacgcagctcctccaccgccgaggagggagccgagcttccttgaaggatgtctcgccgctctgtgctgctgctgcctcatagacgagtgctgctgcgacccgtcggtgatattcgtgagctgatccggccgcagtccgcagcacatgccatgccaccgtcccagcccaagagacatgtcgcatgcatacgtgtgtgttcgcatgcacttcgcgcctctgttggtgatatatgatgtttttttcagcctatatgtgtctactacgttgaattagtacaagcggtgagttgtgcgttcagatctcggggttagagagtttgttggacatggcccgatccagaattccatatgctgatcatggatccggcgcatgtttactgcatatgcacttgtttaagcgcaacgcaacacgatgtatatgtgtgtacgaaatctttgaataaggcctcctttggttatatggactaa

SEQ ID NO: 36965 - DNA, 604 bp, Zea Mays
ctccaatctcgcctcactcctcctcccagaatctcaccttcccccgcgtgcaccgactgcttttctcccgcgtgcgctggctgcttttggccaccgatacgctgcgtcggcgctccaaagttccaggtcaggagaggctagagttccaaatcgtagttcgtgtgaaccagtgtgaaccagttgaatctcatcaatcttatcaagtcatctaataaaaaaaggtttcttcgtatttacccatacctctcatcacatgatcattttattactctgatgtatgtcctgtttattacaaaggaatagataaatattaggttcgacgcgtcttagagttctacgatgcatccaagaattcagagaacgttgacaaatatatagatcagctgaccaacaatgaattgtcatcaccacccaaaaagatgaagcacacccaggttaacaaagccattccagattctacatgttccaagaatgacaacagttagaccatcctgaaatacatcaaggttgggcggcttccgaagtcattcagacctgcgtccgagcctacatcatcatttggtttgaatcgcggaacgatgtcgttcgtcactgcgttgttcta

SEQ ID NO: 36966 - DNA, 1867 bp, Zea Mays
ctactttccccatccgacctgcacataagctgccgccaccgtgtctctcctcttcatccacctcgcgcggagttccgcagcggcgcagctcaaaattcctgccctctcgccatcaaatcatgcgaaggatttgctaaacaggccatccatgttttcgtcatctgtcagtgtcaggtacttgcaaattttctagaaaccttctttagagatccgactaatccattccgtcgatcgagtcccgtccgctccatatggaagaaggcggccgccatgaccatgacgcgggcgaccgcatcagcagcctacccgacgacctcctcttctcaatcctcctccgcatcggatccattcgcgccgccgcgcgcaccagcgtgctctcccgccgctggcgccacgtctgggcccgcctgcccgagctccgcctcggcacatgcgacgagcagccgggggcgacgttcctggacttcgtcgacgccgtcctcgacgcctgctccgccccggccgtccaccgccttgaggtggccatgtactgccatggccttcgagtccatgcgtgccgcctcgtcccgtggctacgcttcgcctcgcagcgccgggtgggggatatccatatccaagtgccatcccagaagaaattcttcttgtctaagcccatcaaagaggagctcgagcttcccgtgtgcgatggagcgacgagaatcaccctctcgctcgagcgacgatggagcctccgcctctgtccggcgggctcgttcatgtcgctgaccgacctgcacataagctgcgccaccatggcaggcagcgagcttggcaaccttgtgtccgagcagtgcccgctcctgaggaatctgtaccttttcgtcaggctggctgctgcttccaacgtgtccatacactccaactcgcttcagtccctctcattcaacgtccaaaacacccagaagctagaagtcatggcccctaagcttgaagtgctggccgtatgtgatgccactaaggcacatatctctgccccaaagctctccgtggtaagttgggacaatgacactggctacaaccctctgtgccaccactttgccaatgctgcccgtcacctccgcctgctacacttgggctcaaagtgtgtatccgcttccctgatgcgtcaattcgatgaagttgatgtgctgaagctgaagctgaacctcctcaatattaagggaacagaggcatacacaaatttattgaatgaaacggctgcactacccaagtgtgaggaattaaagttacgagtgtcattaagggcttcccaacacaactttgcatcaatcatgtttcatatcttaaggagctgcaacaatacaaggaggatttcgataaagatcgattctagcatgattttcaaggctgatggcattattctcgagtcccttgaagaggtgaaaattacttttattagacattgctatggacaagtgcagttcgtggaggagtttgccaggtgccatgcaccaagcctgaaaaagttagtcgtcaactcaccaaccaaagggctacaagagatggtcggcggattgtttgatccggatgtcactgtcaaatgcaatgttatctagcgccagaggggtgtgtctttgaaaaagataaatctatatttgaaatttaccataaaccagctccaccagggaattcaggatctactagtgaactatttagatacacaatagctttaaatccataaaatataataggttttggttggaatgccttgttttgctattgaggtgaatatttgtcaccggctagttcatttttgaactacacgtcgacaaataaaaatgacaaagggagtgtatctttttttttccacatactacacgtgtgtcct

SEQ ID NO: 36967 - DNA, 268 bp, Zea Mays
ctgaagcaaatataaaagtctttcttctggaacaaaatttaaatttattaccttgttcctaagaagaacttgctgcagtgttcttctacaaagcctaaccctctaaacaacacaataaagataattaaaacaaaaagggtacctgtattgttctagcaaagacctcaaatatctgaactctacagtggtaccacgtgcagaagagttacaggaggagtattgctccacaaataaccaggccttggtttcctctgtgcaaatagagcag

SEQ ID NO: 36968 - DNA, 3197 bp, Zea Mays
cccacccccaataaaagcgcccacaccctcctgcacctcccttcctcaacctccgccatcaccgacgctgactcccacaccggccgccgcgcgagccccggcaccatctccgcacggcctccctcgacgtcgccggcgcgggggtggatctccgacctgaactttctctgattcctgattctattgagcagaaatgggggatgcgtgtttctcaacacagctaattgatggagatggggtcttcaacgtctctggattggagaacttcatgaaggatgccagattgggtgaatgcgggctctcctatgctgttgtatcaataatgggcccgcaaagtagtgggaaaagtacacttttgaatcatctttttggcaccaattttagggagatggacgccttcagaggaaggtcacagactaccaaaggtatatggttagcgaaggcccagaatattgaaccgtgcacccttgtaatggatttggaaggaactgatggaagggagaggggagaggatgacacagcatttgagaagcaaagtgcattgtttgctttggccgtttcagacattgtgttgattaatatgtggtgtcatgacattggtagagaacaggctgcaaacaagcctcttttgaagactgttttccaggtcatgatgaggttgttcagtcctcgtaaaacaacattgttgtttgtcattcgtgacaaatcaaggacacccctagaaaatcttgaaccaattttaagggaagacattcagaagatatgggatgctgttccaaaaccccatgcccataaagaaactccacttagcgaatttttcgatgtacaagttgtggcactgtccagttatgaagaaaaagaagagttgttcaaacagcaggtttctgatttaagagataggtttcagtattctatcgctcctggtggacttgctggggatcgtcgtggtgtcgtcccagcttcaggattctcgtttagttcccagcaattttggaaagtcattaaggagaacaaagaccttgatctgcctgctcataaagttatggttgctactgtacgttgtgaggaaattggtaatgagaaagtcggcagttttacatctgatgaggaatggcaacaattagaggaggctgttcaacatgactttgttcctggatttgggaagaagatcagcagccttcttgatagatgtttatcagagtatgacatggaggctatttattttgatgaaggtgtcagaagctctaaacggcaacagcttgagtctaaactcctacagcttgtcaatcctgcctatcaatctcttctaggtcacttgcgtactagaactttagaagcatttaatgagtcctttgacaaggctctagaaaaggagggatttgctgcagccgctcgcaattgtactcaaactttcttggagaagtttgataaaggatctgaagatgctgctattcaacaagtgaattgggacacctcaaaagtgaaggataagcttagacgtgacattgaggctcatgtagcttcagttcgagctgctaaattatctgaactttgtgccaaatatgaggcacaacttaccaaagctctggcggaaccagttgaatctcttctagattcagccagtgaagatacgtggccagctattagaaagcttcttcaacgcgagacaaaaactgccgtttcaggtcttcaatctgctgtgtcagcttttgaacttgatgaagcaactgagaaagaactgcttgtgaagctggagaagcatggaaggagtgttgttgagtcaaaggcaaaagaagaagctggaagggttttgattcgcatgaaggacaggttttcaatgctgttcagccgagatgctgactctatgcccagggtgtggacaggaaaggaggacataaaagctataactaaaaccgctcgctcagcttccatgaagttgctttctacaatggctgcaattcggttggaggaggatggtgataacattgagaacactctttccgttgctcttgttgacacctcaaaacctgggactactgataggagtatccaattgaccgatccacttgcctccagttcatgggaaagggttggcgaggagaagactttaattacccctgtgcagtgcaaaaatttgtggaggcaattcaaggctgaaactgaatatacagtgactcaagccttagctgctcaggaagcaaataagaggaacaacaactggctaccacctccatgggcacttgctgcaatggctattcttggattcaacgagttcatgacattactgaggaacccgctttacctgtttgccatatttgtgatttatctcgttggaaaagccatttgggtgcaatcagaaatcggcagggaattccaacacggatttcttcctgccatcctttcactgtcgacgaagtttgtgcccactgtaatgaacatcctgaagagattagccgacgagggtcaagcacctgcagccgccccagagaggcagagagagatggagctccaaccaaaacccaccaggaacggttcttcatacaccaacgcgacgtcggcggggtcatccagcgtaaccacttcggagatcggacctgagtattcgagcccggtggcgcaatgatttagctgacctttagcctttggctggaagcccactctagcgcagttgagggaaacagggtgcctctcgagaacataggaacttaggaagattttaaggacagtcaggtgccttgcagttttttctaagcctgcccttcccccaaactgatgcaaggtggtgatggggtggcactgcccatcactattatttaaggatttttgggggctgggggggttgtttgtaagagcattgtagaatgatttcgtttaatttttttggtttctgtaacatgaatacatgatatgtgatggttgtatagaagatctggggggcgtagtagtgcccattctacacagcttatactgggcagggggttgcatagttgccagaagcttgtacatgtctttaaaccgccatcggattgcgatggagtagtattactggtgttctggaataacacggaggaacgtgttgtgacttggcaggccgttggtaactggctgttctcattcggtagttttgacgcgtgcctcgaaccgattcatatttgagccccatctggcgcagattggcagcgtttttaagaggcaga

SEQ ID NO: 36969 - DNA, 2991 bp, Zea Mays
ctgacagctcagaagtgcatgatgcggcttctccagcggtggcgacgtcgaccttgacctcaatgccggcatgtggtctcctcaagcaagctttgaggaggtggatgtggcatggcggcactatgagcaggccggtactggattagctgctatattcataaacctggctgttgagaacttctctggatggaaatatactgcgacatttgctataataaagcactcgtattttgtgggattctttgtgtacacagttttcaatttagccctggtcttctcttctgtatatatagtcacaaactttgctccagcagctgctggatctggtattccagagatcaaaggttacttaaatggagtggatacacatggaatcctccttttcaggacattagttgggaagatctttgggagcattggatcagttggaggtggattggctctagggaaagaagggcctcttgttcatactggggcctgcattgcttcgcttcttggacaaggtggatctgcaaagtaccacttgagttctaggtgggtacggatttttgaaagcgatcgtgataggcgagaccttcttatttttgtttttgaggtttcacaacttgaaattctctggccaagtcatgaagctattgttaaagtaaaccctcaagaaaaggctgttaagataaagcagattgttggcagggaatcatgttgccaaacaagtctttattcattttttttcttaaacttgtttttagataaacatgctctatcagactctttaatttctggaaccaaggaaaaaaaggaaagtattatggaaagaatacatatatacattgtcgaatgcattctggacttttttttaagaatgaaagggttataatattgaagctctcaaaactattaatgtttcaaaaggtgacatgtggatgtgcagctggagttgctgctgccttcagagctcctgttggtggggtactatttgccttggaggaagttacttcctggtggagaagtcatcttatgtggagagtattcttcacatctgccgtggtggccgttgtggtgcgttcagccatgaattggtgcaacagtggaaaatgcggtcattttggagctggaggttttataatatgggacatatctggaggtcaagaagattactcataccaggaattgtttcctatggcaattattggtgttatcggtggacttcttggggcattatttaatcaactcaccctctatataactaaatggcggcgaacgtgtcttcataagaaagggaaacgagtccaaatctttgaagcctgtcttatatctttggtaacatccacgatttcctttgtgttgccactactgaggaaatgcagcccatgccctaagttagaaactaattctggcatagaatgccctcatccacctggcacagatgggaattttgttaacttctattgttcacaagatagagagtacaatgatttagcaaccattttcttcaatactcaggatgatgcaatacgtaatcttttcagtgcaaaaacatttcatgaatacagtgcacaaagcctctgcagttccggctggccagttcgttcccggaataatgattggatctacatatggaaggcttgttggaatgtttgttgtcaagttctataagaaactaaacattgaggagggcacgtatgcactccttggtgctgcatcgtttcttggaggttcaatgagaatgactgtatctttatgtgttatcatggttgagattacaaacaacttgaaactcttgccattgatcatgcttgttcttctggtttctaaggcggttggtgacttttttaatgaagggttatatgaagagcaagcccgattaaggggcatccctttactggattccaggcctaagcaagtcatgagaaatatgaatgcaagggatgcgtgcaagaatcaaaaggttgtctgcctaccacgtgtttcaagggttgttgatatcatttctgttttgcgaactaacaagcataatggtttccctgttgttgaccgtgggcagaatggcgagtcacttgtcataggtctcatacttcgtagccacttattggtacttctacaagctaaagtagatttccagaacagtgctttcccctgtgggccaggcgtactgaacaggcacaattttagtgactttgttaaaccagcatcaagtaaaggaaagtcaattgatgatattcatttgacagaggatgaactggggttgtatttggatcttgccccatttttaaatccttcaccatacatagtgccagaggacatgtcgttggcgaaggtgtacaatctcttccgtcaacttggattgagacatatatttgttgttcctaggccttctcgtgttgtaggattgataaccagaaaagatttattacttgaggaggataacaacaatgtgatgccggagctccaatcgacgagtgggcttgctgaacggcaaaatgctcgggggtaatatacatctggaacgtcctcttcttgacaacctagttattgaatagacacgtagcagcatgtatgtcaaaataattttgatagctagcagttaaccttgcactgcatgttgggacatggcccatgggtattatacttcacatgaatgatgaagcagcagtgagcggataatgcagcatggttttggattctgccgactgttgcgcatggatgttggcgttgcgcatcattttttgctccgtcagcagtggctagggaggcgattccccggtgccgtgtgtttagattaggtgattgtaacttacaaaggcgtccatacatacacaccatccatgtatcccacggtaaatttcgaagactgtatgtataagtacatatttgttatacgatggtaaagacaaaagctatgtaggatttgcgtgctctcatgaaactatgatacgtggctataattacttccggttcccgctgaaatcgctagaattttccattgactacatt

SEQ ID NO: 36970 - DNA, 1854 bp, Zea Mays
cgccacgccaccttccgtccacgcccacaagtccactcgccacctaccatggctgccggcctgctaacgcgtttcacccaaactcctcccctcttctctctctgcccctggtatgttaagcaattgatgattactaatccactctaacataaactaatcccacgataattacgtcccggcggatatcacccacatctcctgttgctactggagctcgactcatctcgtcctccgtcgcgagacaagaaagtagtaggaagggaggaagatagaggggttgcgtcccagccccacctgctatctcctctcttcttccccttcctcggcggctttccaccattcaggttcagactggaggggccttcctgccaatctccagtgcgtgttcttcagtggaggcgccggccggactcgcgatggagcgggacggccagcagacccgccgcgacaagctcatcatcgatacggatcccggcatcgatgatagcatggctatcctaatggcgttcagagcacatactctggaaatcattgggctcacgaccatattcggcaacgtcgacacagaaggcgcaacattgtgagagagcaggacatcctgaggttccagtagcagagggcagccacgagcccctaaagggaggaaagccccgtattgctgattttgttcatgggtcagatggcattgggaatctgtttcttcctgcaccctctgctaagaaggttgaggaaagtgctgctgatttcatggttaataaggtctctgagtttccaggagaggtctctgtgcttgctttgggacccctgacaaatgtagcattggccatcaaacgagacccttcctttgcaagcaaggtgaataaaatagttgtactgggtggagctttcttcgtggctggaaatgtcaaccctgctgctgaagcaaatattcttggagacccagaagcagctgacatagtttttacttcaggagcagatgtcattgtggttggcattaacataacaacacaagtctgtttgacagatgagggtctcttggagctaagaaactcaaaagggaagcatgcaccgttcttatctgagacgtgcaagttctacagagattggcatgtcaagtctgatggcttccatggaattttccttcatgatcctgtgagcttcactgccgtgcttcatcccgagtacttcacattcaagaagggtgtggtgagagtggagacccagggcatttgcactggccacactttgatggatcagggattgaaaaagtggaattcagagaacccttggtcagggtataaaccgatttcagttgcatggacggttgatgtgccaaaggttattggctttgtaaagaagctgctcatggcaccatgagcaaggtaccgccatttagcgacatcaatgctctctgatgcccaagaaaatttggcaagtacagagccactctcccagctgcattatacttatttcctggacctggaaagcttcctgttcctccaatagtaagaggatcaccatggttcttttagttgaggtcttaatgatttagatcgacttctatactgcgactaaaaatatcgatatcacaagagtggataaccgtgtctaagccatttcgtccttcaaatctgggagtcaaattgtgaaagcttatgcagcagtctcaaataccatgatgtaaattctggcgtatgacagcatgtctcacacatttgtatcaatacatttcgaatcaatgagatttcccataccctcagtgcatgcaaagatcgtaatcttgttttaatgtgcctctcgtgtaaagcaaagtgccaagaaaaggcacatgataatttgcgttagaaaataaac

SEQ ID NO: 36971 - DNA, 1496 bp, Zea Mays
ccggcagaaagcagaagttttaaagacaccggggcctgcgtctgcgtctgcttggccccccccggtaacagcagttatcatccccatctcccgccgtcccgcgtgctgatacttgcttgcattgcctgccgtttcccccgagccaacgacgacgttcgacggccgtagccaagaaggtatctcgcccaaacaaaggccgtcaagccaccatggccgtgtccggcgagaagccgccaccgccaccgccaccggccacggcgtccggcggaacggcaaggaagctcatcctagcgctgcttacatgtctgtcgtcggcgctgctgtacaggcagattcagccgctaccgcccaagatccccggcacgccgggcggcccgccggtgacggcgaccaggacgaggctcagcgacggcaggtacctggcctatctggaaaccggcgtcccgagggagaaggccaagcacaggctcgtctttgtccatgggagcttgcgcaagagctgggcgtttacatgttgtccttcgatcgccccgggtacgccgagagcgacccgcacccggccaggaccgaggagagcatcgccctcgacatcgccgagctcgccgacaacctgcagctgggtcgcaagttctaccttgctggcttctccatgggcggcgagatcatgtggagctgcctcaagtacatcccacacaggctctccggcgtggccattctcggccccgtaggcaactactggtggcccggcttgccgtcgaacgtgtcgcgggacgcctggtaccagcagctccctcgggaccagtgggcggtctgggtcgcgcatcacctgccgtggctcacctactggtggaacacccagaagctcttcccggcctccagcgtcatcgcctacaaccctgccctcctgtcccaagaggacgagatgctcatggccaagtttggctatagagcctacatgccgcagatcaggcaacagggggagcacgagtgcctgcaccgggacatgatggtcgggttcggcaagtggagctggagcccgctgcagctggagaacccgttcgccgacgccgacgccgacgatggccagggggcggggaaggtgcacctgtggcacggcgccgaggacctcatcgtgccggtcagcctgtccaggtacatcagccagaagctgccgtgggtcgtctaccacgagctccccaagtcgggacatctcttcccgatcgccgaggggatggctgacatcattgtcaagtccctgctgctcggagacgatcatctgtcgtcgtcggcctcacagcctcctcattctccatgaatccaggtcgtcacgtgtagtccgttcgcatttcgttgcccgtctctcactgtttctgtaaagggaccgatgctgcaggattctctagcgttgtagctaggatgctctgtttttttaaataatggaactaagttttagcctatatatatatatcatctgagaatgttacataatgttggtc

SEQ ID NO: 36972 - DNA, 1863 bp, Zea Mays
cagacactctagacgacgattgacgaggcagccataggtgttgttgttgtcccggcggcgcctgcagtgccgtattcgtataagagaagagacccccaccggctgctccacccaacgtaacagagaatcgccgcccgccaggccaggcgatagctagcgcgcggcggccatcgccaacgcccggcccggccccgggcagctcggctcctcacgcgcgcgtttgcagcgtgatcgtcgagcgccgccacgtcgaacgaagcttagctagctagctcaccggcaggagcggagctacccctcgagtactcgcgcgcgcatgggaaacgccctcgggtgcgcggggctcggcgagcggctggcggccggcgccagggacggcgacgcggcggaggtgcggcggctgctggacgccaacccggggctcgcccgctgcgccgccttcggcagcctcagctcgccgctccacctcgccgccgccaaaggccaccacgagatcgctgcgttgctgctggagaacggagcggacgtgaacggcaggaacatctacggccagacggcgctgatgcaggcgtgccggttcggccactgggaggtggttcagacgctgctgctgttcagatgcaacgtgtccaaggcggacagcctgagcggcaggacggcgctgcacgtggcggcggcgggcggccacgtcaggtgcgcgcgcctgctgctcgcgggcgccggcagcggcaggagcaagctcgtgaaccgggcggccagcggcggcggcggcggcgtgacggcgctgcacctggcggcgctgcacgggcacgccgactgcgtgcacctgctggtggacgagcgcgccgacgtcgccgcgcgcacgctgccctgcgccgcgccgcccatggcgtccgtcggcgccgggagcgcgccgctgcactacgcggccgccggcggcgaggtcaagtgctgccagatcctcgtgtcgcgcggggcggacagggccgccgtcaactgcaacgggtggctcccggtggacgtggccaggacgtgggggtgccactggctggagcacgtcctgtcgcccaagtctctgctgcccatccccaggttcccgccctccgcatacctctcgtcgccgctcgccagcgtcatcaccctcgcgagggattgcggcctggctctgaacatgtcgtcgctgccaatggacaccatggacggcggcgccgacgacggcgacgcatgcgcagtctgcctcgaaagaccctgcaacgtcgctgccgaagtgtgcgggcacgagctgtgcgtcaagtgcgcgctggacctgtgctcggtgatcaggtcctacgacgcgccggggatcgccggcaccatcccgtgcccgctctgccggagcggcatcgcctcgttcaggagacgggccgcggcggccgaggccgagcctggcgccaatgccggcgaccggcaggcgtcgtccagcccacacaagaagcggagcacggagtccgaccaggacggcctccccctcgtctgcgctcctcccgccgtcatgtcgtcctgatcagcgctgcagacatagaaatagaagctgctgtgctgcatcgtctcttcgtcggtagaaatctgcagggtacagcagcagcatgggtggatcacaggatgcatagaagctagacagacagattgtttggttctgtttgctgatgctcgccttcggcatcggtggattttattttattttcattttattttttatggtgattcacatggcattagctagtctgctagtgtaacacgttgatttgctgtagaaaaagatggaacattcttttgctgtaaaaaaaatggggttggttggtttcgggcgttttgactcatgat

SEQ ID NO: 36973 - DNA, 2898 bp, Zea Mays
cctcccagtcaccgcaggttgaccaccgaacagcgcggttggattacgcggtcccaagacccaagctttctgtctggctttctgtctggggtcggcccgcttcgctccatgggctcatttgagcagcggagccctttttaggtctatccagtatcgacgcccttctaaaaaacctaactccctctctccttgaattcactgcggccgaagtcgctgccctgccgactcccgaccgactctccacctcagccctcagggccgccggctccttcctccggtcctcccctctcctccgcctcgacaagcgtcggcgagatggtgaagaggagcaagaagagcaagagcaagcgagtcacgctgcggcagaagcacaaggtgcagcgcaaggtgaaggagcaccaccgcaagaagcgcaaggaggccaagaaggcgggcaaggccggccagcggaggaaggtcgagaaggaccccgggatccccaacgagtggcccttcaaggagcaggagctcaaggcgctcgaggcccgacgcgcgcaggcgctccaggagctcgagctcaagaagcaggcgcgcaaggagagggctcagaagaggaaggcaggattgcttgaggacgaggacattgctagtttggcatctgcagcttccgcacagggcagtgagtttgcagcaaaggagaatgctcctttattagtggcaaagatcaacggttcttgatgcaagggatccgctgggcacccgttgcattgacatggaaaagatggttaggaaggctgatccaagtaaacggattgtactacttctcaacaagatagatcttgttcccaaggaggcggcagagaaatggcttacatatctaagagaagaattgccaacagttgcttttaagtgcaatacccaggagcagaggaccaagctgggatggaaatcttcaaaattagataaaacaagcaacatcccacaaagcagtgattgtcttggtgccgagaatctaatcaaattgcttaagaattattccagaagccatgagctgaaactggcaattacggtgggtattgttggacttcctaatgttggcaagagcagtctgatcaacagcctgaagaggtcccgagtggtcaatgtcggttctactccagggattactagatcaatgcaagaagttcaattagacaagaaggtaaagttgttggattgtcctggtgttgttatgctcaaatcttccaacagtggtgtgtctgtagcccttcgaaactgcaaaaaggttgagaaaatagaagatccagtcgctcctgttaaggagatcctaagtatttgcccacatgagaagttgctgtctctatacaaggttccaaactttggttcagttgatgatttccttcagaaagtagcaactgtacgtgggaaattgaaaaagggtggtgtagtggatgttgaagctgcagcgagaattgtgcttcatgactggaatgaaggtaaaataccatattttacactgccgcctaaaagagatgctggggaggactcagatgcagtgattatatccgaggatgggaaagaatttaatatcgatgatatttacaaagctgaatcttcatatattggtggtttgaagtccattgaggagttccatcatattgagattcctcctaatgctccaccggcgatcgatgaagagatgctagaggatggtggcaagaaaccaagcgaagccatccaggaaagccgggacagggaggagcaaatgcccgacgtgaaggactcaggaggaagcaaggcagccagcgccagcacgcagaacgacaagttgtacaccgccgagggcgtactcgaccctcgcaagagcaaagcagagaagaaacggcgcaaggcgagcaggcccagcgcgctgaacgacatggacgcggactacgatttcaaggtggattatcggatggaggacggtgggagcgagggtgcacacgcggatgatgaagatggcggagatggatccgaggataatgaaccaatgaccggtgtcgatgatgcatgaattgtcatgtcgagtgccactttgccagaaatgatttgtcccaatgggggttgggaaattaacccacgacagttttgtgcttagtttgtttcttcaatgaaagatgacagttgcgttttacctgtcacagtacctacttttcgttgcaatcttcagaacaacctgatggaagagtacagaccacacaactaagtcttcggttattcacgtagactttgttcatttattactataccatatacattaaaaaatgagactaaataaaccacctcgacatggaaaaattacaactctggtgcgttcagtggtgcacgcaaatttttaatcggaacttccattgagaaccgaataatgcaggtgtctcgtgatgcttttgttctcagggattaatgtttaccgttcgggctagtttggaaactcaaatccccttcgagattagagaggaaattagttcatttccacatcaatcccatccaattctaaaaggatccttcaggtatttcgaaatgccattatgtaattgattgaaaagtactacaattcttgttaccgtgcgtacatttcagattgcaagcaccaagcattccaccacttggctgaacaacaaatcaatgcaaagtgatcaatcaccatgtcgcgaaaaggaaccatcagacagcataacaaacgaacacaaaaccagttaaccgataccggtctgtttcatataacttgtacgcttcaccacagtttcactcagcaaatggacgcggaacgccagaactctctacgctatctgcgtctgggatagcaagtaggatgaaggccaaagggattaaatggcaggcccatatactgcggtgacatgaactgtggtacgaatggac

SEQ ID NO: 36974 - DNA, 3523 bp, Zea Mays
caaccgcccccgcctgtctcccgcaatcgtcgctctctcccgcaatccgcgtccagatcccgcgtccgtgacatcctccgccctggatcgccgcgctaggctctctccgcgtccgccctctccatggagttgtgcccccgtgtgccctcgcgcgagcgacctctcccctggtgcaccatgccccgcccgccctgctctccgtcgcgcccttccagggatcctccatcgccgctcccgccatcatcgcgcccgcgctccatcgatggaaggtgtcgccccgccatcctcgcctcgctccccgcgacacgcggcgccagcttgtgtcgcatcttctatctattcaccagcaaggtacctggcacagaacccagccgaatcctagaacccagccggatcctagaaatttcccattggcatctggtgaccgtatccggtggttgggcgtcagacgcagcggggcggtaccggtgcttggagttggaccacccgtgcaaggcaccgtggtgcgacgggccgctcggcgcgctggagagcaacgggtgggtgtactcggcgcactgctccttcaagctctttgtggccgatgcgtcgtggtggtgccttgacgggaagtggctcttcttctggggcgactctaaccacgtcgacaccatccggaacctcctcaccttcgtcctcggcatcacggacacgtctgctgtgacacgccagtttgatgcagtgttcaccaatcccattggtggggcagggactctaaggatcacaagcatcttcaacggccactggaacatgagcatgaactatctcggcttgcattccctccggaacagaggtttccggcagctcatccggtcctacttcatgtccggtgatcgtgttccagacgtcatggtcctgaactctcgcctgcacgatggctgctactggaccagcgtccgcatctacgcgcaggctgcggatttcgcagcacagttctggtccggagtcatggacaaagtccgggctcgtgggcatgcagtgcccagggtgttctaccggacgcagatgcctcagggtggtatagatgcagggaaaaaccacgcgactcccttcacggaattgagagatgaagctggtgtcacatactcacatccgcagggatgggtcacgttgcagacacttcctaatgaagtccttgtagtgctgcgaaaggtaatcagattttgttagtagacaacacaaggaaggaagcacaaggaagtttaacctgtatagcacaaggaagcaagcagctcagcctccattttatttggaaaagtcttatacttatcagaagtaagtttttgatcctctattttattacagattttgtgattccagatctgttgacctcaaggcagattggaaacaaccttattgttgttttgttgaccaactctagaaagaaaagctaaaactctaccctctgcgcccaccttcaagggtcgctccctatcttccttcactctccatcaaagctttgctcgcatcaaattaaatttcttttcgttacgaatttagcttcattatataatattttgctcagtgaattgatcaagtttggtgcacgagtgtcatgctcctaggttttgtactaattgaagaagtagcaaatgtagttcgtggtggtggtttaagtcatgtctgatgaaattgatgcttatatagaggggttctttgtgctttcgaaagaattctgcaggaaaatcgactgcatttgttgttcttgggtacacaatgaaagatgggaaggcatattttcccccacatgacagtatctatacatattgcagttgaaatggaaataattgaaatacaaggtatgtgcaggtgcagtctattatattggagttaagagagcgctagcttgcagtcacactcgatgaagtcctatagggctagattttaaaagtaagatccagtacaaggttacttcaattgcaattagcgattagccaaaactttcatcttcggtctcactaggcctcactaggcctttcatcttcaaaagaatttataaagatattatttttcagtctatctctacatccctctctccatcttgttatgcaattatgagttcattagatgtcattgatctaaattaatttctatccattatgaacttatttttaatgaaccatgctccttcttcgttgctcacaacagggtccatgtacttggcacatgatatacatatacgagatggacttaaaaattaacaaaggtcttcttttggtggtagataattttggttttcttatgattctctttatgaagtgggtgtggtacctctaaacaaatagatgatctgttgacttatggcagtcaggcattacatttttttgcatgaaatcgacatctgagaagtgataattttgttttgatcgcttctctattgcaagatttagatggctactatcctttgcaattgatcaagaatggtgagctattctaaggaagcttctgaacaatatacctgttgtcctggagtgtcacagatggcaaagatttgcgcttagagaaggaggaagaacggtcggtgctagagtcatctccaaagttcttagctgatcagtttccactttcttctctgtagtctggttgcaactgttgatggttagcacattctttatcttcaattattggaagaaacatttttgcgccaattacatgaaagtggttgcagttttaagggtctgttcaatccctctccaagatattgtaggtgtatgaaatcttctaagcaaactgttaaatacattgcacccgatcaggtatataagcaaagactatattctctcattactagacaaaaaaaatgaaaggaagcagttgtaacatatttttgtatgatgcagaagggatgctctataatgcagcctggtaaacctccctcctgggcccagctgtcctctgctttcagtgtgaaactactgatttggggtgtgatctccgtacatcgtgctccagccgcactcagatctagccttggccgggagacaccgcgacagaggctggacgtgctcttcccgtcctcatgccccatgccgctgcgcgctcttcccttcacctctcactacacggcggctgcggggcaggggtgaaagaggcgaggcttctccagcttctcgaggccggagaccgtttgctcaagggtgtcgttcttgacggcctcctccgacagcgtggacgcgtggttctcaacctatattattgttgtattacattggacacatagggaagggaaaaaatccggtgaattatagggtgtgatctgtctgcctatacttgtggtggcattcatttgtgcaaatgattttgatatattgatgtagagaatatatatgttgtttatttctatgtaatcgttgcacactataattttatcaaacaacttttgtattgttgcaaggggcgacaaaaatccagtggattgtagtgtgtgatttgtctatctataactgtggtggtattcatttgtgcaaatgatttgttgtatatt

SEQ ID NO: 36975 - DNA, 3646 bp, Zea Mays
ggatagctgactgcaggagaccaaagctactgaggcccaaattaactagtgcgtggtctggtctccatctcgatcagagagctccgtccgtcactttcccctcgttccattcatggagaatatgctccacctagccccgtcgtcccaggcccaggcattggccttggaccgctcctccgtcttctcgcgtgagcacgtgccgccggccgtctccgctgtcacctccctgccagttatcgacatgtctcgcagccgcgacgaggtccgccgcgctatcctcgacgccggcatggagttcggcttcttcctggtggtggagcacggcatcccagaggaggtgatgcgcgacatgctggaggtgtgcgaggagttcttccagctgccggcggcgagcaaggcgtacatgtactcggaggacagtcagagacccaaccggatcttctccggcacaacctacgacacgggcggcgacaagtactggcgggactgcctccgcctcgcctgcccctcgtccttcccggtcggcagcggcacaagggacgactggccgcacacgccccagcggctgaggggtgtcgtggagcgtttcaccgctctgacgagagggctgggggtggagctgctgcggctgctgtccgaggccatggggatccggcccgactacttcgagggcgacatcagcgccggcgacgtggtcctcaacgtcaaccactaccctccgtgccccagcccggagaagacgctcggcctgccgccacattgcgaccgcaacctcatcaccctcctcctccaaggctccgtctatggcctcgacgtcgcctacaggggagagtggataaaggtcgagcccatgcccggtgccttggtcgtcaacttcggccagcaactcgaggtggtgaccaacggattgctgaagagcgttgagcaccgcgtggtgaccagctcgacgctggcgcggacggcggtggccacattcatcatgcccaccccagactgcctcatcggcccgtcaaaggagttcctcgccggggacaagccaccgtgctaccgcaccatcaggttcggtgacttcatgcgcatgtacaacactgtcaagctggggtcatccatcaaccagactacagatcttaagaatatccagaagaagatatgagcatatttatttaccagagagatcgtccggccagcaggggtcctccaagattttattcctttaataaaacgtacgacgagcatatttatgtcaagcaataaaacgtacgacggacaacttttaaaaatattattattaatcggaggcagcatggacgccattcctttatgagatatgctaaaaaaacaaatgtgctgaaatatctcaaagatgagagacatgcatgtggcgatatatgctgtggtataatctaatcattattgtcgttagtatcactgggtttatttctgttttaaaaacaattacccccatgtgcgatattagaaaataatgaaaaatacataacattttaaatttatttctgagctatccacgtatgtcacaatagcacaacggttcattttcgacggcgacggccgagtgggggtatttctatctcgtgactctgtgcgcacagagaagcgagagggcagatgcctccgaagccggtgccgttcgagaccttgcacgggggattggcaattatatttttagagagcgtctacgcgactgcccaacgtctgtcattgtcttcatcgctggttcctggcgtcttcatctcgatcggatgacaagagaagttggacaaggatcaggatcctcggagcgcatgggagggtaagatcaatacagttcgttactgttttatattctgcatattatatatgtcgtatgtagctctgttctatcgtattataatatgttatatctgtctgtcttatttttacagtcatcatgtttatattgttatctgtttatttccagttgttccataataatccatggaccatgtttatatacttattttatttatatgatttacatgcttcatatgctttgtgttctcatgatccatattgttatggatatttttgagatcacgttttctatgtttgattatctattatatgtcatcatcataatgtgaatttatggaattaaaataatacggaaaatgcctatatttctaacaaatactacctctgttcttgaatatttgttgcatgcttgttcattttgaactaaaacacgataaataaaaaagaacggatggagtattaaattaaaataacactatttcaattctttgggaagatccttcgccactagttgctggaggtaattttctcttcgagaatcgttctatcatatacttcttataaaatttgtcaagttaaattactaattgtctacacctgtacaccctaagcaggtacatgcacctgcagtgatgacctcaaccagcagagaccaaaataaacactcaaatataaactaccagctttgatcgtcgtttagttaatttatgaacttacttgtacctgcgatcaccatggacagacgtccacttgccagccaaaaccaatcgatacaggacaacagaactgcaacacattggaagtccaagggtcttttggattgacttatatggtgggatttattccacttaacttgagaagtcaagaaatggacaaggccgtgccacacgcgcgcgcgccgccgccgccgccggccgggcccggacgtggcgtggcgtggcgaggcgaggcgaggcaggcgagcgggcgtggtgtggttgtgttaatttttagtactcactaaccgcgttaacctttcagttgcctgtctcttcgtcagccgagtgactctgtctcttcgtcagccagccgagtgacccttctccttcagctggccgactcatggcgtgactcggcgagtgctggccgactcatggcgtgactcggcgagtgctgaccgacccttggcgtgactcggcgacctttctccttcagcttccctctgtgagaggataaatagaggagcacccctgtcactcggtacacgagagaaaacacttcttttcagactcacagtccagccgccgagtgagggtatttccatctcgtgactctgcgcgcacagagaagcgagagggcaggtgcctccgaagccggtgccgttcgagaccttgcacgggggatcgacaattaggtttttggggagcgtctacgcgactgcccaacgtctgtcgttgtcttcatcgctggttcctggcgtcttcatctcgatcggatgacaagagaagttggacaaggatcaggatcctcggagcgcatgggagggtatgatcaatacagttcgttactgttttatattctgcatattatatatgtcgtatgtagctctgttctatcgtattataatatgttatatccgtctgtcttatttttacagtcatcctgtttatattgttatctgtttatttccagttgttccataataatccatgaaccatgtttatatacttattttatttatatgatttacatgcttcatatgctttgtgttctcatgatccatattgttatggatatttttgagattacgttttctatgtttgattatctattatatgtcatcatcataatgttaatttatggaattaaaataata

SEQ ID NO: 36976 - DNA, 5418 bp, Zea Mays
ctagtctgtcatatgtggacgctatgatgcatggacagtgggcttcttagggcctttatgggccaggaattcgtcgaagcctgaaggaaggaaaaaaaaaacctaaagatggtcgctgccaccaggtagtttccaggcttccacgtttcactccaccgcttgtttccagttaccaccactccacttctaggttccagccgtgccggcgccgccgcttgcgctactctgcgcgccctcgccgctgcttgcttgctcgcaacttagaaggtgacgccgcctgcccagtgcgagcacgcctccacttgcactgcgggctgcggccctgccgaatctggaaggtgtcgagaagaaatagatccttgcactccatgccgctatgatcagcgctggccgcagcaggcggcgggggcgggcaccggcgtccctgcccacgaccacgaccgctgcttcccgccggaccgagcactccatctcctgctgttattgtgactgcaagatatattccttaaacgacgccctcttcaatttggggtggaagtatgctagatatatgagagcatggttttctgtaggtgtttatctatctctcattgctttagtcagtatatccttgatgctattgtgggagtcaattggtgtgttttattttaggagtggattccttagtgcctggttacagaacctactgacttcaggtctcaacatatctattgtagacaccacaatcattataatgtcaacaatcctgtctattgtttttcatgagtttggacatgccattgcagctgcaagtgagggactacagattgaatatgttgctatatttgtcgctgtactttttcctggggcatttgttgctctgaactatgacctactacaaaatatgcctctcttttccatgcttcggatttattgtgcagggatttggaataatgttatggtaagtcatgctgttatgcatttattatttccaaaagatagaaataagttcatttattgattgtgcctctttgtatcttcgtaatgcattgtcatatacttttgatatttgggtacttgatgctacctcatatagaagtagtttaatcattaaaaggaaaatgcataactatttgtttacttgcaataatgaaggcaacgagaagtaagaacaatatactctatgcagtctagcgtaagatgcaattggtctcactaaatatttgttcgaaataatgtgagcaaagttattgtagagaattagggaacacctcacacccaattagggggtggctttcatatatatgtagtcatgtacaacttggaatacaatatgtgttagactatacatacctctaatacctgcccacagtcacaactgtagggaactgaatgagactggacctgaagacattgaactactgtgtaagcagtctcttagtcataatgtacgtgaactgattagttgaggccacatggagtaccctaaagccaccttctcacgaacaaagtggatgtcaattgtcaatgtctatatgcttcgtacgacgatggtgaaccgaattggcagtcatatagactgtggtgacattgtcacaatagacaatggtcgccaaaccgagtgatagtctgaaattgaccatcgactatgttaaagctatcgtgagggaggctacacttgagcccttgcccccatcggttgcggcaagtccagagcagcaaccttcttcagcgatggaggcggaaaagaacgccgctgaggaactatcttttctaaagcacgcaactttgggaaaatattgtctgattgtggcgaagaagaaagatgaaggctctttggcgcgacctgttgactaggtgtaaattttgtacactaggccatgctgaagattcgttaggttgagttttgcttgaaggccttggaaaatattatgtctgattgtctgccacgcttcaattgtcgaccaatacatcatgcacggtgaagcttatattacagttgattaccatgatattgctgtgtgggtaatatcttagccgaaggtcatcttgagtgaatgttacaggcatatgaaccacttagatctgatataggacccctgaacacctatatgttggaccctcctttgaagttcttgtttttatctcttattgagtggcccgaagcttgatcttctcattattgggaatatgtgctttgctggtggaactaagttgttgacgtctgagctttgggctcttcccttctactgagctggctatgttctcgtatgtggcgtttttgtggaggttgattatataacattggatcatattgtgatgggtctggtagttgggggttgtaagcttcccactgttgtgactgatgttgcacaattgggcttgaggacgaagaatgtgagttctgcccttgatgctggatgtatgacacatcatagttagtcgagcattaagatgatgtatggcacacattcttcggctggccttcctgcttcacggttgccaattccttatgcttttggatggtgatgctacaatattttgttgtatgctctttattctccccgcaaaatacacaatactagtcaatggcgcgcgccagcgcttgcataggatttccctttttttactgggaaggtagagcggcacaacaacagtcgtcgcccacgcgtgcggctagatgtaccaacggccaagatttttcgcgcgacatggatagtgcgaatgtcgaggaagttgcatcggtttaataagaagaaatagctttcttgattgaccgttgttggagtacctgcctccaaaggtgtggccccccttctgtccctttgtgttgagccaccccagaaactactttgctggctttgctaaggtccgttcgaaggttggcttgttgttggagtttgcggaaactacttttctccatcaaactagggtgtagtctgaattgttcgggcttcccttgcatccttgttgaaaaccctcatgatctctctgtgtttctgttgttcttgtcaacgctgtcgaaagtcattgtgtgctctaatatattcatccatcttctgaaacagcttcttcaaggtttgcggaggctttcaggtgaagtattatgagcatgggtcaactttgagctccttgattgttgacttaatgacaattttaactagtactccttgtgcatgtactttgacttagacaaaccttcacatataactttgaagggattcatctacttcttgaaaacatggaacaatgcatgtgccatgactaggtttgtttgaaagccttggaaacttgcaatcgattgtttcttaagttgttcccatgtggttatcgatctggacaaagggatgagtactaggtttgagctatgccttttgttgacggagggatgagtaccaggtttgagctatgccttttgcggccataatatgatttggctaacattgttgtgtttctgccgaattatgcaatggttgcttcgtaactcatgaggaattgctttgatttcgactgcccatcattcagaggaagcatggacagtttatatgcagcttgccatggggctacctgcaaatcccttgagaacgaagatgcactatcatagatgaaattacatttttacctttccctatttcatagtcaccctttgcaattaagggagtacaataatgtcattttactgcgtagacgtgtcgcacacatcttctcttcgtagaagcttcttatgtctcctctccttcgaagtcctctttatcgacgacaaagctttgctttcaatgccttcggcttcatgcacctttggctcattcagatctaccgaagctttttcaaggagagcggtgatcttcctttggccttcattagctttctggacctgaaaaaccatctaaatattgatttcatcattttggaccttcgactagagacctccccaacaacaaccaaatagaaacaattgctggtttacaaatgccattaaaccctggttagagaagtgcaaatataattctaatgcagtcttagacatacttcacgcgagtgtgaaatgtaacgttatatacttgtatactgaccttgttacttaatcattgtgatgttttataatttttttgttatgatttcatgtttaatagctctgtacagcatgtgtgatgataacattgttacttcctgtgatgttatatcctctctatgtgagtggtgatggcctcatggtcatggaagtccctgaaatatctcctatgtcagaatacttgtccactcatgatgttattctttctgtggatggtctgaaaataaccagaactgatgattggatcaagattctgaaccaaggtactacagcgaaatctagggatcctgaattccttgaaggctctcatagatatgttgccactagttctaccaagggttattgcgtgcccgattcatggatagatgcaagcaaaaatctctggcagataagagacaagctgccttgcccagatgaactgatagccttcgaaaaagttatctgtaacgtctcaaccattttgacagagaagactagcataggtagtgaccagaaggaagttgagggaaaatattgtttgattgcgaaagatgtagtaaagcttagaagatgtggaaacggatggcacatgactgaagatgatgaaagtagctgtgcatgttttgaggatgagcactgtttggtacctgttctgaacccaggcttttcatggattgaggtctcctatgccaggccatactctttgagatgtttacaaaaaggaggaaatttgttatcatcacatactgcaaatagtaactttggacagagtccttgtgaaggatcttttgtttatgtgggtgatctgtcatcagcagcacgttcggttaggttatcccgctaccgacctcgatgggcacttctacttttcattgcagacatcccatatatcttggaaaatggtttaagtagcttgcttcatgcatctgcagcattggctgtaatcaattgcctaccggtgtattttctggatggtgaagcgattctggagactaccttaagctatgtagcttggtttaccccaagactgcaacgcagaattctaaaagtatgcagcgtggtgtggacgggtttattagtcattactttctcaagtatttgttattccacagtgctacattatggcgtatagcaaataacccatgtaattttgtcttgaacaaagagaagatcattttaatggaacatgccaactgtactctgtccattgtaaattataagttgttttgacttttatatatacataacttttgttaggctatcttcagtagactatccacgtactcatattcaagcttcactccttgaatagtgtagtctgtagtgtaaaatagtgttttaggtgactatatggataaactgttggatatgacgtatctacactaggt

SEQ ID NO: 36977 - DNA, 484 bp, Zea Mays
gtttggatggagagtgaagtagcatggagcggttccatccacaatatacggttgtttggttagggagcagccggagcggagcggttccaacaagcgaatatgctccaaagatgctggaccgcgagagacctccaaaatgagcggaccgagcggctccgtcccgagcgcgctcgcgtgatttctcccgcgcgtctgtgccttctcccgcgcgctgttcccgcgcaacgtctcctcccgcgccgccacaggtcttctgcgccttcattttggtccaagaactttacacaggaacgcaagcttgatccaatggagggagaggggaaaggtggtgctgtttggacagcaagccaatccaactttatgcaggttttccttgccaatcttgtagtggatggcatcaaaacaagcaccggtggtttcaagagggttcacctcaatgcttgtgctaaagctttgaatgagcatttcaaacttaataggactg

SEQ ID NO: 36978 - DNA, 1091 bp, Zea Mays
tagaaatcaactaacggaaaggtttgtcctcgtaaatcgataaagcacggggggctttctttacaaaagtgagctacgtagcctagtgcagcaacgccccggagctctgactctgaggcctcggcccggcgacgacgacgagtgcgcggtgacgcgagcgcaagagagaacaaagctttgacgcgcacccactcctgccgcctccctcagtcccgactcccgaacacgcgcgcgcaggcccagcacagcacggacgacgacgcagcgagaggctcggaaggaggaaagagtcgccggcggagaccccaatcgatcgaaggcccccggtcgcttcgcccgcgaggcatatcagtgcccccttggccaccgggtaaaagctttcctgggggatacgatcggctctgcggcctgccacggatcggagggcttttgctggtgactcctgggggattttcggtcggggtttggagctttcctggttttgggagctagctagctggctgtccagcgactccatggattagaggtgatggtagctagctggcccaatctcgatccgatcatcatcttgcttgaccacgattttcttgctttcctctagatcttattaaaagtacaagtttttttcccgaaaactgttgcactttatgtgttggaaagactctctacgtacacggagggaaaaaaacaagaggttaggtccaagtgtggaacagctgctgagtagtgattgctgttgctgagatgaagttcatgacttcatgtcagttagtggcgacgtttcatgcttacagcactacatcacacttctcctgtgctggccgctatatcatctttactgcacacggaagtgtttatggatgcttccgtaatatatgtacacatgcacatgaatgaaatggggtgattcataactggctgtaatttttgaattttccatactatatgcacgatagagacgataataaaactgtctcccactacaaggaggtgtgtatgatcacattctgcttagcttacttgtaacaatctgtgcagtttcttttctgtaaggctttgttcgtttacaccaatcccgctctggattagca

SEQ ID NO: 36979 - DNA, 1863 bp, Zea Mays
acccaacccaacccaaccgcgctttttgtcacctggaaagggaaggcaagtcgagattcgagaaggcaaatcgaattcgccatgggcatggctgctccgcgcgcgccgctgcctctcccccaactgctgctcctcctcgttgccgcgctcctcgccgccgctcccctccctagggcggccagggcggacgagttcgacgtccgccgccacctctccaccgtcaccaggtatgatgtggccagggagtccagtagtgtcatctccatgccgtcaatcccagacgggtgccgtgtcattcacctcaatttagtggcaagacatgggactcgcgctcctaccaagaagcgcatcaaggagctggatagattggcagttcgactggaagcccttctgaaagaggcaaatcaggtccttgatagtgattctctgaagaaaattccatcctggattaaaggctgggaatcacgctggaagggtaggactaaaggtggtgagctgattagtgaaggggaagaggagctttacaatttagctaccagaatgagggagaggtttcaagatctatttgatgacgaatatcaccctgatgtatattcaataagagcaacccaggttcctcgagcatcagctagtgcagtggcatttgggttgggactactttctgggaaaggaaagcttggacaagggaagaaccgagccttttctgttctgagtgagagtcgtgcaagtgatatttgtctgagattctttgacagctgtgagacatacaaggcatacaggaaaaggaaggagcctgatgtagagaagcaaaaggaaccaattctagagcatgtcacagctgcacttgtcaatcgttatcacctaaaatttacaactcgcgatgtttcttccctctggtttctttatgatttggagggttttgttctaaaaggctatggtgagtcaattaactacaggatgggactgccattgctcaaggatgttgtccagtcaatggaagaagcaatcatagctagagaagaaaaccgtgctgatggtacgtttgaaaaggcaaggctccgatttgcacatgcagaaactgttgttccttttagctgccttcttggtctttttcttgaaggtccagaaattgagaagatacagagagaggaagcattggacctaccccctttgccgccacagggaagaaactggaagggcagtgttgttgcgccttttgctggtaacaatatgctggttttatatcaatgtccaagcaaaatttcggatggcagcacaatctctggaggccgaaacaactcttacttagttcaagttctacacaacgaagtcccagtttcaatgcctgggtgcggcaacaaagatttctgtccgttcgaggagttcaaggagaaaattgtgaaaccgcacctgaagcacgactacaacatgatatgcaaggtcaaatccccagcggcaagcgaggagcctgcctcgttcgcctccagggtgtccagtttcttcctaggactcctctcgcagaaagggtaccgcggtgtgggcgccgagggcgtcaagaccgagctgtaggcgtcaagacctagcttagcacggtgccgtctcctctcaccgtctgcgagcacgatcaggaaccagactaacccatgcactaacccgcagtgtttttgtacggggcgagtcgaatgtgtaggacaccaccacaggaggcgccagttcggttgtctccagggccagacgcctctgatactgtagtagcaataacataaataataaatgtgtttcgattcggactccctttcgcgcagaaagaaacaaatgcatgaatgaatgaatgaaatagtacgtgataagcatcttctgggg

SEQ ID NO: 36980 - DNA, 1466 bp, Zea Mays
caattgttagttttgcactccacctgaagtctaaagtgatgtgttgtgtacagtctaaagtccattttgtgtaggattcggcgatttgcactccacctgatgttgctttgctcgcaacttttgcttgccacgacggaggctagatccagctcctaggtgtccgtcgtccttccatctcccaccctccctcgttggagcacgagcaccaaaggtgcccagatcttcgtcggccctgcccctgcttccttcaactccaccaccaggtaatgccctggacttaattgaatgggctctcttctcaccaggatcggtgtcctgccatggctccacgccatgattgttgatcccgtgctgtaggtcatcagaagaacccaagcaactagccttctctgctgcccttggtatcacgattgggatctttccgaaatattaggagcacctaaaggatcaactacgataaatgttttcagtgagtgtaccaaggccgaatcgtttcttccatttggttctggaagtcgagcatgtgttgggcagaagtttgttgttcttgcaatatcgatgttgattgccagtctgctccgcagctatgaggtatagcctcatccaagtttgtctaaagaaatggacacaacagttacagcagccaccttcatctcccaaaccctaagatcatcctcaccaaaagaaggatctgaagggagagtttggcaaacaaaaatctggcacgtttgctttcactgtattgtttttcactggtgttacatcagtatatgatctttagtttcctaccgtcgtttggaccatgctgaagtttggaaaggcgaccttggtgatgcagaagtgtcttttttcctctggatttttgacagaccctgtgtgcttcactggatctaagtttttgtcaggtttttggagcacccgcagggctgttagatcacaggagacgtatgttgatgtgtataaacagactcattttttcagttggggttttctcctctctgtggagaatgtaatgcccaacgcatgatgtttgtcgtgttgagatgttttttgatagttttttgcgtatgttgttgatattgattttattggatgtgaattcattcatcctttcatagtatatttgaattcatgatagtatctacatatgtacactgcttaaagatactatctacgtatctatatctattacaattttgtataaatactttttgatagtttttaatttgtatgacaaagcagagacacatacactgcttaaagatatgcgtctgagaacatcattgcatcatgccactgggcatacaagggtgttgaggaagactcaaccctagaaggtactactaatactagcaattacttttttaattaatgcctacattcctgttatgtagtatgcacatcggatttgtattgttgtcgtactattgatgcatgattttaacttgagggggcaagaatatgct

SEQ ID NO: 36981 - DNA, 1787 bp, Zea Mays
tctttggattgttctggtagtgtcacttttcaggttctgatattagccatgtttaagaacatagaagaaggaaaggtctacaatcttgttatgtttgttaagtcaccagaaacaactgacttgacagtttcactaacaagctctaacgggttgcaaaatctggcttcagctacagtaacagtttccggcgaatcaaactggataaaagtggagcaaaagttggttgctaaaggaaccaatagaacctcaaggcttcaaataacaactaacaagaaaggagttgtctggtttgatcaagtatcactcatgcctgaagacacatacaagggacatggctttcgcacagaacttatatccatgattttggatttaaaaccacgattcttgagatttcctggaggctgctttgtagaaggtggctggttaagaaatgcctttaggtggagagaatctattggtccatgggaagagagacctggacacttcggggatgtttggcattactggactgatgatggccttggatactatgaatttcttcagcttgcggaggacctgggtactgaaccaatctgggtattcaacaatggagtcagccacaatgatgaagttgatactgttgctattgctccttttgtaaaggatgtattggacagtatagaatttgcaagggggagtgcaaattcaacatggggctctgttagggctgcaatgggccaccctgaaccattcccagtgaaatatgttgcaataggaaatgaagattgtgggaaaaaattttaccgcggtaactacctcaagttctacaatgctataagacaggcctatccagacattcaaatgatttcaaactgcgatggttcatctacaccacttgatcatcctgctgatttatacgacttccatgtctataatgattctaagactttgttcaacatgaagagcacatttgacagaacatctcgtagtggacccaaggcttttgtaagtgagtacgctgtttggagaggtgatgcaggtagaggaagtcttcttgcttcattggcagaagctgctttccttactggactggagaagaatagatcacatgaccctacagagttctgcctgctctagtgtcactacgaagataatcttaaatgtggaacccagacgcaatcgtcttcaactcctggcagcattacggcactcccagttactggatgcagacgcttttccgcgagtctagtggtgctatgttccatccaacgacaatcagctccagctactcaggttcacttgcagcgtctgcgattacctggcaggactccgagaacagcttcctaagagtaaaggtcataaacttcgggtcagatgctgtgaccctgacaatctccacaagtgggctccaggccagtatcaacgctctgggatcaaccgccactgttctcacatcagcagatgtgatggatgaaaactccttcagcaacccaaccaaggttgtgccggtaaagagcgatctgagcaatgctgcagagcagatgcaggtcacgctggctcctcgctccttcagctcgttcgatctcgccctggctcagtccaagcttgtagcggagatgtgagctaggctggtacactagtatacaatacaacgtgtgaagtgtggtacacaaataccagcaaccacaggggttgccaagctgttgttagcatcttgaacacatggctttgtattgtgtataatgacatgatgctgatactaatctctattatataaagcactagtttctatgttgtcgtgctcccac

SEQ ID NO: 36982 - DNA, 1032 bp, Zea Mays
cgcggcagaagagcccaaatcacggccgcaaaagccacgcacgcggcgcttgtcctgcgcggcgcacggaaacccacctccacggcggcaccccgtgcgtcggctgcttgctgccccagtgccgccccgcgttcccttcgctcccgccgacaccgacgccgccactgccaccgccggcatggcgaccccgctccgcgccaccgcggtcctcgcgtggggttccggggaggacgggcagctgggcatgggcgggaacgaggagaaggactggccccacttcgttgaggcgctggggccctacgccgtcaccgccgtcgtcgccggcagccgcaactccctcgccatctgcgacgacggccgcctgttcacatggggatggaaccaacgcggcacgctcgggcacccgccggagaccaagacggagagctccccgggccccgtcgacgctctcgcgggtttcaagatcgtccaggcggcgattggcgggtggcattgcctcgcagttgacgacaaggggcgcgcctacgcctggggtggaaacgagtacgggcagtgtggtgaggagcctgagaggaaggaggacgggacgagggcgctcaggagggacatcccgatcccgcagcggtgcgcgctcaagctcaaagtccggcaagtagccgctggagggacacattcagtagttttgactcaagaaggtcacgtctggacatggggacagccatggcctccgggtgatatcaagcaaatatctacacctgtacgtgtgcaaggccttgagaaagtgagggtcattgctgtaggtgcattccataatttggcactaacggaggatgtaattttgtgggcatggggtaataatgagtatggtcagctggggactggagatacccaaccaagatcacaaccgatacgtgtcgaagggctatctgatctctcactggttgacattgctgctggaggctggcattcaactgcactaactatagatggagagggcatgctattagatgtctagattagagagcaccgaaa

SEQ ID NO: 36983 - DNA, 4324 bp, Zea Mays
caagaagcgccatccgccgtgccgtgctcgccgcccccattttgaagccgtcgctctctctcgcggtctcacactctcacccaaggccggcatcccgctcggtgactgtgccgttcatttccgccgcgtacacatatctaacagggaaccactttgaaacttgaatatattggcgttgctatagtggagtaacatggccttctgcactatgtataccattcatctgtccgtcatagttttgttggcagtcacctacatgcatgtaccagttactgctatcatcgttgttccaacctctaattgttatacatttgataatgaaagccgtcttgttgattttacacatctgattggaaatgttttcgaatataaggaacagggctcacctcgctctgatttggttgtcgaattctgcaaagatgtgcagaaaagatctcaagagagaacgcatttccccgggtggtcaaggcctctacgtgctagacgatccgctgtccagcacctattaagggaagcaagccaaatgaagaatttgcacttagggggcgcccaactcttccatatcctttcacccggctcaaattccacagagccagccaagaaacgttggtaagctgttttaacatagtactcccccgaagcacctggaagccaacggaaagcatcaggtactccaggttgcaactgaatattctgtgttaagtcccaaattattaagaattcgacaatcacttctgtcggtaaactgccagagatgtcaccaacccaactgttatccctgagggcttgctgaactgttttccttttcctcattcgtattgaaactctatttaacagggaaggggcaatttctgagatacattggccatgcagccaacggtcagtccaaaatagcgttccagcaccatcccccactatggagcatagtgaggctgagaacatggcaatgacattaggatggacttgtacatcaaactcagcccaaggcctgtctggctgagttttcttgagccacaaccacctcaggttcaatgcccaaccaagaatttcaagattgtgtattcccaaacctcctagacttaagggtttacataccttattccaccccacaacacaatggccacctctgacatcctttctgcccttccacaaaaaacctcttctgattttgtcaatagccttgaccacccatttagggcaaggaatcacaataaggtgataaatagggatggcagtgaggacagatctgacaagtgttcgagaaaaaaaagatctgacaagtgttagtcttccagcttggttgattaaaggagccttccaacctggcagcttgttagcaactttatcaataagttccaaaaacacatttctaggcattttcttaacagaaagaggaaaccccaaatatttgcaaggaaagcctattatgttgcaagggaataaagattgtgcctcaccaacacattgatcattacattggatagggagtcatactgcatttactggcattggtttttaagcctgaggcctcccaaaaatccttaaaatctccttgatcactgtgatctctcttctgtttggctgtaagaaaagtacaacatcatcagcatacagggacatccgttgacaatttccatgtctcaatagaggcagcaacagtcccctttcttgtgcttttagaataagtgaatccaaggcatccattaccaggatgaaaagcattggggacaaagggtccccttgtctaagccctctatgatgcttgataatctcccctggttccccattcacaagtactcttgttgaagaagagtacaacattttagaaatgatgctgcaccaaacaggaccaaaacccaaatgcctgaagatttcaaacaagaagggccaagataccgagtcaaaagcttttccaatatccaatttcagcaggatacgggacaccttttgcctatgaatagcccttgcagtctgctgaaccgaaataaaattatcatggatgcttcttcccttcacaaaggcactttgattttttgacaccagaacagggagcctaggtgcaagtctggtggccaacagcttagttacaatttttgcaaaactgtgtatcagacttattggcctaaaatctttaacttccaaagcctcattctttttaggtaataaggtcacataagctgaattaaggagatgcagtttagaaatatccccatgcagcaatctgttaatagctgccataaaatcacccttaacaactggccaggcctttttataaaatctcccagtatagccatcaggcccaggggctttgtcagatgggagggccttgatagtattccagacctcctcctcactgaagttttggtccagatcatgtaagttcaaggccggcctatggaaggcatctagatttagagtagagtccctgtaagatactgtcccaagaagatgattatagaaatcccacactgcctcttttttatcttcctgctcgaacaataatctgtccccgacctgcaacttcccaatgaagttttttctcttcttatacctggcctgtcgatgaaaatatgaggtattggctgttggaatgtgaaccctaaccctaacaggggttccttgacgacccatttggggcactgaagagctataaaatagtagatatgggctgccgaaagcactgatttaaccaaggttgtcctcccagctgggttaattaacgcagctttccaaccaggtagcttatcagccaccttatcaatgagctccagaaaaacacttctaggcagcttcttaatagaaaggggtaaacccaaatacttgcatggaaaatccacaacgttgcaggggaacagatcttgtgcagcaccgaggtcttgctcaacacaacgaatggggtcaggctgcatttgtttatgtttgtgacaagaccagaagcctccccaaagatcctcagaatttctttgaccacccgccgtgacttcgttcctgttgggcttcaaatagaccacgacatcatcgggttaccttgaatttggacgctttgttagtcctcactcttttctaactggttcaggtcctattgactatattcagaaaatgcataatggagatttagtgcactgtgaaactacattccacaagatgggtcgtacagcacaggtaaacatcatatgtggacattgctcgaacaaagtgtgcaaagggtgattgtcgaactagctattcgttgtgttaaaagtggtcccagagtatttaaaggtttcacggtgggcttccatccccgctcatcagaaattgtttataatggattcactcagcctggatttgaacaacctcaccatggatttagcttccagactgagcagattcatgtgtctctttaccttagcgccaagtcctcactctcaggccttgttgggaaaccgaccttcaaggttaatccagtgaaagggcttggtgttacacttgcaggatcaggattcaatgatgccatgcctagtaccctgtctcctacagttttgaatgtggattggagatgtgaaattgttcgaaccagtccttatgaggtccatatttttatccctgtggagggctatgacccaattgaatttacactaacgaaaaaatgtggttacagacaagaaaaagagagtgatcccatgaaaggctgggcaaaatttggaattgtttcttgcgtgttcattgtcttatcatgcatactttgttgtggagggttcatctacaaaactcgcacattgcatttgtacggtttagatgcgctgcctggtattgcggtcttgtctgccctattggatgctgttgggagaccaagaggctacttgcctgcagttaatcctaatgaaaaccatgcaagccatgcatcttgagagcacgtggttggtaccacacaagtaggaagtagcacaatggataaatcatagggcatatgggccaatgtgaactaatgggtatattctgaggactgtttcctgtatgttttcattatatattcaattaatctagtctctactttatcagacataattcgttgacacatccagcatcagcctacccaagaaattttccctctgctacaagcaagtgagctcatggagcgttgctaattatcgcactattagtgtagcttttatgcacaagttctttacatgttcaaaaatgaaaagcatatacaccatcctttgtatcacgctttgtaacatttaatatcttattatcttgcagtagagtaggatactcaaaatttaattgagctcgtagcatagagcttacgtgtcatcaacatcagaaaagtcaaaagata

SEQ ID NO: 36984 - DNA, 2979 bp, Zea Mays
cgaaagggaaaagagactgaccgagcgagcccggccctccgacacgcgacggcgcctatttgccctgtcgcggtcggtcggtccgtggcgtggacctgaagcagcctcctcacaggctcccttctcacaccgtctctgacttccctcctgcgctcccgtcctgccttcacctgacttgttcgtacttcgctcctgggctcgctggcttcctcagtccttgctgctcgctagctccgttgttcaggcggtgcctgcgccggcgaggttaggcaggactcaggcgaagtgggctagcagccgggtggcggcggcggcggtggattcctggtaggacactcctacctgcatcaagtttcgttggtacgcttccttgtggttatgaagctttctggatacacctgggaatgtttggttacgttgaagagttgttgaatacaccacatcagggtgacagcacagcaggaatttgttcaactttctgattggattgtggttctaaattgctgttctgaatttatgccatgctttagattgaagatatagtgaatgcaaactccagacacaacttgtcgtaaggttttgaatgatgaagaaatggcatggcggctttgccattgtatctttgttcatcatcttgatgttaagatatgtgatattggataacccacttgtagaaaactcgcttcagtatgttttccagcaaaacaggacggcagaattacattggttggatgttccaaacccacctgcaatccagaatctacagatttcttctgaagtaatatcaactggactcttggcttccaacctttccattaccagaaatctctctgatagagaacttcaatctttacattcttggaatcatttgaaacagctattatctcatgttcatatcctaccagatggagtagaggcaatcaaggaagctggagttgcatggagggaactcaatacagcccttgcatatgatgatgcagtttctgttaatggcagcattcagcagaaggacaaaggaaagcaatgcccttattctatcagaaggatgaatgccacaagattaggggataggtttgctttaaaacttccctgtggactgattcagggctcttcaataactattattggtacacctggtggtcttcttggtaattttaagatagagttaactggggctgcagttcctggtgaaccagaccctccaattgtccttcattataatgtccgccttcttggtgataaactcacagaagatcctgtaatagtccaaaatacatggacaatatctgatgattggggttctgaaaaccgttgcccatctcctgattcagatgctaaggacactacaaaagtggatgatctagaaaaatgtagtagcatggtaggtgaggaccagaaagaaatccttccctctaagtttcattcaaatgtttcggccatgccacctgcaagtaagaagaaagcagaacctagaaagtattttccattcagacagggatatcttgccgtagcaattcttcggatcggagcacatgggatccatatgactgtagatggcaaacatatcacttcttttgcattccgagaggatttggaaccagggtttgtaggtgaagtaagaattgcaggagacattaaattgttatctgtgatagcaagtggcctgcctacaacagaggacttcgagcatgtcactgacttagaaatattgaaggctccacctgtgcccatggataaaccggttgatcttttcattggggtcttctctacagcaaataatttcaaacgccgaatggcagttcgcagaacttggatgcagtatgattctgttcgatcaggaaaagttacagttcgattctttgttggcctgcacaaaaatgagttggtcaatgaggaactctggaatgaagcacgaacatatggagacatccagttgatgccatttgtggattactatagcctgattctttggaagaccatagcgatctgcatctatgggacaaatgtcctgtcagccaactatgtgatgaaaactgatgacgatgcttttgttcgagtagatgaagtactttcttcccttgaccgaactaatgtcaaccatggactgctgtatggtcgtgtcaattctgattcccagccacatcgagatccatatagcaagtggtacataacccctgaggaatggcctgaggagagttatcctccctgggcgcatggaccaggatatattgtttcaaaggacatagctaaagaagtttacaggaaacacaagagtggggagttaaagatgttcaagctggaggatgtcgcaatgggaatatggatcaatgagatgaagaaggatggcttggatgtcaagtatgagaatgatgggaggattttggttgaaggatgcgaggatggctatgtgattgctcattaccaagaaccaagggatatgatgtgcctctgggatcagtttcagaaaacaaaacgaggaacatgttgcaaagaataacagaaatcatgcgaatggtgttttatgttacggtggctgctgttggccgttgcttgaatagacaccttcacgctaaaacgttcttgatgtatacagccctgcctaagaggattctaaaagagctggaactggaaggcaagcaaacaattttttggatatcttcaagtttgtttcgtctgcagtttgaagagtttcaagtcaaactacggcatgggatatgcattgtacacagaatgtagggttacatttgtttttggcataggtaggagggtactgctttgcttactgtgcggcgtgtaaaatagtatcttgctagaatgtaggatacagcgacggcagtttacgttaggatagactgagacagtcttaccagttaccattttttttgaaaggaatgcattttgcatcttgtgtaaagctgtttggtgtccattctcttgtataatcgattcaatgttcatcccacccctgaacttgttttg

SEQ ID NO: 36985 - DNA, 2367 bp, Zea Mays
ctccctctctctctctcttggagttgctgtgaaaatacgacctatcggggacagctcgatctccctcccttggctggagcctggagccgacggagcagaacgacggttccttgcggcggcagcgacctcgagctgagggcggcgagaaggcgggaacaactcgatctccctttgctagctagctagtcccgatggagccgagggttccttgcggcgacggcggccccgaacctagggccgcgagaacgcatcgacgggagggcgagcgaaaccacgtcctcgatgcgcgaatcctggagcctcagcgacagagatcgaatccaatcaggaacatctttcatctattaactcaacgagaggtctcacctcgattgaaacaccatgctaaaagaatgtggaatgagtccccaaaatatgatcctgattcaattgagttaaggtctgcagatgctaaacttgatattttttcatgggcagaatcacagtccctgcatagctggtctgccaagtattgccctcttttgccacctcctaggtcaactattgcagctgctttcagtccagatggaaaaacacttgcgtccacacatggtgaccataccgtgaaaataattgactgccaaacagggaaatgtttgaaggttttgactggacatcgacgcactccttgggtggtcaggtatcatccattacattctgacatcctggctagcggaagtttggatcatgaagttcgtctatgggatgctaatacttcagactgtattgggtcacaagacttccatcggccaattgcttccattgcatttcatggaagtggggagattttggcagttgcatcaggtcacaaattgtacatatggaactacaataagagagatggcacttctgtaccagccatcatactaaaaacccgccgctcgctgagagctgttcattttcatccgcgtggggctccatatcttctaacagcagaggttaataatatagaatctgcagactcaccgctgactctggcaagatcctctggatatctaaattacccatcggccctgctggtgacaaacactaattctagattctgtacacttcctgagtccaatgtggtgtcaccttgcttactgtggcctgcatacctcagagatggtggaattttacatgtgctcggcaatgacagtagttcaaccattgtgcagcagagatcatcattagttcaaccttccacatcagatactgcaaatgtacagcttgaacagtttgctacccctatggatgtatgtccgggagagccaacttcatctaatgacatacccgatgcagtaactgttcctacttcaaatggaaatgaaatgcatggtgctggaggccagtctaactcaagactgcagggcagcagctctactagtaatcttgagaggttcagtgctagagatgatttgcaagtgtcttccctgagcaggactgacccaatcccattaacagcagggccttcaggatccgatttacaccgtgctatgccactaaatatgctcctcactggcggattagatgttcaaatgttcctaagaaatgtaggaagtggacagcaggatcattctctcttcggcgactcacgtaactgggaggtaccatttttgcagggtttcttgatggccccaaaccatgcaggtttgcaccctgcacttgtgaacaatagtgtccttgaagacatgtctattgctggtactgcagggactaataacttgaaatcaccacacatgcgcaactttggatgtccaggtgcttcatcttcgattccccttaccactggcagttctaggggaccaaatcgacgctatgcttcacgctctgtacctggggttgggaatttgctcctaggtcctcaaattgacgaagctgaagctcatgctgtttcactaggtgctggttctgaaatcactgcgtccatgcttgctcctggtactgaattgccttgtacagtgaagctcagaatatggcggcacggtaccaatgaaccatgtgttcctttagaacctgaggcatgctgtctgacgatttctcatgccgttctctgcagtgaaatgggtgcccatttttccccatgtggacgatttctggtagcatgtgttgcgtgtttgttgccacaaacagaagacgaccgtggtagccaattgcctgtgtcttacgaaggggctggatcatcaccaactcgtcacccgcttccctctcatcgagttatttatgagctccgggtttattcccttgaggctgagacatttggggatattcttgcttccagagcaatacgggcagcacattgcttaacatccattcagttttcatcattgaattggatcctgtttgtct

SEQ ID NO: 36986 - DNA, 2744 bp, Zea Mays
acgctagctctgtatgcaaacatgcctgactcgcccgttcgcctatctcgcccccccccccccccccccccagcatcggagaacggagggaaccagggagctccggccgcctagaaccggagctcccaaatagatcgatccatcggtcgttgagcggacacggcaatggaagcccacgcctcgcggggccgccgcaccctggaggagatccggcagaagagagccgccgagaggatgcagcacgccctcccgatcgcggcgtctcacgtcgactctcacgggaaccaaagagccggagctgagcttcttgctcgagttcaagaacttgaaaatgggaacacggaattgattgatgagaagggagttgagaaggatgcccttgtaaaccgtttgaatgatctcgagcggaatgtagttccctctttgcaaaaaaacttgaatgacatttctttggagaaagatgctgctgtagttgctaaggaggatgctctagctcaactcaggagcatgaagaaacggctcaaggaagcagaagaagaacagtataaggcagaagaagactcagcctccttgagagcacagctaaacaccctgcagcagcaagtaatgggacactcttacagtggatatacaatgggaatatcgactgaggaatctgttgccatggaaaaggagatacaagatttacaggcacagctaaagcaagagtcactgctaagacaacaggagcaacaaaaattagctgaagagtcgcagctgaggcaacaagagcaagaaaaactagccaaagaacaaatccatattgcttctctggaggctgaaaagcaacagctggaagaccaaattactatgttgacaaagaaagctacaggtatggaggatacatatacttatgctaatctgtcctttataatgtcaggaaaaacaacagtccatgctagtaaacatgtaagttcactctacttactagcatgcgttttcttccatatttatattctgcagtgtctttgattgcttcactgtacatgctatagtagcattactgccacatgctaggtagttcttattttgtgacatccaaaattaagcatgcacaacactctagatataatatttgctgagaactgcaacaactttgtcttcaatggtgcaaatccagtatctcaatggtgctgcgaagtcacaattcacaaatgaatgcatccttcgctatactgctggagtagaaggcctccaggagttccttgccagttccattaggctagtgcagtagtgctcttgacttatggtcatcttgggtgtgtattttggggttttctataatcccttttgcactctcttctttcttaatcgaatgatatgcaattttcttgcatgttcgagaaaaaaaatatatttgcgaggattgtagccttgaattaaatcttctctttctgtgcagaggacgcttctgagtttgctgcacacaaggcattttcaatgcaagatagggaaaaacttgaaaaccagttgcatgacatggctttgatgattgagaggctagaggggagtcgtcaaaaactgctaatggagattgattctcaatcgtcagaaatagagaaactgtttgaggagaattcggccttatctacttcttatcaagaagccatagctattacagtacaatgggaaaaccaggtgtgccttcttagtcacttgtgcatctatgttacgtaaccctttgcataagaaatctgcctcttgacttaacagaaaattccaggttagagattgtctgaagcaaaatgaagagctccgttctcacttggagaaactaagacttgaacaagctagcctgttggaagtaagcaatatcactaccaaatcagatggacaaattgaaaacagtatctcaaacctaccagaaatggtcaccgagaatatttctctgaagggtcagcttataaaagaacagagcagatctgagagtttgttggcagagataatgaaactttcagctgagcttaggaaagcagtccaagcacagaataaccttgtacgcttgtacaggcctgtattaagagacattgagagcaatctgatgaaaatgaaacaagaaacttatgcgacgatccaatgatacatggtgtcaaactcaatccacgatactgtggaatggccgcatagtcacaagctccaccgtaggcctggttcggttgcatctgaattggagacgcaaccaacaagcccttgctcaagatgctggtgaatgtattggtctcatgccattttcaagatgctggtggaaagcagttctttcggtggctaccattcataagtagagttctgtcgagatcgttcaacctgtatcatactcttgtatacccgattcccaccggttcatcttataaactgggggcaaatggagaaaaagattggttagggcttgtttggtgaaaaagattggttagggcttgtttggttacaacttacaagggaggtggaggggactggagggaaataaactaatttttcccttaatccccacatttcccttctaaccaaaacaaattattatccctgctctcagtccacaaattgggcgcaacaactttttaaatcatgtcatttgcgtccgcatgttcgtttggccgttggatgggtccgcatgtagggtgtatttggtttggtgaatgaggtggtctatttctctcttctcacttttttatttggtttgtgaaatataatagttaatctatcattat

SEQ ID NO: 36987 - DNA, 2776 bp, Zea Mays
cttcctttcccaactcggtcgacgcgttcgccacggctgcgcagtcctcctcctcgcctccgatcccctcccttcgacgatgcgagcacacccgctcatcctcttcgtacctgcaccgccacctcatcctcttcctcgccgcgccgacacccaccgcgctctctccctcccgcggcgacgcccttcgccaacgagaaccgcacgccgtcgtctcccacgggcactgtcgcacgctgggccacgctgcagtcggtggcgccgccacaccttcttcctccatgtgccgtcgccgccctattcttcttcgagatgcagccgctagcgctgccctcctcccagctccccttcatggccgcgtgcagggactatgtgccagtgttagtttttggtaccagtctacaggtctttcatttctacattcaaaggtgagaatcaatcatgttcggctccctttaaaaaagtaatgtttcccaatccttcatagtaaaactaaacacacattgtaaagacatttgtcgtacgagatcttttatagaggtgtgttttaacccaaaggcaggctgtggagatcaattccagatattgccttcttgttgtgtctcagttgattttttttagcattgaacgtaacttacagtttgacataacaagcggtgaatgtaacactacagtttaactcaacaagccattggctgtagctcacaatcagcttggctgaactgccaaaaaaaatacaagcagtccattacagttcaacttaacaagagcagttctgttggtaaagccgatgcaaataagtaccaattgttagttaggaagggaaaagtgtcagcagtcaatggctgattaaaaaactaaatgtctttgaatttgttgggccgtgtgcctagtgcctggcctattaactggcttgttcgctgcggctttaatccgactgcgactgcggcttctacagtattttgtctctaggaattgcagctgcaatagtattttgcagctgcaacagtgctcccgcatgggcagccgaacaagctaaacatgtacatatatacttattataccagtgaggtgtgtgtagagtagtgtactctgtactcttccagaaaactttacatggtaccggaaccgggaccagcggcgacggtgtagtggtgaggaggcagaggagtgccttcggcctcgacggaagaaggccgccgatggagaagaagaccagctgggagcgtggcgcggcgtcgcggtcgtgcacgaggaggaggagcctgcacttgccggagggagaagaagcatgtagcacggtgcggtgctgcagtcgtgcgtgagtaggttcttattattgttttctatcctgctggatatgtagtcatgacagttaaattatgtacaactatgattacaaacgggaatacaagctaggagttgagaccacaatccttatgaaaagttacactgtgagccttcttcacatattgagcaacaataatcatcttcgtggtcatggtggtgatgaccatgatgcgcctagaaatgcatgtgtgaaatattcaatatatgtcaccatttctattttcagtaatacaagattagaccatccctgcacatctgcctatctgcctggcaaaatattatcgtcgcttccaagattgagaatatggctgcgtttggaaagccttagattctagcattgggtaacatgtctattatcccacattatctaagtttaactagatactcatattttatgaaaaaaactgcactgaaaaatcacgaggtgctagatgttgcgctagcagcagcatcatagcacatcttgtctattccagttacaaatgtgcatattgtagaatatttttgtaacatactgctgctcccttccattcgttttggttttggcaattttctatgcacgtgtcgctcatccatggtacctcttttgtactaagatcattgtgacatttaacatgtttacatcatctcttactcgacacatactcactggactaatgttcttgtccctccttttgctttccttagcagatggcggaggttctaataagtaaccttatgattggaaattgcagtgatcggttgtgtgtacgtgtctcccgtctgtgaaaaatttatgatcccgaggatgagtataagcttttccatgctcatatggtcctcatcgacgaggaggctggcagtgctcatgctcaaatataccctccactcactgacgttttcaaacctctgataaaggagggcaatgtctacaatgtctcctacattcagatcaagaaagctaataggatgtacaagcatgttgacaacgatatcatgatcggtttcacaaaatggatcctatgctgcctcaacaaacccgcggtttgaacacgtgacagatgacggcttagcttctgtggatggacatcttggtcgcttttgtagatggaatgtttggttggcttttgtagacagaattaggctgcacttgtgattgtgtaacgcttatgagcatggttgtgtggactgtgtcggccaaagtatacctcccaatgccttgtatatatcacatgcttagctgtctatccccaactaggtcgcctgataatagacttcgatcatgtcatgctattctataacaattttcgctgtaacttgcctaatcgtcatactatggtacacgcttaaatttggtgctgcaactttattgtggattataaaagagagaaaaatacagcataaagttataatgtcaaattgccacagctcactgttaagacttatttga

SEQ ID NO: 36988 - DNA, 260 bp, Zea Mays
agggataaagcctggtgcgtctcatatgtgcgccaaagaagaacaacacatataatgaccaagtgtatagagataaatgtcacaatcattattacataacggaacagtcttacataaataaatgagaacaataagtcgaactaataattattccttggcgccatcaagctgactgggagacgccacctagacaagctcgtactcctcgtagtagacctcctcctgggctacttgttcttctcctgtggagggttatatat

SEQ ID NO: 36989 - DNA, 2662 bp, Zea Mays
gtcacaaaccgaggcccagcaaaatttccccgttcttgcttcccctccgtgtccactctcgatcttcccttccccctcggcgccggtctccaaacccgcttccgcaattcgtaccgcttccggttccgggggcgggcgggcagcaccgtctcggctctcggatactatggcttccggcgaggggtgggaggcggcggtgcgggcggaggtgggcgccgttgcctggtgggacgacctggacagcgccgacctccgcgccaggttcaaggccttcacggggcagcgcagcgactggcctcagcccacggtcctcttctggaaggaccttctcctccgcgtcgccaggcgactccgcgtctgctccgcccctgcccaccacgtgacgagcgcttggttcgcgcgccccggggggctcacgccgctatgcttgccgcaagttctggaagagatgcgtgcggatggggacgtactgctgaaatccgagctgattgatccatcctcaacgaacctgcaccagctggtcaggagggtgagactcatgaccatcagctccaggaaggcggtttggcaggaggatatcctcgtgttcaaattgttgattgagttgattgcaggaacgagctgccgatattgctaggcaattgagtgactctcattggacatcgacatgtgttgtcacgattagcaaattcaatagcttctttgttgacatggatgatgctcatattgcattatgttttttgacgcaacatgggaaagctaggtaccttttgggcaggaaacaagaccctattgagggtgtcaaggttgcactcactgcttcacaagttcctgctgtatccaaacttgaccatgacaccttgcacttagtctggacagaagagaagttgcaagaacagcttgatgtgcttgatcgacgatgggagatttcaaggcgaagggcattggcatccttcaagtctggagataaactagctgcttatcgttatgtgaggcagtctaaattattctcacaaagccggagcagatgcacacagttgttggaaaggattgaagaagtcatcagcctaattgctagtgctgaatcaaataagaaggtttatgaggcaatacaaattggtatcctggcaatgaaggacaacactgtcagcatagatgaggttaacatccacatgaaggagattgatgagcttgttgctgcacaaagagaagttgatgctgcccttgtaccactccagtcgttagatgatgaaggagatattgatgaagagttcagcaagcttgaagcagaattgcaggatgacgtccctcatattcatgttcaagaaccaatggcaccttccaacgaggaatcacctgatgaagtggttgaatcattgagccataacatgtcaagaattagactggagcccatctaaatgctccattttacgtttaatcaatttgacctgtacatagtgtgatctagtcaaatcatctagtcccaacaatgtgtcttatgtttcttgttacaccatccttataaaagggcaattctgttgcagatattcctcaatgttgcctgctgttttattgagcctccatggttcacctcctacattttttttgaaacggtggtttcaataccctaaaaacttagttcatatactgtttgatgcatatcgtttagtgactggcattttactttattttctcgatttcagcgcttatgctgtccataaatttagttattttcagtgcactgaatctgtggttcatatttgtatatggcatctattggagaaattgaagaacacatcttatcataggagaatcttgtgtaaatggtatagggttttttaggaatcaatgaaatgtatcactctttgtgatgttgatttgtattgtggcaggttttaagttcatcctttcataaagttgacttcctacaaaaatgaactgtctttgttgaactgtgacccgttcttatcattgctacctcaatggtgatggaaaagggagaagaatggatggatcatctgcaggtgcctctcattaagtattggcaacataagtgatttgtctgagatctattctatcttcatgatgatgctggcctttccggaccagtctttctccatatgagagagttgatcagggcatggataggtgctgactgctgaccaaaagaacaagtcgggatggagtagtaaaatatctgttatacaaaagcagaggaggaaaagaaaagataggcgtaggataagctggcaaggcacatagcatttcctcgatttgaggggatcaagatccatcaatggacgatctgaagataggcctgaaaactgacgacaacacctagtcctgaatgataagacctgaattattggaggggactttgcttgtgctttctccacatgcatagatgcatgaatgtatcagatgcctgtccacaccagtcttcaaagttatgtcacatcacgaataaaataggtagggaaaagcaatcctgtacctccatcaagtgatacaataatgttagataccataactagcttatcctcttacacagtttactgtagagtgatttgtgtgcaatggaaaacataagattaaaatgccagggcagatgactagtactagcagtacaccgtgatgcatgctttctttttctaggccaaag

SEQ ID NO: 36990 - DNA, 2306 bp, Zea Mays
gcgggaggcagcgtcgcggggtcatcaagatcggtggcactgggagtgtgagcagctgagtgggcgcggcaacggggccgggagaagacgcgcgtggctaggcgagatggagccggcgcctgcctggtgtcctttacgccaaacaataaagaaaacgactaagttttattgggttcaaaccagcccactaaccctcacgctgggcttcatcatccaccgtggcctgctagtggtggttgagtcctccgctaccgtgacagcctgcgagttcgccgtccgcccgtccgcgtcctgccgacctcatccacgccggcgccgcgcccgcctccgcgcccgcctccgcggaccgcatattcgttgtgacgccatcagctgcgccgcgcgtccttaggcctgcctcagccgcgtcgccgcgcccgcctcaggttgcccagcccccacgcgcgctgcgcctgcctcagtccccacgcgcgcccgccggcggccggcctcacgcctcagccctcaggcgctcaggctcagcagcgcctgcgccacgtgccgatgcgcgccctcctggccgccgcctccctgcttcgtggtgcctgcagcctgcctgtctggtgctagaccctcttttgatctgttcctggatctgccactgctccacggcattgtgcgaagccgcgtcgccagagggatcaagaggcctggcctggagccgtcagcgtggtggcgcctcctccaccccacagcacccatgtcctccgcctcgtgcctcgtccatcccgctccaaggttccgggttcggctactgcctctcccctcctccgtcgccgcgaggccgttgcttggcttcaggcctcggtgtggggctccagcgaagggatgggcattgtggcacgtctcatgcttcagaaatggtcaggatgggccaacaacatctgacgaaggtgatgacttcaagtatgttgcccaatcacagagctctggtggtgcagaggtgaaaaaggaagaggtgagtagcttaaacggggatcaggagcagaatttgaaggatggcgattggttcctgcaactgcagaagataaaagaaaatttactaggcaggatagtaaaatttcagacagaacgctggatagtaccttggactggacaaaccattgctcaggtgatgattttatggatcgccacattttggtttgtgggttcctggatagtgccattgttggctcatgctgctgggtttagcaaggaaacattgacgcacagaggccaggcactatacagtctcttgacagacataacagagggccttgccgggatcgcaatccttcaccaatgccttggtagattccgaccccttcctccagggtggttcgagttcaatctgaagggcaaatggcacttggacgtagcatttgggtgcctgctattcccactagttaatctactctcacacataaacatcagcctagttccagcgtcaccaggtccagctgttggggtttccagcgtagaacagtccatcgtggcccgggatccagtggcaatggctttgtatgctgtggtagtcacggtatgcgcgcctatatgggaagaaatcgtgttccgaggattccttctcccgtctctaacacggtacatgccactcccatggtcgatcctagcgagcgccgctgcgttcgcgctcgctcacttcaacgcacagagggtgatgccgctagtgtttcttggagtggtgatgggaggagtctttgcaaggtcgcgcaacctgctggcgtcgatggtgctgcacagcttgtggaatggatttgtgttcttggatttgatgaagtgagcagctgagctggagttattgtttcggttccaaccttggacatatctgcttgagcctcgtctgaaaatgttttggacaagattggttctattcttttttcaggattaaaagcaaggcatctaatgcagcggcggaacagaaggagtcgtgtaagtctgaagcgaagagggaacagttagtgcaggaaaatagaccacagaacagaagaaatgtttatttttttcagaattttgtgtagaatgatcagtcactgcagtcttaggacctgtgcccagcttccataagcatctgccacatttttgtaaattgcataggcgggagaatatttgtctcgtcgtgtatagaatcccccccccccttggaaaggagatatatatggtttcctgccattcaatgccatgctttaggggtggatattttaaaaccgaaaatcgaacccgaatagaccgaattgttggtctattcgggttttcgggttcagttccta

SEQ ID NO: 36991 - DNA, 3828 bp, Zea Mays
atcaattctccccaccccgacggccccacccaccgcttctctctctgttcctacaatgacccaccggtcagcccagccggagaacgccgcccgctcccccggcgtgccgccgctgtaattcttcctcctccacccagagctgcacgtccgcgccttgccaccgatggatcccgcgcccgatcagctctctatctccgcctctgccccgttccccaccatcccggctgcctcaagccccaggccccgcgccgcgaggacgcggcgccatgccgcgcccttccggtcggaccaccccaccgccgggagctggcgctccgggatcgatctcccgcgccgtccttcggcctccgccttttcccagcaggagcgttatccttccgtggcctcctggagcgcctctcgcgacgccaactttgtgttcgggagcggcgtggccggtgcgccggagatgaggaggagcttctcgtctggatccggtgaggcatcgttggctgaactttcgtacgcagttcacaggttcgcgttggacggttctggcaggccaagcgacattgacgctcccggaggagaaggtacgcttccagtgacagactccggtggtcgctttggggcccgtggatgcagttccactttgtatgagggcttctctctggattctattcaccatcagactgagcacctcgatgaagaacgtggagtcccgtctcaaaccatacaatgcgagagtgtggggatgcgatcattagcttcaccaacccgcactgatgagaatgctcccattgaatttgcaaagagaggggacagcttgcccattcaagattctgtggatcaaagtagaaattctggacatgatgctaatgcccaccatgatttctttgtttttggtggacatgctgggtccaatagcttcgctaccaatgcaactcaaactaataccagtaaggtacattcagctgataaagaaactgtaacatgtaactctgaacagctaaatacttcagtttctaaagatggaaattgcatcaagttcattttgcaggatgcaaagcatgtgtttggttcaagtgacaatgatcttccaggttcggaaccttgtgaaatttctaccacggtggaaacaccggatactataacctctagctttggatctgaagatgggatcgtgacggtttcttccataaaggtgccttgcaatattgaagtagtaccagcctcagaacttgttgaatgtcagccatttgatgagaaatctttcacctttgacgaccaaaatgtaccatataggaacaaaggaggggttaagggtatgggcatgaacagaggagcttttatgccaaataagtcctcagcaaaccaagcttcttttgaatcagtctcaagaagcgggcattgttctaaaaaagtgtctcctgaagaaaagttaaatttgaaagaagccagtagctctttgcaaacaacagaaagtgggcatgctgaagcagagtttacgtctgcagcaaatacggaacattctggtcaatccgatttcatattttctgcatcaactttccatcaaagcatgttgcacccgcaaagacgacataacaagaaaaaaagtggaggaatgggtaatcatgctagctctattcaaagtctcccttcatccgccattggactcgcatgctcagaagtctcaggaagtcagcaatgtgtggatttagctgccaagtggactgaatacaacaaaatagaacctaacagggttgcaatcagcagaggagccagatgctcaacatcagaaaactttggagaccatgacaattgtgaaacatggcgattaaggggaaaccaagcatatgcagaaggattgttaactaaggctgaagaatgctatacccatgggattgattctttttctccaaatgaagtttcaagaaaagcattaatgctgtgctacagcaatcgagcagctactcggatgtctctgggtaagatgagagatgccctatctgattgtcaagaagccattgatattgattccagttttctcaaggcacacgccagagccgccaactgcctacttgccctgggggatgttgaagaagcacaaaaggcttttgagatgtgtttaaagtctaatcatctatcaagcttggaccataaaattgtagaagaggcttctgatggtctacaaaaagctaagaaaatatctggtttaattagtcattctgaggagtatcttataaagaaagcatttgacaagatacccagtgccttacaaatgatctctgatgctttgtccataagtatttattcagataagttaatggagatgaaagcagaagcactgttactggtctgtatttacgttgcagcgatatgaagaagtaattcggttttgcgaagaaactctttatgtagcagaaagaaatagtgtgtgtttgtgtcttgacaagcagtcagaaagcaataacatggtcaacaatacttgctttgtgaaattgtggcgttatcatcttattgctaagtcatatttcttccttggaaagcttgaagaggctaaccagttcttaaagaagaatgatcaaataaaagtcatggggtgcaggtgtgggaatcaatctcaggactcaattttatcattctccatggctatctctgaactattgcggcttaaagctgctggcaatgaagcattccaatctggtaaatatttggaggctgtggaacattatactgctgctttgatgagcaatagcgagtccctacgctttttagcagtctgcttttgtaaccgtgcagcagcatatcaagcaatgggtcaaattttagatgcaattgcagattgttcactggctatagcccttgatgcagattatgctaaggctatttccagaaggtctagtttgtatgaacttataagggactatggccaggcagcaaatgatctccgtaggttgattgctcttcttgagaaacaactgcaagaagatatgaccatgccagtagagaggtctgagagtattcgtaacaatctgaatcgagccaatcttcggttttcttctttggagcgggatgccagaaaaggggcttcattaaatatgtatttgatattaggaattgagtcttcttcctctgctgtggatataaagaaggcctaccgcaaagcagcactaagacatcatccagacaaagccagtaactttcttgtcagaagtgaaaatatcagtgatgctgtatggagagatataacaaatgaaatacgcagggatgctgattatttattcaaaataattgggaaggcatatgctatgctttcagaccctacaacgagaagggaatgataacctggaggtggagtgatagaaaagcagtgcacatgtaacatgagcagcgggagcaatgaaaatgatgacaggacctcttagtgagagcatttaatcatgaagttggtaccgcacaaagctaccatactggagaggtcctatgtgaaattttgtgtgctctcaccaacgatatgatgccactggtgttgtccaatacctaatcacaaatgtcagtcggaacatgtcccacttttctgactgagtgctaataccgttacccccggggagcagtggatctttgtgttcatgcctgatcactgtttcgtgttctctgatgttccatttggatatgcagattgcatgagtctgagcacccgtgcaaaaggctagtttttttgtttgtgaagttgatgtcaatatatcaggtgctgtgcatagtagcttggagcagttcgagtggaatcaacaagagtggatagtgtaaatagaggtacacgtttcttgtacaccccctcactccaca

SEQ ID NO: 36992 - DNA, 769 bp, Zea Mays
ggcacagacttttatagccaaatggacgaccactaggagggaaactactccctgattatgactccattggagccatcctctatagatgttgcaatattttgtctttctttgatgggaatcaactatccaagttatttagaggaagcaaatagggttctcaaaccaagtggttggcttgttattgctgaagtgcgaagtaggctagacccgagcaacggaggtgctgatcctgaaaagttttctaaagccattatccagcttggcttttcgcttgtttcaaaggatgtgaaaaacagaatgttcattctgttctacttcaggaaaaaggaaaaaagtaaggtggcgaagagcatcgattggccacagctgaaaccgtgcttgtacaaacggcgatgagccgcttgtctcgtatccaccagtaatactgtagttgttgtagtagagctcttcaaaagtttcgtcaaaactgaaagtctagatttaggtccctccgtacctgtatggctgcatctgtgtgccacgctattccattattttccacattagctgcgtctttcatttgttggacctcacaagaaaagatcacatagggaacgatgcattgtttggaagcagatcatatataattcaagtctacttttcacatgctgcaaattttgtgtatggtccagcgaacgaacatctggaccgttttcatttttcaatctggaatctggatcagcttgaaggaagtgctatgaccttgaatacttgatgaacggaagcattc

SEQ ID NO: 36993 - DNA, 1963 bp, Zea Mays
gtggtcttcccttcctgctgtccgaagccgtgcgcccaaaccctaacttactactgtttgtggataagggtcttttaagtcttcatatgaaactatccttttgatatacagctgaaggacaataactatcatggatgctactgcaaattcagatgtgcaaagggctgaggaatttaaacttaaggcgaatgatgccttcaaggcaaacaagttctcgcaggctatagagctttacagtcaagccattgagctgaatagttcaaatgcagtttactgggcaaaccgtgcatttgcacacacaaaattagaggaatacggaagtgctgtgcaggatgctacaaaagccatcgaaattgattctagatattcaaaaggttattatagacgaggcgcagcttatcttgccatgggaaagttcaaggaagccctgaaggattttcagcaggttaaaaaaatctgcccaaatgatccagatgctacaagaaagttgaaagagtgcgagaaagctgtccaaaagatccgttttgaagaagcaatatctgctggggatgatgagaggcggtccgtggcagactctattgactaccatatcatagaagtagagccacattatgcgggaccgagaattgatggggaagaaataacgatagagtttgtcaaagcaatgttggatgaatttaagaagcagaaatgcatacataaaagatatgcttaccagattgtgctaaaaaccttggatttgctgcgatcgatgccttcccttgttgatgtggatgttccaaacggtggacattttacagtttgcggtgatgtgcatggccagtactttgatttgctcaacatatttgacctcaatggccttccatcagaagaaaatccttacctcttcaatggcgattttgtggaccgaggatctttctccgttgaagtcatactcaccctttttgctttcaagtgcctctacccaaaagctatgtaccttgcaagaggaaatcatgaaagcaagagcatgaacaaaatatatggctttgagggggaagtgaggtcaaagctgggtgagaagtttgttgaactttttgctgaagtcttttgttggttacctcttgcccatgtcatcaacaacaaggtctttgtggttcatggagggctatttagtgttgatggggttaagctttcagacattaggtccattgatcgtttttgtgaaccacctgaagaaggtctaatgtgtgaattactatggagtgaccctcagcctcagcttggaagaggtccaagtaaacgtggtgttgctctttcctttggcgcagatgtgactaagaagtttttacaggaaaataacctggatcttattgtccggtctcatgaagtaaaggatgaaggccatgaaattgaacatgatggaaagcttataacagtcttctctgcgcctaattactgtgaccagatgggcaacaagggtgcatttattcgcttcacagctccagaaatgaaaccagatattgttactttctcagctgtgccacatcctgatgtgaagccgatggcatatgcaaataacttcctcaggatgtttcaatgacggaatataacaacattgtttagcaatttttatcagatgagtctgttgtgtgtcagctcccaaatcacatttcttggctaggtttaagtatatgctcccttgtacaacaaatcaaatgatgcaagggattcaactgtcgatttacttggatggtacatccatttttgtgcacgagttgtgattcttgtaactatccgtaaagtcttagatcattagattttagtttacttgtaaaattgctaaatcgtcatttcctgtcttgcttatcagtgagttacacacgtttagtgcttttatcaaattacatgtgtttcagcggtacaattcctaatatctgagtaatccttccattttaacccacaatgttcttacatagtttgg

SEQ ID NO: 36994 - DNA, 490 bp, Zea Mays
cagtataaggcgagctctgttggagcaaggaatagaagcagtactcaggtacctcaaagaaaatttgcttgctgattaatgtttgtatgacaaattattgttgcagtcgtgcagtacgattttttggccactgtatcttgtgctacttatagtttttttggactgaattgtgtgtgacaagggagctttgtatatgcactagaggacggagccagtgatcatcgaccctgtactatacaacctattaaagtttgacgtgttctggataatagagaaaagtagtgtcctttcaggctcttcacttgtaactatcagccacattaggcgctacttcatgattattgtttttcagtatggttattgttttttcaatttgttgttttgggtttttttgggtgggagacaagtggattcatgtcatgaataatttttttttgttttggaggaatttacatttaagaaggtcgattagacaatggtagggactgta

SEQ ID NO: 36995 - DNA, 1772 bp, Zea Mays
gtcctacttcttcctcccccacgtcctcacgccgctccagggcacccacccaaaatcggccgcgtccgggccgacctcctcgaccaccccgctgccagggccagggaccccatcttctgggaggctattagggccagttcctcgtcgcgcgacgacggggaaggcggcggcgtcgccgtgcacgtccccggtggcgggggaggtggcgctggcgacgagggtgcggggaaggagggctggggtggttccaatctcggcagggatttgcccacgcccaaggagatttgtaaggggctcgacaagtatgtgattgggcaggacagagccaagaaggtgctatctgttgcagtttacaaccactataaacggatataccatcaaactttacaaaagggatttgggtggttttaatggggaagctgatgatgacgacaacgtggaactagagaaaagcaatgtgctgttaatgggacctactggctctggtaaaactttacttgcaaagacattagctcgttttgtgaatgtaccatttgtaattgctgatgcaacaacattgacccaggcagggtatgtaggagaagatgtagaatctatattatacaagttactcacggtggcagattttaatgtgcaagcagcacaacaagggatggtgtacatagatgaagttgataagatcacaaaaaaggctgaaagtcttaacattagcagagacgtatctggtgaaggtgttcagcaggcattgctgaaaatgctggaaggcacgatagtcaacgttcctgagaaaggagcaaggaagcatcctcgtggtgataatatacagatagataccaaagatattctttttatatgtggtggtgctttcgtggatttggaaaaaactatatcagagagacggcaggattcatctattggtttcggcgccccagttcgtgcaaacatgagggctggtggcatttcaagtgctcaagtgacatcatccttgttggaatctgttgagagtggtgatctaatagcttatggacttatcccagaatttattggacgcttccctatccttgtgagcctggccgctctaaatgaggaccagcttgttcaggttctgattgagccaaagaatgccctgggcaaacaattcaagaaattgtttagcatgaataatgttaagcttcactttacagatggtgcacttagaataattgccaaaaaggcaatgtcaaaaaatacaggtgcacggggtttaagaactatccttgagaatattctcatggattctatgtatgagatcccagatgcaaaatctggggagaagcgaatcgatgcagtggttgtagatgaagatgcagtaggatcagtggaccaacctggctgcggagctaagattctttacggtgatggtgctttggatcaatatctatcccagataaaggtgtcaggagacggagtggggagcgaaatggatggggaagctgagctttcgtcatcgagagccattggcatgtgattcctggttctgaccgcaccagtgtaacctgtaaaaatctaatcccagttatatcaatgattttaatgagtgtagtcgagcaggttcgtgtagataccagtcgcttataaatggcgcaatgccatgaattgtaatagctgccggatctatgttaaaacttgaaacaaagaaatggatcaagagggcatggagttgcaaatttgtgatctcgattcttttcgaaactgcattgcatagcgttatcctggcattgcttgaagagagg

SEQ ID NO: 36996 - DNA, 933 bp, Zea Mays
catatttgtcccggtggacacagactcgaaaacaaaagtacgccaccacaagcttgtgttgagggacatcagacttcctaggtggtagattgccgtatctgtggtgatcctaactcagtgcttcgttttgcttttatcgagtttgctgatgacgttgctgcacaagcagcactagcacttggtggaaccgtgcttggcttttatcctgtcaaggttctgccatcaaagacagcaattttacctgtgaaccctaaatttcttcctcacactgatgatgagaaagaaatggtatccaggactgtgtattgtactaacattgacaagaagatcgcagaagatgaagtgaagcaattctttgagggaacatgtggtgaagtttctcgtctgaggctacttggtgattatgtgcactccacatgcatcgcttttgttgagtttgtccaagcagatagtgctattctcgctctgaactgcagtggcattgttcttggaacgcttcctgttagggtgagcccatcaaagacaccagtccgctcgcgatcgccccgtgtgacgtcatactgaattcggctcatctgaagccgtcgtccagggcagcaaatttctgggcaacaaagccctagtcgtgtggccttagagactgccgcatcgcggataagtaattgtcgttgagcagagttctcgttggttaaagtccagtctagtaggaggcgcagagacccgtctgtatggtcgctgggagatctatcttgacctcctttttctgttctttttggtcttagttatcgtggttggattctatagcagccttgacaggcattcgaacaacaatgtttatggttatcctatccgctttggactcttaagcatgttttcccagtctttaaatattaagagatagtttggtaactatattttttcgagggattcata

SEQ ID NO: 36997 - DNA, 3516 bp, Zea Mays
tgcccgcgcccaaaccggttaggaaggaaataaaatggaagacgtcctcgtctccatcgccggttgtgtctcctcctatccatttctccagtcgtttctctcccctcgcgctgcccatggccatcccggaggacctagaggggacctcgggcgatggcggggtgacgaatcgcgggagtagagggcggcgaaaaggcgcggcgaaggggcgcgggaggggcaggccgcggagcgccgacagatcctttccgccgccggcgatggctggggtggcggtcggggacagggtgctcagggagaggaggcacacgaccaacgttttctgcgagcgcgacacggatgttgacgatgagtccatttattttcaggatgatgttgagacagttaggtccaaggactcaaggagtggcgatgttttacagactgcaaaaaagaggaagaagggaggtgcagggaaggtttctgtcacaaaaaggtcgaaaagagagggtgaagaacaaaagaaggcatcaccctccaaggataaagattgtgctgaaactaatgggaaaaggaagatgttgactggggataatgccctgatgtgccaccagtgccagaggaatgataaagggagggtggtctggtgtaattcatgcagaaataagcgcttctgtgtgccatgcattgaaagatggtatcctaacttgtcagaagacgaatttgctgcaaaatgcccatattgtcgcaagaactgtaattgcaaaggatgccttagaatgagaggggttgaagagcagcctccaaagaaggaaatttctgaagaaaatcaaatctcttatgcttgcaatgttgtgcgcttgttgcttccctggttgagaaaactgcgacaggagcagatggaggagaagaaattggaggctaaaataaaaggtgttttggtgaatgagatgaagttggaacaagctgaatataatctagatgagcgtgtctactgcaataattgcaaaacttctatagttgattttcacagaagctgcaagtactgcttttatgatctgtgccttgactgctgtgtggagatccgcagaggtgagattcctggaggagaagagataatgagagtaaagcctgaagatagaggccgagcatatctttttggtactactaactcaaaggatgggagtaaaaggttctccatgaggaggcacagctcatccctggagaatgagccttccaatgtagtaggttctagtgagggggcaaataactctctggagctgtggaaagcagaaagtgatggtagcataccttgcccaccaaaggagctaggaggctgtggcggttcgattttggatctcaagtgtttttttccagaaaagatgctttcaaatttagaagaacgagctgacagaattatgaggagcgaagtatttgcaaaagcagtagccaaaagaagtgaccagtgcccttgttatgaccattcaggaaacataagaactcaggacgtgcgagagactgcaaatacgaaaggctcaagtgataaccatctctactgcccagttgccactgctatcaaggaggatgacttggcgcactttcagatgcactggacaaaaggcgaaccagttattgtttctgatgttctgcatttgacttctggtctaagttgggaaccattagttatgtggcgggcattgcgagagaaaaagactaatggtgacgtagaagatgagcactttgctgtcagggcattagattgccttgattggtgtgaggtggaaattaacatacacatgttttttgtgggatatatgaaaggcagaacgcatcacatgacacactggcctgagatgcttaagctaaaggactggccgccatctagttcttttgatcagagattgcctcgccatggtgctgagtttatcagtgcattgccatttcctgagtacactgatcctcgatatggtccgctgaatcttacagtcaagctacctgatggtgcattgaagccagatcttggaccaaaaacttacatcgcttatggattttaccaagagttaggcaggggtgattctgtgaccaagcttcactgtgacatgtctgatgcggtaaatatattgacacacacagcacaagtgccctatgcgcgttatcaacttgagaagatagaggaaaccagaaagaaaatgaaagaacaagatcttcaggaactttatggtgtttcagaactaaacctatcatcaccttttactgattccaggaatataagtgctgatgaaatgtcaaagacctcatgtaactatggtttggacgtcaatgatgtaccacctgttaataatgaatctgaggtacaaagtggggcaggccagtgttcagattacattgacaaggatagaagttatgctgggatgcataacggggagagaaccggtggtgccttatgggatattttccgaagagaagattctgacaagatacaagattatcttaggaaacatgccacggaattccggcacatcttttgcaatcctgtgaagcaggttattcacccaattcacgatcagactttctacttaaccgaggagcataagagaaagctcaaggaagaatatggtgttgaaccctggacgtttgagcagaagcttggtgaagcggttttcattcctgctggatgtcctcaccaagtgaggaacttgaagtcttgcattaaggttgcgatggactttgtctccccagaaagcgtcaacgagtgcatgaaactgactggagagtttaggcggcttccacctgatcacagggctaaagaggataagctggagatcaagaagattgctcttcatgctctgaaccaagtagtaaatttcttggatccttcctcggagtggtcgaagagttggtttgcccaactcaagaacaaaaaaaaggctggagctgaagaacaggagaagcctaaaaggaagcgtggccgcccatgtcgcaagtccaacgatgaagctgctggcgataggcacagaaagaagggcggccgccaaagaggtcggaagaggggatacggcaagtccaaagatggcgctggcgctgttgatgtgaagcctcctaaaaggcagcgcaatctcctgaaaggctctggcaatcgtgtaggtggttgattgtttcactgctgactgggaagatggaaggcgtaagggctgtaccgacccaaccttgacgtggttattttggtaccaggttgtaagtgtagactctagattgtagaatagaccaggcatttcgtcacccctgggcgccattatggcgtcttgcttttgttcatatgtggcgattgccggttgacaccgttttggaagaataatatgctagatgctcgttgtaccagactcttcatgtagcgggctatggtgaattgctgttcagcatgtctgatgctgatgttggtaattgacctgaatagatgtggtcatttgaactctctggattctgattttacatatccaatccattggctgaggctgagcattcttagttgaaaaacga

SEQ ID NO: 36998 - DNA, 4447 bp, Zea Mays
  misc_feature (4446)..(4447): n is a, c, g, or t
cggtgatttccgagcgaattggtgaaggaccttgatttcctcaacttttggagtagccactagtccacttacagcatcgttttggtaatttgactgctgttagattgtgatttcttcttgctgctttcgcccttcactgttgctggaattacagaagatcaggctctttctttgtcagaagttaggaacattgcttctctttggcttctggtaatatggcagcgacgtcgccaaacaacataaggcgcaagtactcgtggtggtgggacagtcatatctgcccaaaaaactcgaaatggttgcaagaaaatctttcagatatggatagtaaaattaagctgatgatcaagatcattgaagaagatgctgaatcatttgcaaaaagagctgaaatgtactaccgacggcggcctgagctgatgaccttacttgaggagctgtaccgtgcataccgagctttagcagaaagatatgaccatgcggcaggagaactccgtcaagcacatcgaaaaatagcagaagcatttcctgatcaggttctaatggacttggatgatgaccttccagcagaaactgcttccattgaaactgacatggacaatccagacatggctccatatttcctctctttcatcaacgctagtgatttgaaaaggaatgctaaagatgaccaagattttgagagactgcagaaagaactagcaagcttgtcacaggaaaaccaagacctcaaggacaggatctcgtccatgttagagcaaggcaacaaggctgagtgcgagatccttcgcctcaaggagtcccttgctcaacaagaagcagaaaaggagtctgcagtttcactatgccagcaatcaactgctagactacaaaacctgaagtctgaaattatgcatacccaggagaaattcaacaggctgaaagaagagatgcaaactgaactacaacctttgaggaaaggagatgaacatttatttttacttgaaagagctaatcaggacttgcacttggagctagataacctgaaacttctgttgaaacagaagcatggcgaagtaaatgaaaagcaagatgagttggaaaagcttcatatctctacagaagaagagcatctcaagcgtatgcaagcagaaatggcacagctttctttggaaaaacagttatcactggcacaagacaaactgaggcatttgactcttgagaagcaggttgaagcacacaagataaaggaggtcgaaacgagcaaagttgtgattcagaaagaactggagaagattcttgaagagaaccaaaggttgaatgaccaaagtcactcttcttcagcagtgataattcgtctgcaggatgagataatttccatgaaaaatgtgcaacgaagattagaggaagagatttttcagcatgtggaggaaaagaagacacttcaacatgagctttcttatcttaaagaggataggagtgacttggagaggaaacactctacaatcaaggaacagataggatctatgaacttgaatttggaatctctacaagcactagcacaagagctgagggatggcaatgttgagctgaaagagattgtcaagaaccatgagagcattgaacttgtgcatatcgataacctaagaaagttggagaggatgtcagagacaaatgcacatttagagaagtctttgtcagctgcaacaactgagcttgagggactgagggagagcaaggtggcattagaagaatcatgcatgcacttcagatccacgattaacactcatcagtctgagcgagctgtgcttgtagcgcagattgaggtaatttctcagaccatggaggagctactggagaagaatgttttcttggagaattccttatctgacgctaatgctgaacttgagagtttaagaatgaagttcaaagaactaaaagaatcttcagaagcactccaaaatcagaattctgtacttcaatctgataagagaactcttgtccaccaggttgagggcatcactgtaactctgctgaatttggaaaggcaatacaaagaactcggaaggcggcactcagatctgcagaaggagaaggacttggtgcttgatgaagtgatcaagatacaggaacagataaggcttgagaggaaggagcatgaagattgtacacagtcaagcaacattagatttgatgctctacagaagaagattagtctattgctagaagagggcaggagtagagaggtgcagcttggtgaggaggagctcaagattgtcaaagctgagatagagatatttgtcttgcagcagtgtttgaatgacatgacagaagtaaattctgaaatcgcagaacaactgcgaaagaataaagaaatatgcaaggtccaggagggaaaaatctacagcttatcacagcataatcagaaactaactgaagggattgattcagtagtgagagtattgcatctggatcataagtatgaatccttaggccaaatgaagcttgaaatcattgtgcagctcatcttaaatgagatcagctgcctgctgaataacatatctgatgcccaggatgtgaagcagaaggagcttgttgagaaatcacttgtagttacacttctggagcatttcgggcaagaggtggctgacttgaggtcagagcggaatgtcttgaggcaagatcagcagataaagattgaggaactgctccagctgcagagagaaaaggaggaacttatgaagataagtgatgaattcttggaagaggtggaggctcgtaatcacaaagtggatgagctaaaggctgaggcgaagttcttggttgtaaggttctccgaactgcaagagtctaggaggtcattgcaaagcgagatcaccaagctattacaatcgaactcttttctatcaaatgaactaaatgattccattgaaaaacagaagaggtttgaacatgatttcagcaatcttgttagtgaagcagttagtaaagatatcctcagtgtgatctttagaagccttcatgaagagaggacattgcagctgaagtctttgcataataactttggctgtcttcaaacagcaggcggtgagctttatcaggagatcaagatgatgaacaagaggcttggagacatagaaatggagaacaagtaccttggcaaagaactaagtagaactatgagtgtttatggtggatctattgtgcaaacagcaacaggaaaaggaaatccagggcgaagagatgccaaccttctgaattcaaacaggaaaatccaacaagattgtcatgtaaatctggaggtggaacaagaggaagtttgcaatgctgattttcaggagtcaaatgaaacactacaggatgaggtccgtaagttaaggagcgaagtggaaatgcttaggagcaaggagaaggctgtgttcaacatcaaatcctgtgatgaagagatcatgaaattgctggctaacatgcaaatggctatcatgaatgcagctctgttcaaagagaaggttcttgagctcatcataacatgcgagagttttgagataagtgccatggtacagaaggaggttctgaaggaagaaatcatacaaagaaattcatatgtagatgagctgaaggacaaactaaatgctgttgagattgaaaacagaagactgaaggtcgacctaaatggtgatttcacaatgttagggtcattgcagactgaagtcagtgccctggaggagcaaaccttatctctcgctaacgaccacttgcatacaaataagctcaggatggaggaaaatgcattatctccacaccttgtgaagaccacaacaagatccagtggcgaagaaaatgcattgaggatggtgaaggggatggagctgcaaaaattgcatggaacaatcaaagcccttcagaaggtggtcacagatactggtgtcctccttgaacaagagaggcttgatttcaatgccaatttaaaagaagcaaagaagcagatcgaggtgctaaagctcaaggagatcttggatgatgatataattgaaatgaactacgagcaaatgttaaaagacatacagcttgacctcattcaaacttcttcaggccagaaaaccagtccgtttggtcaggaaaagaaaaatgtagcacaagtagatgacaagatggtaaactcacgcggttctattgggccgagccatggacatgtggctgacgacctaagaccgccgcaaagtgagtcatttgggagagagaacaatttaatggtcgtgaaagagctcagcattgacaagcaagagttaccgaggtcgcttgctatggagccacacgaggagtggagaaacaaggtcgtagaaaggttggcttctgatgcccagcgactcagtgccctccagtccagcatccaagaacttaaaacgaacgccgaaacatccgaagaggtagagctcgggagtgtcaggtaccaaataacagaagctnn

SEQ ID NO: 36999 - DNA, 1526 bp, Zea Mays
cgacatttggcgtagtctggttgcttctagaggatggcgggatccgaaatctgtgaccctccgcgtcatctgaaccctagggccacggcccgccaccagtagctcgctcggctccagatcccgcgccacaccacatagcatggcagaagatacagcgtagcaaggtccggacgttcaccagagggcagtggggatggggatggggccggcccgcgtgcgctctccgtgcgggaggcctcggcggcggtgccgctcccgcacccatcggcggcggctgcgctcgaccttaggcggcggggcggccaggctggcgctgtgacctgaaacggtggcgggatggggaggaggaaggagcacctagagagagtccgagtggaggcgtactgctgggacgtgttcaagccagtggagatggtggagatcgacagcatggagaagcttgacgacgcgttcaggatggcaagttggtgtcagaaatgcatctacctaatgcccagaatggagaagatagcaggacaatatcctgggttactcagaccttactcctgcccctctctcctgtttattctattatctggctccatttgtgcagcacaaaacttagcactttgtttcattttggaatattcttgcttttagtttctgatttaattgtagcttcttgctaagtgattgacattatctggttcttattcatttcaagttgttctttcaaaaaaattggaataaaagtcattttggaatcgtgtggttctattgctgctagcttagtaaggtaaaatagcctgacctcgtcaacaattagttctttttaggagaaaaagatgcaacaaatgaggattgatgcttcccgcaagagtacatgatgtacaatatatatctttagatggtttcattgttgtagctgatactaagaatgtagcttttttctttattcaaggtggtcgcagcgatctgtgattgtttatgcccaaagcgtagggttacccgtcttgttagcgctaccttagtgccgcttttttgaaccctagacatctcagaagaggggaagcactcggagatgaagctgaagcagagcaaacgtgagacgcaccgtgggcattctctatccaaggggaaggttgctggaacatgatctggattcaaaatggttggctattgttgatatatcttgttctccccacaattttatgttctacatgagtggagagatcatatagctcatgagaaagatgagggtactggttagtggttgtatactgccaaataaagcttgaatcgagataggtgttgttgtttttttctttatatcctgttataatggtgcaaaattggatctacaactttgctagctcccccccccccccccccaaaaaaataaagcagatacctacagatgttggacattgtaaaagaattgtaaaatcaaaatatccatatgttgagaacaatgttgtcgtaatcgcttaccttacactgttcgtactgcaattgattattcttatgcctttaaagaagtagctgaa

SEQ ID NO: 37000 - DNA, 826 bp, Zea Mays
gcccggtgctcggtccagacacggcactatccatcggaccgtgccggcacgagcccggctccagtcgtgtcgtgccgtgcccaggtattatgggccgtgccgtgctccggatcggcccgattagcccggcactagtggccatctataggcgggggccactagcagtgccacgactacaacaacgtgtttcttttgtctgggtccgcttcctccacctgcctcgggcagtcgggcttccgcgaacagccagcaagcaggcccgctcatcagcattcaaagggcggaaagcggcgacggagcgccctcctccggcccccatgtccccatcccatccaatccgacggtattgagcggcagcacgcacgacgttgttttcgtgcgcccggccgttttgtccacggcgagccggagaccgcaccggacgatgatgcctgccacacgcgacgcgacgcaacgcaacaaggtggccgccactggaccactgatttactaccgggtcgcgcgtctgggccggggccgggcggccgttggtgcatgagcatggcgcggccccgcggttgctgcggaatataacgaccggctaacggtcggggctaggggaggggaggagccctgattggcgctgtcggtgtctttgctttttggtccgttggttgtgtctgtgtgcgctttaaatggtggatttgatttgccatgtgatcgcacattggcacttgtacgtgctctgtcgctaccgtccgtcggcggcaaggacatgccatgcatgtctagtctatatctaatattacagtttttgtgttttcatatatatatatatatatattca

SEQ ID NO: 37001 - DNA, 913 bp, Zea Mays
cagattgtagccaaagtccctgagggtttgcctgatccaaagtagttgcgcacaacactgtcctgcggcaacgtactcagcttcagcggtggatagggcaacagaagtttgtttcttggaactccatgacaccagggaccttcctaagaattggcacgtccccgatgtactcttcctatcgaccttacatccagcattttcggagtctgaatatccaatcaagtcaaaggtagacccctttggataccagatcccgaagcaaggcgtagctactaaatatctaagaattcgctttacggccactaagtggcactcccttggatcagattgaaatctagcacacatgcatacactaagcataatatccggtctactagcacataaataaagtaaagaccctatcatggaccagtatgccttctgatcaacagacttacctcctttgttgaggtcggtgtgtctgtcagttcccattggagtctttgcgggcttggcgtccttcatcccaaaccgcttgatcaagtcttgtgtgtacttcgtttgggagatgaaggtcccatcctttagttgcctcacttggaacccaaggaaatagcttagtttgcccatcatcgacatctcaaacttttgagtcatcaccctgctaaactcttcacaagacttttgattagtagaaccaaatattatgtcatcgacataaatttggcacacaaaaagaccaccatcacaagtcttagtaaaaagagttggatcggctttttcaaccttgaaatcattagcaattaaaaagtctctaaggcattcataccatgctcttggggcttgcttaagtccatagagcgccttagagagcttacacacgtggtcggggtaccgttcatcctcaaatccagggggttgctccacgtacacc

SEQ ID NO: 37002 - DNA, 2794 bp, Zea Mays
aaagtgcgcctctttgaccaccaaagttctagcagaaattactcaactgcccagcgcatctcacgacccggcctcgcagctccggcgacgatccctccaatggcctacgccgccgccgttactctccggcgcgtggtgcttgtgtccgctgcgctgcggctcgcactagtggtgttcggggagtggcaggatgcccaccttgaggtgcgctataccgatgtcgactacctcgtcttctccgacgccgctgcctctctggccacaggcggttccccgttcgcccgcgcaacctaccgctactctccaatcctggccttcctgcttgtcccgaactcactcctccatgctgcctggggcaagctcctcttctctgccgcagatttgctcgtagggttgttcataaacaccattctggaactaagaggaattcctgagaaaatgcggatgtggtctgtggtagcttggctgttcaatcccttcacattcaccattggtacaagaggaaactgtgaaccaatagtctgcgcagtcatactctggattctcatatgtttgatgaagggtgtaagctctgaatctcttatgctgtttgttcagttattgctacctttgttaagttgctatggtggaatgtgataggaccattaaacatgttccaacttgtgctctcatgtactaatgtatgcttttgtaactgtgtgtttgtttttaattttttttttatttcaacatggggtatgcatattattgttctatacacagtatataattttttcatatccgtgattttttatgcaatgtctcagatatcttctgtttggttttgatagccaatattttatactacattgttagatcaacctcaccatatatgtagctgaattacaagccctcagtttgtcctgtgctaatagatctcttcacactcatgcatttgccaagttcagttttgctcatacaatgaaatacagtacacacttatgtactcatattcagtgaaatttgtagttagtgatttcttttggccttgaagtgtataaagtactagttatgccacttgttcaaacagatagtttatcagggcttgaccgctgaattttggaatatccatcttcttatatgcattgagtgtagttgtttctcattgaagggcagacccaatgccagaggctgcaaaacaagtcgggtctggggaagggataagctgatgcaagcctttccccgcaaatgcggagaagccgcttcgaacccgcaacctggtgactcagtgagacagttctcgacgttgcactaggcctgtccttcttgtttctccctgaagacgttactaattcatgttcggctttttttgctgtgttcattaaggtctttttttgaatggatgaaatccctggcccatccatgtggatggccccagtttaggccgtgccaaactcatccaaaggtgtctgttgctatttagttcatgaagtcaaatgttaacattatttgaaccatatggtttgatttgtactacttgcttgttctgcaacctccccaccccaccccccatccccacccccacacccaccccgacccaccccccaaaaaagcttatgtcatttactttgcagttgcatgaggacattgttattcatcttatgtctaggaagaaagattgcttttaaaaatttgctggatagattaacattggtatgttacagtttaagtgtcttttgcaggtagagtgttgcaggcagctttctggtatgggtttattgtgcacttcagaatatacccaatcatatatgcaattccttttgtaatagttcttggcaagggctatgctggtcctgttggtaggcctactcttacgatgtggaggtccaaacaacagttgcaagatgataaagtcagtcaaatagaagaaccaacatcatttctggccactgtatggggttttctttcaaacttcataagcagaaatgggatcctgtttggattactctctggatccatgttctttgcctggaccggtgttttcttctatctgtatgggtgggacttcctaaatgaagcattactttatcaccttactcgtaccgacccaaggcacaatttctcgatatatttctaccacatatatctacaccatcagcaagggttctcaagtattcagaggctcgcttcgtttcttcctcaactgatcgtgcaactggcactcattctacgcttctctagggatcttccattctgcatgtttctccagacggttgcatttgttgcttttaacaaggtgatgacagcacagtacttcgtgtggttcttctgcttgttgcccctcattctcccttggagcagcatgaaacttaagtggaagggtctggcctgcgcggtagtgtggatggggtcccaactgcattggctcatgtgggcttacctgctggaattcgagggccgaaacgtttttgtgcagctctgggttgcaggcctcatgtttctggctgcgaacacctttgttatgctcatggtgatgaagcaccacaagtacactctgctcttctcaacgccgctgaagtctggcaacaaggttgctaccaagaaggaagaatagcagcgtttgggctctttccattttgccgactgatgtatgattaggacatggatcatgtttgtttctctttttttttgtgtttctgtcagatcacatgtgacttgaatcattgtagtttttcccgtacataatgtggtgacattgcatgagaatattttttggttaccagaatttgcaattggttcagattttattacctga

SEQ ID NO: 37003 - DNA, 918 bp, Zea Mays
caagaccccggcacctctctctctctccatccagctgcttctccaatctccaccgtccctctctctcgtttgcttgctagctcttgttgcacaccacagccagctctagcttgcattggggttcttgcccttggcaaagccctcatttttcttggtgtgcatatagcttgcatgcatttgattgggtttaggtttgccagcagcagcaatttaaacgaataaacaggatccctttctttctccaattttcgtgtgcgtattaattagcttgcatgcttgggccggcgatgtctgagctcgtgtgtggcggctgcttcaccatgctggtgcactcccgcagcgcaactaacgtacggtgccctcactgcggcaggctcggctcgacaagatcagcaggaaaccagatggggcacctgtcgtgcgggcaatgccggacaaccctggcatacccgccgggagcgacgacagtcgggtgcccgacatgccgcaacgtcaatccagttccaaccagggatgctcggccgcagcagacgatggttctggtggagaatcctaagacgctggatgaaaagggcaaactggtgagcagtgttgccgttggtgtcacctcgtggaaaagatgaccaacaactcacttcattccggctaatctcgtcatcatcgacaacgacgacagctaatgtaaaatcaagtgtgttttgaagcgcttgatgtttttcatataaggaaaaaaagaaaagaggcagagtagcagtagctgttgagcagcaaaagatctgaaaattgtaaatacattacatgctatagccacccgtgtgcgcctttgtgcccctggaattgtattcttgccctgccaaggtcagacacgctgagtcgactctgcactctagcgctttatctgcaaattcggattctccg

SEQ ID NO: 37004 - DNA, 2261 bp, Zea Mays
acctgtctcattctcacccacgcgcttctctctctcaccagcaggccacgccgccgctgcaccaccgctctccggatcatcggctgtccccctcctcctcctcctcgcccactcaccggccatccctgctgcggtgccgcgcgttcaagcaggaggccgacgacggcgacggcgacccgactgaggccgacgcgcggaagcgcaggaagggcccgatgtacaagctcaaggcggcgatccagggcctcgcgggatctcgctccgccgccgcggaggtgtatgggggagagtaccagttccagcgcgccgtcgagaatttgtgcgagccaaggttccccaatccactcacgcgcgcgcatcgctgtggtttcctgtgttgctttccaccctcgcgcgctcttcttcttcatggagccatggcaggaagcggcaacaggagatttggccgggatatggtgtctagcagcacacatttctcccaatggcagatggtctgggttggagaccacgttcctggcggcagagtcgatctgcaatgtggaggtccaatctggccaccgatgtcagctcgctccggagccaattccgattccctagcagtgacgacgttcagatgcagcttcagatgcagcgacgacctctctctccatccatggatctctaggcaactgcgaacaagggaaccaggcatcaaaatgaagggaaccaggaatcgaaacggccccgagaatcccaaagcacgagaaggggaacaagggaactaggcatcgtgaagagagcccggggtgatgaattgttacggttcatggacggagcaagcaaggagcctctccgcaaggtaaacactaacacgcgattcctcttcaatccccggtcgtttcccgagatctggtgttataacccttgtagcttcgactcctagcttcagttggggggcaataacggattcggaaattttgggctgaaagttgttccttgtgttgttgaggtgctggaggggagtggttaattgtggtgtagcgctatggtgtcaaaaggtggatggagtccgtgacattttctcattgatttattttagagctgcttttttgtgtgccataattaggcttgcccaaccggtgcaggtgacttatttagcatgctgaactgtaggtagtattctagtttgtggccgtcgtgcaagtacatatgtgttggctttcagttcaaccgtctttacagtattcggaaattgcttaaaattcagtgttgatcatagaggcagcacaaatgtttcctattcagagctggtaatggtatggtcattactctgaatcatagtatcagacaatggctggcatagtatttatccaccatgaaaacacaattagcttgcaggtctaaatttggcatcctctacatgaactgaaaccagttaacctcttacgaagtaagaatccttggccttgaacaaatcaaagctaccatgcttgatggaaccaaacatttcctcaccagtaacacatttgttgaaacaatactttcattacactccagcactgtcggtccagtcactattcccttatctatacttcatgggacttgaaagtggcgaaagaggagcaagacattgggttttatgctggttttgttggggctacctatttccttggaagggccatcagcgccatgccatggggcatgttcgctgacaagtatggaaggaagccatgcatcgtgatcagcatcctctcagtgattgtgttcaacacactgtttggacttagcacaacttactggatggcaattgtgactaggggattacttgggttgctatgtggtatacttggacccatcaaggcttatgcttcagaagtctgcaggaaagagcaccaagctctgggaatctctcttgttacatcttcacgagccatagctcttgttattgggcctgctattggaggcttccttgcacaggattccggctctcatcaagtgactcctttccctcacattgactttgcggacagatgtctcaattctagtggtggagctacgaacaacaatccgatgtcctgatcgagagcgatggagctaatgtttgaacttgtgtgtttgaacttgtgaactaaaaatgtgaactatggatgtgaacttgtgtgaatatgtgaacttatttatttagacatatgtgaatttgtgaacttatatatttggacttgtgtgaatttgtgatatgaacatatatcaatgtgtttgaaatctgtattgtatgtgatata

SEQ ID NO: 37005 - DNA, 1625 bp, Zea Mays
agatacggaggggcaaggtacgtggtgccttaccttggctaaggcactgaatctggatccctcctccacctccacgcgagcggacgacacgaagcggccatagccgcacgttgggatcccctccgctacgcctctcgatggtctccgccagcgcgccgccgccgcaggcccagtccgacgcggccgggtcgggggaggaagtgagcaagaaggtgcggaagccgtacacaatcaccaagtcccgggagagctggacggagcaggagcacgacaagttcctcgaggccctgcagctctttgatcgtgactggaagaagatagaggcttttgttggctccaagactgtcatccagattaggagccatgcacagaagtaccttttgaaggttcagaaaaatggaaccagcgaacatgtcccacctccacgaccaaagcgaaaagctgcccatccatatcctcagaaggcttccaagaatgattcatcttccatccataggaactctggcatgaacgtgcctgtttcttcatgggctcatagttccatcccacaagctgttgcttcatcaatggtgaaagatttaggtgctggaacaccaggttcaaacaatttttgctcaagtagtactgaaggccttccaagaacttggcaacctggtgaaacaaatgatccaataaatcaaattccgtcactccgccttatgccagattttgcgggagtgtacagcttcttaggtagtgttttcgatccaagtacaagtggtcatctgcagaaacttaaggagatgaatccaattgacgttgagacggcactgttgttgatgaggaatctctccatcaatttaaccagtcctgattttgaagatcaagtcttgccaattcgtgatgccagtactcagcagagcaggcctgaagtccgaaccactatcttatagcatagactcttatctcctgacacccacaaagggatgaaagtgaggaagttgttgtccttatacagcgcttctgatggacctgggctagggagctcaagaagttcagctctagcgacgagcgcgcctttcatgtaaggtctctcggcatataatttcagttcgacagacctcaggaggatagtgcctgccctggcgtagtagcaccgatgagtgatgaaggaggcgtttgcaccttttgtgcttctcgctagctccatgccttcggctgacgattgtgaagcgtgcacccttcctggcctttcctatccccaaaagctcggccatctaggctcgtgaaatgctgcttcagatcaaggctgtccttggaaatgggaagatgaaaggagaatctggcatgtgtgcaaagtttcatttgaggagttgaggcgatcatggcgctgtaaaatgcggcttatcttcccccttcagggctggtttggtggaccaaccctcaaacatttgcaattcctatgtacgtctgtagtgcatcaggtgttgttgcccacgtgtaaaaggaaaataaattcacaatgtaaaggagacttgtgcgttagcactaccatttgaatttatgaaatgtcaaagcagcccagcgagtttgtacttgccacatttttttgtcgctgtatcagcagtctggctactctggcatcg

SEQ ID NO: 37006 - DNA, 3505 bp, Zea Mays
ccacgatactactcaatttcatcatctccaaagatggctccctccagaattcgtgtaacatgtgcattagtttttgggccttcaccaacaggaaggatccaccaaggagtttgttcaacatggatgaagggctggctccttttagaggtttcttgcaggaaaggttagcactgaaacaatctggagcagaactgggcacttcaatccttttctttggatgcaggaaccgtaatatggactacatatatgaagatgagctgcaaactttccttgaggcgggggcgctttctgagctaattgttgcattctctcaagaagggccaacgaaagaatatgtgcagcataagatggtggagaagtctgacctgaaaattttggaaccaatggaagaggaagagtatagctctgaaacatctaatgaagaagatggcgaaaaagaaggaaatgctgctgagagtgatgtcttcagaccagttgatgtagatccagcatgtttaccaagagtagggatgatatttgactcggaggaagatgcctttcagttttatgtgacgtatggttgtcacgcaggttttggtattacaagaagatctaacaatacctttgatggtttccgctatcgctctacattcatatgttctaaaggagggcagtctagactgagatctggtgtgacaaaacctgcaagaaagcgaggtgtgaagactggctgcaaggccaagatgattgtgaaggatgcccattttcaaaatcgctgggaagtaattgttcttgagttggagcacaaccatccattggatccgaacttgcttaagtttaagagacatttgaagaactccccttttacgataaatccacctcaaatttgtgagtctgagggacaacagagcaactcagctcttgtacattcaagcagagttgttgatactggtataacttcgtcttctacacagattgaattcaaagccaagatagatagaaataggaaattgaagctcgcagaaggagacttagacgccttgttggattttctcaacaaaatgcaagaccaaaacccttgtttcttttacagtttagatatgaatgagcaagggcaactaaggaatgtcttttggtctgacgccaaatcacgcagttcatacaattactttggtgatgttgttgctattaatgtcacaaacttcagcgatcagtatgatatgcagtttgtgtcattcatgggaactaaccaccatgcacagccagtgttactaggttgtggcctgcttgctggtagatctcttggggcttatgtgtggctttttggtacatggttaagatgtatgaatgccaaaccaccacattcaataattacaaactactgtcatgatgtagcgatagctatcaaaaaggttttccctaacgcacgtcaccgtttttgcctttcacacatcttaaatgtgcttcctgaaaagttggaagaaattgataacaaagatgaaattatttccacattcaccacactagcctatgattatgttactatgactgattttgacagagagtggcaagatactatccaacattttcgtttggagagaaatgaatggctgtccaaactatatgaggtcaggatgcagtgggctcctgtttatgttaaggattcattttgggcaggaatgtctgtcacagacagaagtgatagtgtaactgactattttgatggctggttgatgtcaggaacctctttgaaaatgtttgtagagcaatatgaggaagctgttaaaggaaagttagaaaaggaatcttacgaagatttacgatcagctcagatgaggccaccaatggtgacggggttgcctgtggaagatcaagcagcaaaggtgtacactgcagaaatctttcagaagttcttcaatgaaataggacattcatttcattgcaattataatatacttgaacggaatgagtcagtggttacatacatagtttcggagcatgtcgatcaaacaaacaaggtagactacaaagttgcttatgataatgttcaaggtgacatatggtgcctctgccgtttgtaccaatccaaaggaatattgtgcaggcatgcactcactgtactgagacaggagcttgtgctgatgattccacaaaaatacatcattcatcgctggtgcaaggactgtaaacaaacttgtgcttccatatcccagcctgtctcagcaggtaatcaggaactgggaagctacgatgatctgtacaaacttggccacctatactttgcagaagttgtggaatttggttccatgaactcagaatcaaaagaatatgctttgtcaatcatgagggaagtcagggataaagtgatttcatatgagaaatcactaagagatcaaagggttgacagccatgtttcaacagccaactttgcatacaatcctgtgaatgaggattttactgatgatgctttgcctatctctcttagtacaaagggctgggatcttacccaaggccaatctaaacgttcccgaaagaagaagctggcgaccccaactgttcttgatactttgaaaaagaaaactaaaagggcatataacaaaaggaggaatgccactgcaaacaccctgaacacatctgccactgcaactgacggcataactgatggcacaaatgttcagcagaatcctgtaaatgagggatggcagctagcgtcgactagtgctcccgaaactttctcttatggagtggagaacatttcgtttgatttgtcacaatacaacaatgccccaagcttccactggcctgaaagcagcagcaggtctcagctccactgagtaggcagcaatgcaatcgtggatgccttccaaatagactaagttctgacagtcttgtaagggcttgttcggttattcctatcttctgtggattagatgagattggaaaaaaatatgaaagattttgacttgaaagattttgacttgtttgggattaaaacgcacccaattccactcaatctacatggattgagagcaaaaccaacaagccctaatttggaaaaaaaaaaaaactagaggtgatggatcaggtttgacctttctattcctgcctaggactctaggagtcagtgaccacctgaataaaggtgaaaagggaagggattcaatgtggtgaagtgacatctaccatctatgtaccaatttagtggaacgggttctctacataatcattcctttttttccttccatggatatttgcagctcccgattgatttatctgaaccatgtaaattaggtcagatgcccctgaatcgacctgatgtttcactatggatccctcaggaaatcatatgccccttctctgatgaagctgtttgtaacaagatgtttattgcttcaccaagttcatctgttttcgctaatatttgttccgttcaatttctatgatcaaattattatatttgttctgtccagataatattttgtatcattttattctttttttctcaaacatgcaggagaactgtgtg

SEQ ID NO: 37007 - DNA, 1366 bp, Zea Mays
aagccagacatctcatgccacgcctctctatcatcattattcaagacaccggaaatgttaccgcataattttacttaaataaatattgtgtgcctttggaaataaaggaatggttattataagaagaccgaaaacccggtccatctctgtgtggccggtatgcttttaaaaaagaactgctacaaagaattgagtgagaggaaacaatcaggcctgatttgataaacaacccccacacgtattggtgaaatgcggcagaggagagatcaggacaccgggcgtgcaaccatgcagggagcaaagacggaaggcagggcggggcgctgtagctgtaggtcttctctccttttcatttcagtgaaggaaactggaattctcgcactaccgcttattatctgaactcgtacactggccgacctcacttggacttggtgcgtgtgtggtcaggaaggcgacgacgacgacgatgaaggttttgctgctccgcacaccgcgcgcagtggcgacgcgaccacagccggtcgccgcctcggatcgaggaggaggagccgatggaggtgcttgtggtggctacggtggcgaggacattcattggagtgctccattcattgaggcagcatgcctaagataaagacaagccgtgtcaagtatcctgaaggatgggagcttattgaaccaacaatccgtgagttggatgccaaaatgagagaagctgaaaatgatccacatgatgggaagagaaagtgtgaagctctctggcctattttccgcatttctcatcaaaggagccgctacatatacgatctttactacagaaggaaggagatatcacaggagctttatgagttctgcctagaccagggttatgcagaccgtaacctgattgcaaagtggaaaaagccaggttacgagcgcctttgttgcctccggtgcatacaaacacgtgaccacaacttcgcaacgacatgcgtctgccgcgtccccaagcatctgagggaggaacaggtgatagaatgtgtccactgcggctgcaggggttgtgccagcggtgactaatcttgtcatcatgttgttgggctcacggctcatcatcgcaacgttaaccagatgaggtgccctgctgtgagcatggatccgctgcggtgattagcatgagtttattgggtaactagtggggagtactaaatttcctcacgtttggacgtttcaactgttatgtactacgctttctcgtgtctcagatgcttgcgttaaattagtggcgcttttgcattttatatgagtctgttaattggttattgttatgggttctaacaaaaaaatttctacgatttactacgtttttttttcaaaaaatcagaaaaaa

SEQ ID NO: 37008 - DNA, 1538 bp, Zea Mays
gcagagggagcagtaaggatgaatgatgttactgaacttggttggtctctggtcgacgtgttttgctcagatggaacctttgcaagggcagctgttcccagtggagcatcaactggtgtatatgaagctctggagttgagggatggtggctctgactatttggggaagggtgtctccaaggctgtgaacaatgtgaattctgttattggacctgctctgattggcaaggaccctacagcacagactgagattgataacttcatggttcaacaacttgatgggaccaaaaatgagtggggatggtgcaagcaaaagcttggtgctaatgcgattctggctgtgtcattagctgtttgcaaagctggggctagcatcaagaggattcctttataccagcacattgccaacctagctgggaacaagcagttagtgttgcctgtccctgcattcaatgtcatcaacggtggttcccatgctggaaacaagcttgctatgcaggagtttatgatccttcctactggagctgcctcatttaaggaggctatgaagatgggtgttgaagtttatcaccacctgaagtccgttatcaaaaagaagtatgggcaagatgccacgaatgttggtgacgaaggtggttttgctccgaacatccaggagaacaaggaaggacttgagctcttgaaaactgcaattgagaaggctggatacactggcaaggttgtcatcggaatggatgttgctgcttcggagttttacagtgacaaggaccaaacctatgacctcaactttaaggaggagaataatgatggttcacagaagatatctggcgatagcttaaagaatgtatacaaatcttttgtgagcgaataccccattgtttcgattgaagatccttttgaccaggatgactgggttcactatgctaagatgactgaagaaattggagagcaagtgcagattgttggtgatgaccttctcgtcaccaaccccactagggttgctaaggctatcaaggagaaatcatgcaatgcccttctgctcaaggttaaccaaatcggatctgtgactgagagtattgaggctgtgaagatgtcaaagcgtgcgggctggggtgtgatgactagtcataggagtggtgagactgaggacactttcattgctgatctggcagttggtttgtccacgggtcagattaagactggagcaccctgcagatcagagcgtcttgccaaatacaaccagcttcttaggattgaagaagagcttggcgctattgctgtctacgcaggtgccaaattccgtgcacctgtggagccctactaaacgggcgggatgcaagtgcttttatgtctgcacaagtcctgtgaaactgtttactgcgacctgcagattttactcttggagtgccctgagtagattttagcaataatatccaacatgtaacatgttacggacatgtacccaaacgtgatccagttttagttaatgtgctccatgcttgacgtttttaaaaaataagaatcccttagaaaaataaa

SEQ ID NO: 37009 - DNA, 894 bp, Zea Mays
acacaaaaactaacaaaaccttaagagagctaaatactctaatatcacaactcaattcaccaactaaactaggaaaccttgcctccataaccaaccaagcacttcatttatgccctaagcaaggatccaaactgcatgtactacaagttatagtgtccaagaatcagccacaattcactgaacctgctttcagttctctgaattcatcttccattgctccattcctctcccctctgttcaatgccttttatctcataaactcacatgacaagagaccccacttacttaaccaaatctattccctaaagtattgctcttccacttgggtataacactccaagactgaaaatacacattgcaaattcagttttcaggcagctgaatgaaattcagtctctgcaactgaaagtccatctttgggcagtctttacaccactttgtgtgtggggtcaaccccaactcacttaaaggatgttgttctctaacccatgttcttcaaacttgctgcagaaactttggttcaaagccacctggaacaggcactacacagctccaaaactgcactaaaattactgatttcagactttcagttctgaatagactaagtcaccaaccacctgacagtcaaacttttggccacttttactcccaaatttatgtagaaccaggtccatctcactttatcaaacttgttcactttactatggtctacaactttgctatggaacccttaatccaaaccccatgaatcagccacaaatgaattccaaactaggcatactgctgcaattcagttcacagaactgaataaaaaaatttagttgtgtccagcctgacagtccaactttagccaacctttttttcaacttttacacagcaacataccaagctcac

SEQ ID NO: 37010 - DNA, 912 bp, Zea Mays
acaatatcagtaagcatgtccatataccaaacacacttttgctttatatgttgtcacctgacctctggagaaaaggaaggagatgaactaaaaaggaatgctgatgttcaagaaatccaccgaaggacaatatttaatctagtttcgagagtcaacatgcctaaaacgatatatgaccatgaaaggattgtatggctaggtgatctcaactataggatcaacttaccatatgagaagacacacgaactcatatccaagcaggactggaacaaattgtttgggaaagaccagctgaaagtagagctgaagaaggggcatctgtttgaaggatggactgaaggggtcatcaactttcctccaacgtataagtacaaggttaactcagaaaagtacataagtgatgataacaaatctggaaggagaacacctgcatggtgtgaccgaattctttcccatggtaagggtatgagattactgtcatataagacagttgatctcagactatcagatcaccgccctgtgactgctgtgtacatggcagatgtggaggttttctcttcaaaaaagctgcagagagctctgaccttcaccgatgcagaggctgaggaacagctctccttcgaggaagacaatgcttctggaatatacaaccttggactatatgaaagttcaagtgaagtttacaccccattagtaagagccaaagttttcagcaaggttacctggttgaagccgcagccgttgatgcgggcgctgagccggccccggcggaacggactgcccgccgtgtcccggtcattcccaacgctgcgacttcgacgctagggctagtttgaaagccacaaaagtggagataatgtgaggggctaaaatctattctttatttaattttaaataaaaagaggattttag

SEQ ID NO: 37011 - DNA, 2392 bp, Zea Mays
atccacagggccgcgcaagcgctctggcttcttccagtccagtccaccatccgcgccatggcgatggcgttcgcggctgcctccgcctggagcctcagtcttacagccttctccctcccgctgccccagtctctgcgcccgaaacctagccaactcctccatggcgcgaccagctcgttcccgcggccacgccgatgcgggtggggcgccgtggtgcgctgcgcgaagcgcacggggaagcagcggtacccgtcggagaagaagcggttgaacaggcgaaaacaggagttgctacgccaggccgccccggaggaggggagcaaggggcgggagtccgggtactggcggctctcgaagctcgctgttcccgcccgcgacgacccaggcaaggacttcaccggcatctccctgccgctactccaggccatcgccaaagccatcaagttcccggttccttctatgctccctgacgaggctttcactgtcatccgcaagtcatttgacgcacgaaaggttttgaaagaacctcaattcacttatattgttgatatggatgttaagaagattcttaatattgagccaagggcatgggattttattgctcggttggagcccaaacttggagttgtggaatacatgaccgaagagaagttagcagttgatctggtcagcatgctaaatgtgaacttggtgcagaagttaccttattggagcgtggtcagcctgttgaacagagaggtcgtgacattggtgcactagcagttagacgaattctacaaccagagagcaacttttgctttggcgaggtacgtggagtgatgggaagctgatgaccaggataggaaaaaacactgatggtgttcaggctgttatgaaaacatttgttcactttggagcccctccaaacattttagttgatgggaaaccacacttgggtactgataaacttgttccactgctgcgaaaattcaggcatcacttaagagagttgggtgttaccataagatttaatgctagagtagatgaccttatagtagaagatgggcaggtaaaaggaattgtggtctctgatgtggaactacagccaggtcctgccagccagaaactagcatttgacgcagttgtaatggcagttggtcattcagctcgtgacacatacagtatgctttggcagcataatgtagacatgagcccaaaaagttttgctgttggcttaagaattgagcatccccaagaattgataaacagtatccaatactctgaactggcagctgaagtacaaagaggacgtggacggattcctgtggcagattacaaaatagtgaagtctgttggtgaaagagacgcagagaatgaacttgacatagctgagccaactcgcagttgctactcgttttgtatgtgccctggtggacaggcaaggcactcgctctcactctccctctctgatactccattttgtaatataatgattttccttcaaatttttgagaaagcgtgcaggttgttctaaccagcacaaacccatcagaattgtgcatcaatggcatgtcgttctcacggcgtgcatcaaagtgggcaaactcagctcttgtagtcactgtatcatcccatgatttcaagccatttcaatcccatggtcctcttgctggcgttgaattccagagacaatttgaaagaagagcagctatgatgggtggagggaatttcgttgttcctgcacagtgtgtcaccgattttatcagcaacagactgtcagatgccaggctttgtttctagcaaggccctacttcatggtgtggagaccaggacaagttctcccttacaaatttcacgacatggagaaacatacgaaagtacatcactgcgaggattatatccaactggggaaggtgctggctatgctgggggcatcttaagtgctgctgtggatggtatgtattgtggttttgctttagctaaacaactttctttattccatggcgatatagagccatttctaggcaaaacacaaaaacaaacaggttttataaagtattgaatggactagtgcttggtattttgttgttccaattttttgggggaaaagatcgatgtcattatagctttaaccataggatatttttgtcatgtttagagcagctgtgattgccttactaaattcatcagctaatttgtgcacggttgatgtagaagggtagagcaaggcattgatgttgtaggagaggttctggtataggtatagctatgtaacaaataatttataacttcctatgtgatgccaccttaattttgtcaagataattcaccaagcataataccatatattctcttgtgtgatggattgatgaacattaatgtgaagaagattacaagctcaagtattaactga

SEQ ID NO: 37012 - DNA, 1921 bp, Zea Mays
taaaatgctttcctgttaccattgatgtatggtactctggaacacctgactctgatgtaacatggttcaactgttgtatcctgcaaaatgtgaaagaaagaatgttgatgctcgatcttactttatgaccttggaatactgggaagatttattttgtaagctaaatgagatgagaagatataggagaatagttgggtctcttgcgggctcttgtttatcagctgccatcccacttctctcttccaataaggaaacagcatgccttgtggcccttgacattgtggagagtgctgctatatctattgccaatgttgaggaggcttataagtgtgaatgtcaaagcaaaggagtcattgaggaggccatccagttttgttcatttgacgagcttcttgatggtacagatgccaccgaagatgttgatgaaaataggctactcccagcaatgaacaaactgtggccttacttggttatctgtctaaggaacaagatctcagtgccggttgttaggaagtgcaccgaaatgttgaggcgagcaatttgcatatctggcggcgatttttatgtacgcaggtttcataaggatggacctattgtttggaggttgctggctttatctccattccgacgtctgtcaaagatggatgaaaaagcaatcattttaccatatagggatacctcacttaactcagaggaacctatggctgagatctccagccaaaagattcagattgcagtcctggacatgatcgctgcaatatcttcgaacaagagaagtgctgttgcactagaaagcgtactaaagaaggtctgtggccttgtggtaggcattgcctacagtagtttgacaggtttgcaggaagctgctataagggcattggcaggccttgcctgcatggatgctgatcttgtctggcttctccttgcggatgtgtactactcactaaaccaaagggaatctttacttcccaaccaagatctagccctggtatcagatcttttgccccctccagtgtcttcgagagaatacctctttgtacagtatggaggtgagggtgtcaggtgtgatgtagatccctcatctgttcattatgtgttcagaaggatgcagggtgtgtgatcttgtgtgacctgaaaatcaggttcctgatactgtgtatttgtaatcttgctgagtttctttggtcatgctagcaccctatgtcacacattgaacataatatcacctgctacagagaatggtaaactttttcatacgtgttctcgcactgaaaatcatcaaggttggtcacatgtctgaagaatgattatgacaagtctttaccactttgatcataattatattaagcaaacatcaggactcatgatgacaatgaaggatgtgatgggtttgtatctgttagccatataaggttgcacgttaagcatgcccctgacttgccggacgagcagcaagacttcgggacctagattggctaaggcactaagaatagaatagcttatctaccgatatgtaaagtcttatttccacctttcgaattcttttcctcggtagctaagcttatttagttgcctaatggtcgatgtaatctttttattgtgtgattcattccactttcatggtatttccgctcttgttacctccctctaccgcttcttcatctacatctaacctcatgcctggcgacctctaataagtaactgttgatccggccacataattggaatgccttcgcgtgaggttgccggcctttgtgtcagtcactcaacatgctctcaacatgctgaggaaggtcgttgttgtgccgtagccgagcgacgcaacaagtggctgttcagaacacggacaaggtgatgttgaacgtgtagaaacaacggcagcgtgatgcggaacgtctgaaacaacgacagcgtgatgccg

SEQ ID NO: 37013 - DNA, 3266 bp, Zea Mays
tcgagggcaggcagggcactcactcactgtccgaacacacacacacacacacacacacgcaatttcattgcgttaacatgagactcatgggcaacagtaaagtgaatcgcctttgccatgccttcatgcatgccatgcactgcaccaacagtatcactatctaccacacgaaaaacaacgcctgcaaacacttttcacgccgcctgcaggctgcagtgcaggctccgccaccagctacaccacactacaccggaggcttttctccccctcggcccctccccccgcacggaggtccgggacaagtcaatctgccactggccgcgaggccgacccacgccacgctcctcctcagctacagtccctcctccaccgctgctgcgctcacgctcctcgacctcccacactcactgtcagtgtaaagctcacgccggaggccggagctagctgccccctgcccgtgcgtgttcatcctggctgctcatctatctctcttgctccgatccaagatccaacaagtgagtacgcgctctgcgctcgatttcacttgaccgacggtttttactctgcttgcgtgcgcgtttgtgagtgcttttactctgtctgatgtgcctggcattcttggcaatggcaacggaacttcttcagaacaaaaaaaaaagaacattttttatcgggcgcgtttccttttctctccaatgctagcgagagcatactatacatgtcccttgatttcttctcgtcgttgctccgtgtactggttccccggggcctgcccttatcagtatctgcgacggtttcgacgtcttgctgttctcgctcgccccaagtccccaaaggctggcagcgaccttttcgttttttttaaaaggaaaattttgtcctttcccaccctccttcgacatggtttctttttttgaagcaacttttttttgaagcaaatcgacatggtttctcgggaacgatcccaaccgctcctcctccactgacccggattcttcttcttcttcttctttttttatgcggtttgtttcttggcgtctccatgtttgctgtttgcaggtgagctagtcactcacagcacaggtgacagggtggtggtgggcggcgggattgcggttgcggcagtagggttcaggctcggataccagcctcctcctcctcctcctcctcctccgcctccgtttccagaagggggcgagcgctaccggggagctcgacagacgccgagccgcaatgcccaagatgttcgggttctctcggcgccggatgaagctgggcaggtttcgtggggaaagaatgttattcttgtgggagggaaaagtgatcaaccttatgacaagatatcagtatggaccttcaatacagagagtgagctctggtctcatatggaagcgaagggtgacattccggtgtctcgaagtgggcatacggtgattagagccggtcctgttttaattctctttggaggtgaagatgccaaagggaagaaactacatgaccttcatatgtttgatctgaagtcattaacatggcttcctctgaactataagggtgctggaccttctccaagatcaaatcatgtagccgccctttacgatgatagagtcctattgatttttggaggtcagtcgaagtccaagaccctgaatgatattcatgctctagattttgaaacagtaagtattgtcgtgttactttattggttttgcttgttaacagattgctgaaaaatttgatatctttatactattagatggtatggtcaagggtcaaaacccatgggcatcatccatcacctcgagcaggttgctgcggagctctttgtggaactaaatggtatattgcaggaggtggaagcaagaaaaaacggcaccctgaaacatgggttttcgatgtccttgagtccagatggtctgtttgtgtagtgcctcctagttcctcaatcactacaaagaaggtttcagcatggttccattgtactacagggacaagatcgtgcttgttgcttttggagggaacaaaaaggaaccatccgacaaggttgaagtactagtggtgctgcaaaacgagcactgtttcagctggcggtctgcgcccgaggtggaacccttactgtacgacgagtctcctccaggctcaagggaactcgccgaccatctcagcagctgcgctccaccgtatcctactagctccgcggcgaggagcggtctcgccgccacagcggagaactcctgcgggaggaaacccctcccggactcactgctacggacctcgaacctcgggggctcgtcgctccgcaggcagttccgtcaggaagaggagtgcagcagcctggcgcaaaagctgcagaaaccgatcgacgacgacaggtacaaggacgccgccgacgagtgctccgagcatcaaccaccctcggccacgaaccctaaaccgcggaacgacgcgcggcggtcgtccccggaggtcgtcgtcgacgcaaaagcgaggaggctgctgggcaggagctcgtcggacatgaacaaccaccaggacgcaagggtggccgccctggtcaggaggaacgtggcgctggaagagcagctgtcggcggcgctggcgagcaaggacgaggcggagaagaacctgtccctggtcatcgacagcaaggacggcctggagaagaggctggccgagaaggacagggaggtcgaggcgctgagggagaaggcgacggggttggagctggcgcaggaggaggccaacagcctctccaacaccgtccacgccgacaacgtgcggctggagcgcgaggtggcgttcctgaaggccgtcatggacgagacccagaaggaactgcactcgactcgcggagttcttgcaggagaacgcgcacgggcattccagcttcaggtaagaccttatcatgctagactttctttctttcttttttttgttcatgccttgggctctgccaggttgaagtctttcatctgaagcagcgcctgcagacgatggaagggaggtcacccgcagcaccaagaaagcctcagaatgcgtagggtagggtgcaggcgtgtagagtttttgagcgatagatctgctgtagattcattcagtgatgtaatgtaactgtagtaggtgccggagctactgtaatttgtaatattattcgacgcgatgcgatgcaaacgtatttcgcaactgggacgtacgtaattgtgtagaatgagttgcggtcgactatatatgcaagatgtcttttatctaagagttctgagttattggtc

SEQ ID NO: 37014 - DNA, 1672 bp, Zea Mays
gcctggaatgcccagcttttaaattgcatgttaggaacaccatgaccaccataacttagaggcctcgtaattatcccccaagacactagacaactttcaccattaacctcctttccccttttccaaagaaacccccatcaaattttgtcaattgatttaatcacccacttaggagcggcccggcggcaaggagccgtggcacagctccgaggctaggggaggtccgactgtgcggcctcgcagcgggagccgcggctcggcccatggcggaagagcagagccaccccacgacaggattcgacgcagccccgacccgtgacagaggggcggagcggccccgcgcctaccgcgtgcaatgagaggtgcggctccggtccgcggcggaggggtggcggctggcctggaggtggacggagtggaggaggggcacatgcatgtcgacgcttgctaccgcctccatggcggcgcgcagagtggcccgaccggcgccgaagtccgcggctgtcaccacgacggcgtacggagaagccccaatctcgcggatccacataccctcaggtgacactcccgatctgttgctgctggatgacgcgacgcgcagcgggatcagatggatccgccgtggaaatgaggacgatgaacacggcggtcatagggatcggccgcgcatcctaggagggcgctgcccccggcggagaacagtctccccgggggcggcgcagccgtggcagcggaagacgtctgttggatctaaaacctaaactcgtaataccatgaaggaaggagagaatgtgtataatgtgtaatgttcattgcctgagccctcgagatgtttatcatggcttggagggcaaggcgcctctcctagagataaggaaggctatcatgggattacaatcaatcctaaactatccatatccggtgttgcctaatatactctaacacgattgaaggcttgatatcaaccaccaacgatttaacttgagtctcttttagcacggtcattaagacctcttacattccagatcagaaaatggctagattccataataaaacaaaaagaagactaccagcgattctccacataacagcacctaaacagaggttagtggcttaccaaaacttcacccatgagccggattggacccaaaaataactaacagattgagcccaaaagtagctaatggtctaaaacgcatgaaacacaacattttacagtttagaacgccaaaatgtggttttaacctttaattagcgttttgacgtttaaacgtagttttaataataccggcatggcatgcatctctaccgcatattcgagaaaaaagaagaatttcacagtgatttttcttctaccttctatgcagagaagacatttctgggaagaaggtatatgcggggcttttataacgatgttgctcggctgcaggatgtgcgtaaaatattccctcattgcagctcagatatggaaccggggcagtgcttcttcccacaagaagttgcaaaaagcatcaccaccccgatgtttatactcaatccagcatatgatgtttggcaggtagagcatgtgttgtctccagaaggttctgaccgtgaaaatctatggcaaaattgcaggatggatattagcaggcctgcatcttgcaactcagtatactgaggataaggaatt

SEQ ID NO: 37015 - DNA, 2459 bp, Zea Mays
cggggctgtgcgccgccgccgtgccagtcgcgtcgtccaggcttcgatccggaggtcaataaaggaacttcctggttctgttaatgtcccatctacatctgactttagcgtgtctgctcctttgtcaaacatccctggttcagaaaatgagttcaaacaagaccagcgacctcttgcacggggtgctgactttattcgaggtggtcctgctaatgattggattgagtcttttcggcctccgagggttcctcaacttggtgtagaagcacaatttccagattttgagcaaatttataacaatgcagggacaacctttcagtttcagccgccattggatggtccaccacaaagagtgttgtccggtgtcttgcattcctttctcacaagtggcccagctggtgtgccatttcaaccacttccggtaccagctgctcttggtttatctgaaagcgacaaacaatgcattcgtgatcgtagctgcataatggcacggcatattttttctgaccaaccagaagaatatatacagagtcaggtcaatactttgctgcattcgcttgatattgacaaccgtatgagaggacctatgcatgggcaatacccagaactacaggagtactggaagcagtcccaaagttctacgcgtcctgccccaatgcataatgctgctgataaatggattactgagtttggcaagcaaaataataatccagaaaattgggcgaactctttcgaacaacaatatggccccaatgggtgggcctctgagtttgaacagtctcagatggccatgcgccagatgggaggagcgaacatggccaacctggctgctatggagcaatcccgagtgcttgcacaaactttagcaagtaataatgatcccaagtttcagctttcacaaggggcggataagtgggttagcgagttctctagtcaacctaatcatggtgcactaaatgagaactgggttgatgagttctcgaaattaaatgttactgacgaatgggcagaggaattcagtggaggtggttttggcgaaagctctgctgatccatgggtagatgagttccaagaacacttgtcatctttcaaacaaagtccgggcgcctctcgaggggtttatgttttttctgagaacaacccgtatgttggtcaccctaatccaatgcaggaaggacaggagctcttccgcaagggcctcttaagtgaagctgttcttgctttagaggctgaagttttgaagaatcctgataacacagaaggttggaggttgttaggcgtaacacatgcagaaaatgatgatgaccaacaggccattgcagcaatgatgcgtgcgttggaagctaatccaacaaaccttgaagttcttcttgctcttggtgttagtcacacaaatgaattggagcagggggaagcattaagatatctttataggtggcttcagaatcaaccaaaatatggtggccttgtccctctgcagtcaactgattcaccttatggtcctgatgttgttagattgtttaatgaagctgctcagatgtcacctgaagatgcagatgttcatatagttctgggagtcttatacaacctatcaagagagtatgataaagctatagcttcatttaagacagcactacagctcaaaccacaggactattcactctggaacaagcttggtgcaacccaagcaaacagcatccagagtgctgatgcaatattggcgtatcagcaggctctggacttgaaacccaactacgtgcgtgcatgggcgaatatgggaatcagctatgccaaccagggtttgtatgaggattccattcgatactatgtaagggcagttgcaatgaacccaaaagctgacaatgcctggcagtacctgaggatctctcttagcaatgcttcgcgagcggacatgattgctgcatgcgacgcccgcaaccttgacgctcttcagaaagagtttcctctgtgagccctccggtccaaggcattagagcttccatggaaggaagcagcacactagcaagccgagtgactgcacctgtggtcatggaaatggaattggaaaccagtagcgttttgtatttgcctgttgattcttatatttatttttaggaagtgggggaatgtgtagcaactaggaagcgagggaacaacatccagttgatgtgaagcattcatggcacagtaggcaatagtggcaaaggggtactatacatacacacttacgggacgcacaacataaataaagaatggttgattaataaactatttattttggggacacacccctaggatcaacccctacttgtttcgagtttgaatactgatttgtatcaacaggcaataaataatgcgctttgtaaccttttatatcataatgtaatgcgcacgcccaaatcagttgtgtctaagaaaaaacttgacaaaatgaagtaacaaaaagaggaacttctgtg

SEQ ID NO: 37016 - DNA, 3359 bp, Zea Mays
cccggctgtcccgtctcgaccaccagcaccagttcagcccatccaccgccaccacctcagacgctcctagtcaccactcgctgtcctcggcttctcctaaaagctcgacgcgatggcgacgctggtgcggccgcccgcgctgcacgtccgcgccgtgagcggcggcgggaacaaggacagggtggcgccgcagcggccttggtggggcgggaacaagcccatctcaccgcgccagtcgggcgggagcggggcgcgaggaggcgcgggcggcggcggcgtcgcgctggaccaggtgctaggtgtgctccgccgcgacggcgaattcgtccaggccgccgtcggcgccccgctccgcgacgtcttctggctccgcttccttgagaagaagcagcggaagcagcagcagccgagacctaagcacaagcctttccggcagcagcaggaagaggaggaggtggtagtggtggacgagtcgcccccggccttcccgcccccctcgtacccgtcagggttgtcgtgcgtggagctaatggcggccgacttccaggccctcaaggtgtacgccggtagcgcgcggcactctctcgcgcgccgattcctcggtagcaatagcaagggaaagtctgaacagcaacctaaacccaaaccccaggagcagcagaaagagcagcaacatatacttcaggccccagccttccctccgccctcctacccaccaggattatcctgtatggagttgatgatggctgaccttgaagccctgaaactgtacatcaactactattcggccatcctgactacgccgctcccccagcattatgatcctgacctccttgcccagtacttcgcctcacgtccgcatatccttgcctctcgcgtcattcagatactcttcacatttctctcagctgtggtgaagatgcggatttcaaaaagagctcagttaaccacagatgctacctatagtagtggtaacagcggcaacgggtttgatgatactcaatatatggtcggccaacttctcaaggagacatttcttaaccttgggcctacttttattaaagttggacaatcactttctacaagacctgatatcataggttcagagatttgtgaggttaggcccttgctgagttgcatgaaagggttcctactttcccaagagaggatgcaatgaagatcattgagggagaatttgggtgccctgtgtcgcatatgttcagttatgtttcagatgagcctgtagcatctgcttcctttggacaggtctaccaggggcgcacagttgatggttctcttgttgcaataaaggttcagcggccagaccttctaccttctgtactgagagacatctatattctacgccttgggcttgctttcatacggaagatagccaagcgaagaagtaacatttctctttatggtgatgagttgggtagaggtttcgtcggcgagttggactacaatattgaagctgctaatgctaccaaatttatggaggttcattccagatatcctttcatgctagttcctaaggttcttaaacaacttactcgaaagagggttttaacaatggagtgggtggctggtgagaaccccaaggatttgctttctttgtctaaaggagtttctgaaaaatttactcaagcttcagataatcagaagttggaagcaaaatctcgccttcttgacctggtcaataaaggtgtagaggcatcgctagtgcagcttcttgagacaggcttgttgcatgctgatcctcatcctggtaacttgcgttatactcctgaaggccgtgttgggtttctagattttggtttgctgtgcatgatggagaggaaacatcagcgtgctatgcttgcaagcatagtgcacatagtaaatggtgattgggcttccgtcgtttatgatttgactgaaatggatgtagttccaccaaaaaccaatctacgtcgtgtgacaatggactagccgtggcagcagatgggactttcaaaacatttcaagcagcatacccatatgttgttcggaagcttctgtccgaaaattcacttgaaacaagaagactcttgaatcaggcaatttttaacaaaaggaaagagttccaatggcagaagattgacgcgtttctaaaattggcttcagcaaggaccaacttcaagtataacagtgaagttttgccagagcctgacatgaagtccatgaatgtggctagccttgtggagatcagtgatgcatattcacttgaccgtgctatagctacaccagagagagcattgcatactgcaaacctgtgtgtgaggcttttattatctaaggagagcattgtgattaggagacttattatgacagcgaatgcaaaatctcttgcccgtgatctgatctccagagatgctttgatgttccgggtgctccttagtaaggttattgcggatgttgtctaccaatggatgttgagtgccacaggcttgaaacgagttatggagaccaagatccagacgcccatgaccacaggaaagaacgagggacatctggtgctggctgaagaaccatcgaccctgatggtactccaggcggcagtaaaagaccgaaggattcagctcatgttcaccaagtttgtgagggagttgagagaggagcccgtcttgatgattagggtgagctggaacgtgttcctcatctcggtctcatctgccgctgtaggcctgcaccgtttcttggtgttcttcttgaaggaggatggtgccaggttcttggatgacaaggtcaagaaaatgaagatttggctgatggagttctcgaagcggacggctaatctggagattcaaggaattctgtgaatgttggtggcttttggttgaaggatttaatagctgcttcgcactctggtttttggagttactttctgcatcgagtgaatccagttcctgtttacgctggctgtctgagcttgcttggctgctggtgttcccagagatttataaaaacagggttttcctccgtcattccgccgcagctagtatataatagatggttcttggttgttcatgtactgtgtagctgtatataatagaaacattgcaggatcagtgagtaattctgtggccgagtaaagtgcagtggtggaaggcatgtgttacctactggatataaatatgatgatgtgaatgttcagttgaaaaacttgggtgacatgaactgatgaactatagctgatgcctccactttagaaatttagctgttttagtttgtctaaaatcaaacctttctttgacaagtaacttgcataaactcgggcgaaatcgtttgggtagatcatagatgtttgtaaatttgtccgattattaacatgaacagtg

SEQ ID NO: 37017 - DNA, 2192 bp, Zea Mays
cccatcacgcctcatccgcctgattcatcgcaggtgtgggaaacatggttgctgtcggcgaacggcgttaacagccgcacctccgttcctccgggcgtgcctccgttcctccggctgcgcccccgctcctccgaccgcccccggtacctctggttgacctcgcccccattcctccggctccgcttcgtgttctccggcctcgcccctgttcatccaaccttcggttctagcccctcgtgaaggtcgaccgttgtatctaatggtcgttgatccggtgacctcccccacaacaactctacccaaagactacgatggctctagggaagaggtccacatggacctcacggaaacccgaagaacttgtgccaactgattacgagaaaataagggctatgaatatgatgaagaacaatcaattgtttcaacggctaggccttggacaattgaaatcactggtgactgctacagctgcaaacaacaaagaagactgtcctcagcaatcagagagtttatatgatggtgaaaacactgacaattctaatgaagaggaatcccaatgtactaacggtggttgtgccaacatctccaatgatggtgatcagatctcaacaaaagtaacaagaggaaataaaataattgtggcacctacggaggagcgaacaattagagtcactaggcaaagaattgctaaagtaaaccaagaaaatagccacaacctgtctattcataaacaactcagttcatgtcctgctacaaaccatgattcgatagaaactcttgttgttcctacacaacctagttcaaatgccaccataaacaataacacaacacataacgtagataatgctatagagcctaattctctgatataggaggagagtgataaccacaatgcagttgaaggtaactaaacattttaactgtttagacattgaactatccttgagcaaataacttttatgttttccagcattagtttaggtaactagtataacttaaatttgaacaaaattactcatatgtttttgtatgatttatggcaactaattcttagttatatgcagcatcacacatatcaacaagtttttgtgtcctgaccaggaacaatagatatcataccaaggagaaaaagtatgggctaacaacttgaatcgttaagcagaggactaggaatgaagattccaatccaaattactgaagggagcaagaggccagagccacccattcaagctgctaagtttgcatcagaggggggaatcacattgaggcagcacattccaatatttcaccactggaaggagtacaagaagaaagagaatgaacctacaataagaaactatattggaaaagatattgtaaggctcaattcaccttggacaatgatagcaaggcagtggaagatgcatgtctagatatgctaaagggtggacaatgccaaatgaggtatagactaaaacaaaagtatttcaatgggatacctgctaatcaagtgaggactacatcacctatttcaagcatgtctgatgaggactggagaaagttggtggagaagtggtctacccaaaacacaagaaagaagagaaatataaggatgctgaaccgagtgcaatagatcttttcaaggacatgcattgcagcaagaagaaaggtttttctgaaaatgtaaagaaagcaattgttgacatggaagcaagggtgacaacaccagttgaggatggacaacaacaaaagtctcctatagaagttgtttctgaagtgctatggggctccagtttatttctacagaatgttggtctgcaagataactccaagaaaagctccacaacaactgtttttgctaaggttcaagaacttcataatcaattggagtctgagaggctagaaaaagatgggcttcaagaagaagtagaaaccttaaaggctcaggcacaggcctcaaaggagaccatggacaatatgaagagatcgatggaagaaaataacagtctcctccgtcaactgttgagcttcaatcgaagccaaacgtccccatcttaagtctgctatagtatcatgttatattagttctggattcaggttttataaatttggaatatgtttaaaactttcatactttgagttgaagttataggatttcctttgtattttaagttacatgatctacaatcatatgatttgaagttataaaagta

SEQ ID NO: 37018 - DNA, 375 bp, Zea Mays
acaagatttacctctaagcaaggctaagcaattttgtaaatcatattttgatacttcatcagaagtatctataaaggtatggatatcaaggaaggcaatgcatcaaagggttccaagcaactcctataaacctaatgcacattttactagacttaaagtgtgcgaaaattatttgaaaacacaaggaagggttgcatgcaccggggcttgcctgggtaacactaggttagtgttgttaggtgacgtcgatcacttgacgatcatccttggccagatacttgcttcgtatgtccatctccggttccgttcatcagcgccatcttgtggtcgactcagttctggttctccgcatcgcgtggttaattcacgtacctg

SEQ ID NO: 37019 - DNA, 1666 bp, Zea Mays
agagggcgtcgcgatcgcaaccgcccgagcccggccggtcccatcatcgacgccagtgtgcattattacgccccgccatcagccggccggcaactcgacagggaaaaggaagacgcaccgctagagctgagatgtccttcttcttccgcatggcgtcgcggctgcggccgtcgacgccggaggaggtggtgcgctccatcaaggactccttcctcgcgctccacacgcgcacccacgccaaggctctggaagaggtcgagaaaaatatgtcatccttgagattgttgatctttggtgatggagaagtcgaaccaaatgaagagcaggtcctgcaaataacccttgagatttgcaaggaggacgtcatttccctgatcgtccaggatctgccttccttgggctggggagtaagaaaagatctggctatctgctggtgcatcttgcttaggcagaaggtcgatgaaacttattgctgtgtgcagtatcttgaaaatcatctggagcttttagatttccttgttggttgctacaagaacttggatattgcattgaactgtggaaatatgttaagagaatgcataaagtaccctacacttgcaaaatacatattggaatctggtagctttgagctgttctttgagtatgttgagcttccaaactttgatattgcttcagatgctctgaacaccttcaaggatctgcttaccaagcacgaagttgtagtcgcagagttcttgagttcccactacgagcagttttttgaactctactcaaggctcttgtcatcaactaattatgtaacaagaaggcaggcaatcaagttcctttcagagttcctgctagagactcataactctcaaataatgaagagatacattgtggaagttcgttttttaaatattatgatcaatctactaaaggattcaagcaaaaatatcagaatatgtgccttccatgtttttaaggtatttgttgccaatccgaacaagcctcgatgtatcgttgtagctttgctagacaatcgtagagaagttctgaagctactccacaatcttccttcaagtaaaggcgacgatgaactcgatgaggagaaagacctaatcattcaggaaatccagaagttggcataacacaaaagcatcaagttatcgtttagcaatgcaagactctccttatagaggacatattgccaaggccagaaccatgtatatcacattgcacatgtagccttcaagagttgtatttttggaggttttttcttttcttttggtctcagaaaaccatagcaaagtattctctttttgaaggaattatatacatgattttggtgaccaaggaccgttggattaattgagctagacccataactaatctagcaatgaattaaagaattctaaggaccatgttgaaaatagcaaagcatacttgagaagcttctagatgattggagaagaggatgcatgagtcatggatgccatgatttgtagtgaagtatgtaatctactacttattaagttagcaatagtagcctgcctttttgtgtcctgccattctgcgatctcaggcgtccaattctatcattctacaatctcagctgtccaatcccgcacaccagtttttcgcgcgcagaaaaaaaatcaaactgaaataaagaaaatatgaaaaa

SEQ ID NO: 37020 - DNA, 460 bp, Zea Mays
gtgcggtatatgttccacaatcccgacgacgtaaaatggttcaaggcaagtatttctgcgcgccattaacatatccaatttatccattttcgacgcaacgacaatgttatttttgcagcctattgagtggtggacaaaacatggtcgtcgtggacgcatcaaggagactgttggtactcatggtgccatgaaatgcttattcaacagcagcatgatgctgtgtgcatgagcttgtacaaacacgcgtacctgaaatggcctgaacagctctaccacatataagattgcctgacgtttggctggatctgtaccagcaggctatccaaacgacgggaatgaaacagccttggagctagcgtggcatgtagcctatctaaatatttttaggattagaaaattgttttgtattggtccatcttatacttttctttaacattacaccctcattcttcttggtctt

SEQ ID NO: 37021 - DNA, 1045 bp, Zea Mays
accaactgtgacaatccagtcaattatgatctctagcccccctccttccggctcctgtcatcctgcgcatgccatcggggcgctcgccgggacaacatttacctcgacagcgacgccgccgctctccctcgacgagagctcgtagctgtgtccgcgcaaggcttactcctttcttggccccgaccccttctccccgccgccggcgccgcgcttggcttgatgctcgacgtctgcgcgccacacgggcccgccaagctcccggctgcgtttgtcgccggcgtgcgagtcgcctgggtcgccggcaggtggtggtggcgatccgtggcggtgggggcggcgcgccatggcgtcaccacgcgggcgtcgttcttcgggctcgattcccaggttgcttcatttctgcatcatcaagaaaaaatgaatgttcttgtggaacctgatgttcatgatacatttgctagaattccaggttatggttttgtgcaaaccttctatactcaagataccagtgaccttcatgagagagttgattttgttacatgcttgggtggtgatggactcattttgcatgcatcaaacttatttagaacttctgtaccacctgttgtctccttcaatctcggatctcttgggttcttaacttcacataatgtacatttcaataatctctgagagagaatttcaccagattaagccgtttttgtgtagaaactaagcatattatcattttgttcacctcagttcaaagatttcagacaagactcgagagatttaatccatgggaacaacacacttggagtttatataacccttagaatgcgcctaagatgtgagatctttcgtagtggaaaagcaatgcctgataaagtgtttgatgtgctgaatgaagttgttgttgatcgaggttccaatccatacctatcaaaaattgagtgttatgagcataaccaccttatcactaaggtgcaaggtgatggggtgatagttgcaacaccaacaggcagcacggcatattctactgcagctgggggatcaatgtaatttg

SEQ ID NO: 37022 - DNA, 3318 bp, Zea Mays
cctctggctctccttcctccgccttccgcgcgcagcgcagagcgcacgggacacccgccgcccacgccttccgccccagacccactgcacgtgcacggccacgcgacccagcccacacatccactccgctttttccaaccgccgcccacgcgaaccccgacgcggccgcctcgagctccactccgtttaccctgcaaccccatcctcctcggcttcccatgtcgtgctcggcggcggcgggcgccgaggccaccgctctcctgttccgcagcgccgctccgtccacgatcgtcgggcgtcaccgcctcgctatgtctcgccggacttcgcgccgaaacctcaggactggtgtgcaccctcatcagaagagtgcacctagtgctaaccatcgtaacagggctagcattcagagagatagagcatcagcttccattgatgaagaacagaaacagatgtctgaagatgaaaatggcctactagacattcaactggaagatctgatatattgcttctgaatcaagctcgtcttcaagcattggaacgtgctgacaaaattcttaaagagaaagaaactttgcaacagaagataaacattttagagatgaaactgtcagaaacaggtaaacaatctgtgctttctagtgaagtaaagtctgatgaagagagtctggagtttgatgtcgtaaaggaagagaatatgctactgaaggatgagatgaattttctaaaaggaaagcttattgagataactgagacagaggagagtctattcaagttggagaaagagtgtgctcttctaaatgcttcccttagggagctcgagtgtacatccacttctgcccaatctgatgtgttgaaacttggccctctgcaacaagatgcctggtgggagaaagtagaaaatttggaagacttgcttgattccacagcaaaccaagtggagcatgcttctttgacgctagatggttaccgtgatttccaggataaggttgacaaactaaaagcatcattgggaacaacaaacgtatcagagttctgtctttatttggttgatattttgcagcaaagggtaaaatcagtagaagagcgctttcaagcatgtaatcatgaaatgcattcacaaattgaactttatgaacactcaatagtggagtttcatggtactctcagcaaactaataaatgaaagtgagaaaaagtcaatggagcattatgcagaaggcatgccatcagagttctggagtaggatctctcttctgattgatgggtggtcgcttgagaagaaaatatccattaatgatgcaagtatgttgagagaaatggcttggaaaagggataatcgcctccgggaagcttacttgtcatccagaggaatggaagagagggaactgatagatagttttctaaagatggcactaccaggaacaagttctggtttgcacattgtccacatagcagcagagatggctcctgtcgcaaaggttggtggtctggcagatgtgatctctggtcttgggaaggcacttcaaaaaaaggggcaccttgtagagattattcttcccaaatatgattgcatgcagcataaccaaataaataatcttaaggttctagatgttgtggtgaagtcttactttgaaggaaatatgtttgccaacaagatatggactggaactgttgaaggtcttccggtctactttattgaaccgcaacatccaggaatcgctccagctcaggacttagcatattgtggtcttgatgttgatcacctggatagaccagacagaatgcgggataattcacatggcagaataaatgttgttaagggtgcagttgtatattccaacattgtgacaactgtatcaccaacatatgcacaagaggttcgctcagagggtgggcgtgggctccaagatacactcaaagtgcactccaagaaatttgttggaatacttaatggcattgacacagatacttggaatccgtctacggataggtttctcaaggttcaatacagtgctaatgatctatatggaaagtcagcaaacaaagcagctcttaggaagcagttgaagcttgcttccacacaagcttctcaaccattagttggttgcattacgaggctagttcctcaaaagggtgtacatctcatcaggcatgcaatatataaaataactgagttgggtggtcaatttgttctgctgggttcaagtccagtacagcatatccagagagagttcgagggtattgcggaccaatttcagaacaacaacaatgtcaggctgcttttgaagtatgatgatgctctggcacatatgatctttgcagcatcagacatgttcattgttccttctatgtttgaaccatgtggcctcactcagatggtagctatgcgatatggttctgtgccagttgttcggagaaccggcggtttgaatgacagtgtcttcgatttggacgatgaaacgatacccatggaggtgcgaaatggcttcacctttttgaaggctgatgagcaggattttggtaatgcactggaaagagctttcaactactaccacagaaaacctgaagtttggaaacagttggtgcagaaagacatgaagatagatttcagctgggatacttcagtttctcaatacgaagaaatctatcagaaaacagccactcgagccagggcagcggcataaacagcagagacattgagacagttccctgctgtctccatgaagtctcctagatgctgtgcttaaccgtatggtaaagaaatatggtctgtatcagctcagaattaagcatctgccgaggaagcgcggtgcatccggactcgggtgtacaaggggcgacgtggcgttacgtgcagtccccaacgaagcaaagagacagaagtacagctgtacagaacggatatcttgtgaagcacacattgggatcaggacgtttggtgctgcagctactttcggtgcagaagcacatatatacgagacctgccagggcgagcaaatacccagttatacacgcgattgctcagctctatcaagctgtgaattgaaagatttctatagtgtattcacgcgacgttttcataaactagtgtgagttatgtactctgaccagtgaccagtgcgaagtctgtgttgtctcaacaatgttgcttggtataaaatgctaaaatgacgtttaagacgagaggggtttttagaaaagagagaaaataagagttttatgggtatgaaactcggttgccttcatttctagctctatatgagtcttggaattaaactccctataaaacactaaaactagactatgtattgtgaat

SEQ ID NO: 37023 - DNA, 2650 bp, Zea Mays
tcggaaacgtccgtactccgtagtgcgaggaccctccccgtcctcccgtgtctatttccgtccccgtccccaaccacccgcgttccccgctttccgtgcgcatggccgccgcgcgggcgcaaccaccaccgccgtggccggatgtctagaaagcccctcctccccacctgcgggtcctccacccctcccccgctcctcctcctccgccgcttcctccctcgccgccgcgcgacctcctctcccccgccgccctccacccggcggaggaccgccgccatgccaccccgcgccggcgactccgccgcggcggcggctgcggcggcatccttccgtctcgggatggtgcgggtggtctctttccttgtaggcgggctcaacctcgcggtgctgctgctcggactctacattatcgacgccgtgctcccgtcggggtgcggcggggggctcgctttcgcctcggcgcccgctctggctggggtccgcgtgctctccatgatcggcgccgcgcgcgcgcagcacgccacggcggacgccatagctaagcgccacctccacgagagcgacgcatctgtcgcagctgatgccgtagctcgccacgagattagggtgaggtacaaacgctggttgtggtggaccagatttggtatggcagttggtgcattgcagttggttgcagcaatttatctcatgtttgtcattgtaagagatctctcaaatgaaagaagatccacttcctgcttctttggacaggataaagctgatcgggtgtcagtacgagcacttattgctttatttcttatcctttcatgggttgtgatcattgtccaatgcttcacgggttctgatatattgaggtggcgatcattttatgcaacacatgatatggcatggaaagctcattacagggaagtgttcgaccatggaatccgagaagctttgtgctgcctaggacgtgcaaaatatctaactgtattggaagaagatgaggtttattctgttgcaagactccttggtgatttggttgcatatcgtgcttctgggacaggacatttggagctcttagcagggcttgctctattgcagaagcacgggaatttatctgaattgcagactgaccttgtggaggcatcccatgagcttatgcaagaagctgctttcctccatccatttgcggaagcatgttatacgggaccacttcttgattttggacgaaatcctatcctgtttccctgtgcatgggtttatagacaaggtgtgttaactccatgggcacgcagaagacgccctgcacttgatggtgataattggtggcgaggccatgctgcagctttccttagatttgttaatataccacctaaagcacttctgaaaggacgtgtttgccagagcaagcgtgaagctgcttattttgttgtggttctccatgacaaaagaactgttgtcattggggttcgtggaacagagacaccagaggatctcataactgatggattatgcagagaatgtgcttttactatggaagatttggatggactagtaaatagtgaacaattacctgcaactacaagagagagagttatttcaacatttccacactatggtcatggtggaattgtagagtctgccagggagcttttcatgcaactaaatggagaaaacacatcttctggaagacttgggttcctttccacactgctgggggagggcagtgagtgtcatggatataaagttcgtcttgttgggcattctttaggaggcgctgttgctacagtcctaggaatgatgctatatggcaaatacccaagcgtgcatgtatatgcatatggaccacttccttgtgtggactttgtaatagcggaagcatgttcgcattttgtcacaacgtacgaataaactgagatcttcctgtggctactattttcaatggaacttcagttttggtgtgctgttctcttataaggttcattaacttctgactaccgagataactctccagctgatacagcaatgatacaaaagctcgctcgaagaattttgcatgtgaacaggtatcatgataatggtcctgacgatggcataatccagggctatgctgatcatacaagaacagcagatacaacagtaccgaatgaaagacaaatttctcatcagattccattatgcaatactgaactagacctccacaatacgcaaaatggcttttttaggtataatgggtccagtgcatcaatagatgagcatctgagctatgaaggcataagcagtggccatgatatgcaaataattccacttgatggggctgattctggttttgaagggcaccagacatcttacagagaaataccagtggagcctcctgagatgtttcttgcaggcttaattgttcacatagtgcggcaaagaagaagtctctttcctctttggaaatgctggagcatccaggaaactgaaccaccatacaaagctgttttagcgaaaagggagaacttcagggatatagtggttactccttacatgtttacagatcacttaccatggagatgttcgtgcttctactatacctgcctcacgattagaacagtccttgatggagtccttatcttcttcaattgtgccttcttcagtggaatggcagcatgcaatggacgag

SEQ ID NO: 37024 - DNA, 2772 bp, Zea Mays
ggaaaagcccaaaacctctcttcctgctgcccctcgctgttcgctgcctcccctccactctccactgttcactcccagtccccaccagcaccaggcacagatcactcgcttccccactcgctcacgccaaaaccaccgcgccgaatccgaatcgagtcgagcacgagcgagcaagcaaggagctagcgcacgcatctaggctaggcgagagcaccaaaggaggcgccgcgggtggcggcggaatgggagggcccctcggcgcgatcatcggccgctacccgtcggcggccggcggcgacgagcagctgggaggcggcgccggaggcggcattatacgccacgaccgcaggtgccgcgacatcgccgttctcgtgctcttcgccgccttctgggtcgccatgattgtcaactccagcttcggcttcaaccagggcaacccgctcaggctgacttatgaactggactacaaagggaacgtttgtggcgataagcatggcaacccaaatttgcaggagctggatgttagatactggatgaatccgaatcaagtctaccaaagtggactcaagaacagcaaggttaacctggctgatgccaaagccatctgcctgatggagtgcccaaatccagctgtagatggattgaactatatttgtgattatccagaagggaacatagacctctctgttgatgattggatcaatagggactatgactattatgagtttctcacaccagacatgaagaatagctcacttcaactccagggtccatgctaccctataatatttccaactgtaaatgcactggcatgagacgggtggtgtcagcattgatgaaaatatcctcattgataaaacagtgcacaaggccatcgattctagatctgctgtattaaagagatatattgcagacattgggaagtcctggcctgtgttcatcgtttgtggtggaattctccctgttttcctgtcagttatctggttgcttatgattcgttatttcgttgctgccatgacttggattacagtagtcctcttcaatgcccttgttatatctgtaacgatgttcttttacatcaaagctggctggataggcaatgaccccttaactgttgtcattggtgaaagtgatccatatgttcacataagtggacgggaaataagtcaccttcatactattacaatcctaatgacagcagtaatgatcattgctttcctgtcctcaatagctattgtccgccgtatactgatagcaacacctgtcttaaaggttgctgcaaaggtcattggtgaagttcaggcactgatagcttttccacttttgccgtgcctgatcctttctatcttgtatatgttctggttttctgctacactccatctcttcagctctggtcaagttgtccgaaatgattgcaatactgattgttgttcatatgatctgaagctgggaaaagtaaattgtgacaactgctgtgggtacagcatccattacacccctcatatcagcattgccattctatttcacttatttggttgctactgggcgactcaattcattctcgcatgctcttcaactgtggttgcgggatcagttgcttcatactactgggcgcgtggtgaaatatcacatgatataccatttctcactgtagtctcttcactgaagcgactgatgcgctacagccttggatctgttgctctgggttcacttgttgtatctgttgttgaatgggtgcggtttatactagaatgccttcgtcgcaagttgaagctagttgattctgcccgagagagctgctttggaaaagcgacgtcctcctcttctgaatgctgcctgggttgcatagactggaccctcaagtcagtaaatcgaaatgcctacattatgattgccatcaccgggaaaggtttcttcaaagcttcagtgctcgcaactggattaataatgaagaacattctgcgcatcggaaaagtcaacgtcattggagatgtcatcctcttcctgggaaaactctgtgtgagcctattctgtgcgcttttcgcctttctgatgttagacacccacaagtacaagtccgcacacaacaagatatcctctccagttatccctgtcctggtaacatgggccctcggctacgtagtcgcgaagcttttctttgcggtggttgagatgtcgatcgacaccataatcctctcgttctgccaggacgccgaggagcaccaggggaacgcgcagtatgcgcccccagctctgatggaaactctggacgaacagggcgaactgcagagactaactcaagggccttgactgtcttttcctcttggtagtagcatggaaacttagcggcagcctaatgttttgttaccccgttccgttctcttggcttgtgaagaggtttgccatttttgcttgctattccatgtacaagtctgaatctgacatgttctcctggcccaattggcatgtgtaggcagcttatctatatatgtgtgcagtgtgctattgctgatacggcgttggtgaaatactccctccgtttccaacttccaacatcataaatttaaccaaatttatatagtaaaacaatagcatttatgatacctaaataactattattggattcttcattagttagctatttgatgtcatagatctttgtgtgtgtgtttttttttaaaaaaactaggtgctgtttgattcacattttataacgtaaatgataatggtactgatttacatttgagtatcggcggtaacaaatttaaatgg

SEQ ID NO: 37025 - DNA, 3001 bp, Zea Mays
ccccacgcaggcacggccgaggaaaaccgaaacccgtcccaaatccgttgctctttcccccttgcccccttcccagtctccactctgagcactctcctccgctctgctcctttgctccccacggcaaaccgtaaaccctagcctgaggggcacccctgtcgcagccatgggcgccagccggaagctgcagggcgagatcgaccgcgtcctgaagaaggtctacgacactgagaatgccaaccagaaggagaagttcgaggcggacctcaagaaggagatcaagaagctgcagcggtacagggaccagatcaagacgtggattcagtccagcgagatcaaggacaagaaggctctgatggatgctcgaaagcagattgaacgagagatggaacgatttaaagtatgtgagaaggaaacaaaaactaaggccttctcaaaagaagggttaggtcagcaaccaaaaacagatcccaaagaaaaggccaaagctgaaacaagagactggcttaataatgtggttagcgatttggaaagccagattgataacttcgaagcagagattgaagggctttcaattaaaaagggaaagcaaagaccgcctcgattggtacatttagagacgtctattacgagacataaagctcatataaagaaattggagtcaatcttgcggcttttggataatgatgagttgagtcctgagcaagtcaatgatgttaaagattttcttgatgactatgttgaacgtaatcaggaagactttgatgaattcagtgatgttgaggacctctatagcacattgcccatggagaaggttgaagcacttgaagacatggtttcacttgctccttctagtcttgtgaagggtgttgctcctgtttcgactactgcagttttgagcacaaagagttctgttgcaacttcacctactcagcctacagtatcaacagcttcttcacaaagtacatcacaggatcaaacagaggagacagcttcccaagaaagcaatcctgaacctacgccacaaacaccacctccaaaaggtggaaaccctggaccttcagtaccagctgtgcccattgttgtcagtactggtagtgcggctgtttctgtacctgcagaaacaattagttcccctgtgcgactaactgtacccgccacagcagccacagtgctttcttctgctattccacgaagtgctcctgagaatacacttgctgttacctcaattcctgcaaacttatctaccactttgaaggatgatgaaagcatgagtgttcctccacgacgaccatctcctgctactgaaattggaattggcaggggcataactcgaggaacaactagtcaggcattagttggttatgcctcttggtagtaaagttcaaccccagcaggttcccaggactaatgatgcaatcggctctgattctgctaacacaaatgaaaaccctattcttggtggaagagtattttctcctccagttgtttctggggttcaatggagacctcaagctgctgctgcatttcaaaatcaaattgaaactaatcagtaccgtggaaggcctgagatttctgctgatcacagggagaagtacatacagagactgcagcaagtacagcagcaaggtggcagccttctgaatgtttcccatataactggcataaatcagaagcaatttccaacaccacagccaaatccccttctacaacagagttcctctatatcttcccaagtgaatcttgggcttggagttcaaggatcagacgcggggcatataaaaagtgaagatcaacaaattttggctgaagatgttggtgtggaatcttccgcaacaacaggagcaaataaacaaacaagtgaagatgacacaaagattccatattcgaatccttcagcacctgcagcagaaaacactcagctgcctagggatactgatctatcacctggacagcctttgcaacctggaatgccatcatctggtgttggtgttatcggccgaagaagtgtatctgatcttggtacaatcggagataaccttactggaacttctggtagttctggtcatgatcagaattattatctgcaaatgcttgaagctgcattccacaagcttccacagcccaaggactctgagcgtgctaaaacttacattccgcggcaccctgcagttacccctgctagctacccccaagttcaggcatcaattgtatcgaatcccaccttttgggaaagaattggtagcgacacattagctaccgacatgctgttctttgcgttctactaccaacagaacacatatcaacaatacttggctgctagagaactgaagaagcaatcatggagatttcaccggaggtacaatacctggttccagcggcatgtggagccacaggtcacgactgatgagtatgagcggggatcatatgtatactttgatttccatgtcactgaggatggctcaggatggtgccaaagaatcaagaatgacttcacatttgagtacaactacctggaggatgagctatcagtacaaacaaactaaagtgccatggcagtaggtctggtcaaacctttatgtccaatttgaattttgtagttctcataagagcttgttcggttgcttctggatcaaagaaggttggaggggattaaattccttctagtcaaaattgaatagaaattgatttaacccccctcaatctcctttatccagacgcaaccgaacaatgcctaaggtgactgactgactgttataatctggacccttgacaaaatctccagctgtaaactaatgtgtgaagttggatgcaccgaacatgctgaaattataatcgtgttatgccagccgaatctgtttgacgcagctgtacattgtcgttattatctggatgcgcctgaaaaatattttggatctttcttggcgcctacctgtttatttttagctaactcctggctggcgctttcgatctttctggttcgtttttttatcaaaaaaaa

SEQ ID NO: 37026 - DNA, 2154 bp, Zea Mays
gtcgggccactatccctctggcctcgtctcgtcttctcttctcgcgaatggcggcgctgtgcgatctccgtcgctgccccctccgccagtgatttctgggacgcgcgacgaacacgagttggaaggaggtggtcgtgctttgggcggcgaaggacctgggcgctagcagcctcagaccctgacagatcacaacctgacagatcacaggcgctaccaaaagcgacgggcggccgacggcggcattgcagttggagcgagcgagcgcggtgcctttcggacgacactgagcacaggtcgcacattgtcacatggagctagactagaggtcgtcgccatcctgtcagtgtctgctcgtgatcaaactgcctgctgcctgcccgccccaatacacccaaccagatttcaattcacttcttggaagctgctgcttcgagcttttgagtagcacccctgcttacagacatttcatatccatatatatgctcctcgtcctggatctccttgccggcattatattgccccccacaccacccccgactccccacgaccattaatctgaagtctatatttcacattgtcacgactatattttgttccaatttgtttccttaatttgcatcagttttatatgttatattgataggtagcacatctatataagtccatgattaaaatttatgtttctagataatgggttcttgggaggagaatgttaggcaatttttgttggaggaggaggaagatgatgatgaactattctttgttattctccctgctataatcccatacctctcggaagagaaaagacccatccacacatcctccctcaccggtgctaaaaaggttaaagaaattcttgaagggcatgagagctggtgcaaatctgagtttagaatggaaaaggaaatattcaaagccacgtcaaattttcttagaagggagaatttactacgtgacacacgaggagttagtgttgagaagcaacttgggatgttcatgtatatgatctcccacaacgccagtaaccaaatgctacaaaaggcttttcaacacagtggagagactatccatcgaaaaatatctgaagtttttgagatagttcccatactaactcaacgatttgtgaagcttcctagctcagttcaaactcatgctaggattgcaacagattctaggttcatgcccttttttcagaattgccttggtgccattgacggcacacatgtatccatcactatcgcagaagatagggcccctccatatagaaatagaaaaggaactctttcacacaatgttatggtagtctgcgactttgatctcaattttacatttgtctcgtgtggatgggaagggtcggcatcagacgcaggggtgcttcgatctgctattagcaaaagatttagtgtgccagaaggaaagttttatcttgtagatggtgggtatgcaaatacaccatcatacattgcaccatacagaggtgttcgataccatctcagtcaatttaggaggagtcgttcatcacaaagtggttatgcaaactacaaagagttattcaatcatcgccatgcaattctccgcaaccatatagagagggccattggtgttcttaagaaaaggttcccaattctaaaagtagacacattccatcccatagaaaatcaaatcaagatcgcagctgcagccattacatttcacaacataattagagggcaaaatggtgatgaaggatggctggacaaccaactagattatatatctccaagccattacattggtgttacttggtacttgcagagtgctgagtggaagcaacatatgaagctgacacggaaaaggaaaatggatgatctccttggttatgtttccctgtcttgtgcatgctgcatttcctgctaccgtgaagaccggggtccaggagagtaggagactgaaagcactgtcgagaagactgaaattatcacattgacatgaagaccaaagccatctcttacctacttatctttgtagcttacgtttctattttattctgtcatgaaaactaaagtcttatgtatggtcattatgtactattttggttctgaaaatatttgtttatgttatgaaaactattggttgaaagaatggtgattacggttttggcttgaaggttcagaa

SEQ ID NO: 37027 - DNA, 6410 bp, Zea Mays
cagccgtcgcgttttggtgatcgcattacgcatggctgccacattaaagattgttgtaggctctcatatatggctggaggataaagatttagtttggattgatggcgaggttttccgaactgaaggtcaaaatgtccatgtccacactaccaatggaaagacggttactgtgagcatatcagacattcatccaaaggacacagaagtgccatctgatggcattgatgacatgacaaggctatcatacttgcatgaacctggtgttctaaataatcttgctgttcgatatgcaaaaaatataatttatacctatactggcaatattctgattgcaattaatccattccaaagtctgccccatctttctgaaccccgtaccatggagaagtacaaaggtgcaaattttggtgagctcgaccctcacgtgtttgcaattgccgatgtttcttacaggcagatgatgaatgagggaaagagcaactccattttggtgagcggtgaaagcggtgctggtaaaactgaaaccacaaagatgctaatgagatatcttgcttttttgggcggacggtctaaaacaggggggaggacagttgaacaacaagttttagaatctaatccagtccttgaagcttttggcaatgcaaagactgtccgtaacaacaactcaagtcgatttggaaaatttgttgaaatccaatttgacaagagtgggaagatatcaggtgctgccattagaacatatttgcttgaaagatctcgtgtttgccaaatcaatagtccagagagaaactaccattgcttttactttctatgtgcagcaccgttggaggatatcaaaagttataagcttggtgacccatcatcattccactatctcaaccaatctacgtgcattaaacttgacgaaattagtgatgctaaggagtatcttgcaacacgaagtgcaatgaatacagttggcattactgagcaggaacaggaggctatattccgggtagttgctgctgtgcttcatctcgggaacatcagttttgtgaaagggagagaggcagattcatctgtaataaaggacgagaaagctaggttccatcttaatgcaacagcagagctcttgatgtgcgattgtggaaatctggagaacgcattaataaagaggaaaataaatacaccagaaggagttataaccacaacagttgatcctaattctgctactgttagcagggatggcttagcaaagcaaatatattctcagctatttgactggctcgtaaacagactaaatgcctccataggacacgatacatcctctgaccgattgattggagtacttgatatctatggtttcgaaagttttaagactaatagctttgaacaattatgcatcaatttcaccaatgaaaaacttcaacagcattttaatcagaatgtcttcaaaatggagcaggaagagtataacagggagcagattgactggagctacatagaatttgttgacaaccaagatgttctagacttgattgagaagaagcctggtggaattattgcacttcttgatgaagcttgtatgtttcctaagtgcacacacgaatcattttctcagaagttgtatgagaaattcaggaataacaaaagattttgcaaaccaaagctttctcgcactgcatttaccatacagcattatgcaggagaagtaacttaccaatctgatcagttcctggacaaaaacagagactatgtagttgtagaacatcaagaattactgaatgcttccaagtgctcttttgtgtcagggttattcccatcagtactagagaacacaaaagcatcgaagtcctccattgctactcgcttcaagtggcaactccaagaactaatggagactttgagttctacagaaccacattacatcagatgtattaagcccaataatcatcttaagcctgctacttttgagaacatcaatgttctgcagcaacttcggtgttcaggtgttcttgaagctattagaatcagctgtgctggatatcctacaagaaaaatatttcatgattttctctgtcgattttgcattcttgctcctgaagttttcacagaaagaaacaatgaaaagttaatatgccaaaagattttggacaatattggactccatggttatcagattggaagaacaaaggtgtttctgagagctggtcagatggctgaattagatgctagaagaactgaagtgcggaataaagcagctataaccgttcagagtagatttcgcactcatgttgctcgtgagcaattccttgcattacgcatgacatcaatatcttttcaatcttttgttagagtgatattggcctccattacattgcagacaggtttaagggcctttggtgcttataacgagtacattatcagaaaacaaaataaagcttctatttgtgtccaggcttgttggcgttgccatagagatcatttgaattaccttaaaatgaaaagatcagtgttaatttatcagtgtgcatggagaagacggattgctagagaagaactcagaaagctcaaaatggctgcgagggacacagaagccctgaaggtggagaaggagaaacttgaggagcacgtggaagagctgactagccgtttgagcttcgaaaagaatcttaggattgatctagagaagagcaaggcaagagaaatttgcaaactacaggccactcttcgtgagatggaacagcgggttgaagaagccatagagatgcatgaaagagaattagccaaaaaggctattgaggaagctttagctcaagaaagggaaaagatcaccgtattgactaatgaagtcgatgagttgaaggtattactatcaagagaacgagaagaaaacagtgcaactaagagtgcactcgttgttgttcgtgaagaaaatgatgtgctgaataagaaaattgtggttgcagatgcaagcatggagcagcttagagatactgtaacgaggttgcaagaaagtttaattgagggagaagctactttgcttgcagaaagaaaagaaagtgatgcagccaagaaatcactcactgaagctcatgtaaaaaacgaggaactattcaataaaattgaagtagctgagcataacgttagtatcttccaagacgacatccaaagacttgaagaaactgcagctacattggagacttcattgttatctgagaaacaacagagtactgcaatcatttcacaattaactgaagcacaacaggacatccaagtactgcagaagaaatttgcagatgccaataagacaattgagctgcttcaagattctttgaaaaggtgtgaggacagcacaaccacaagggatgccttatatgtagcagaaagacaggagcatggtcaaaccaaacaagcactttccaaagctcaggaaagaaatttggaattgcttaggaaagttgatgatagtgagaaaactttaaacaagatgctggagaatgctcagagacttgagaaacatgcaacagcaagggaatccttgcttcttaagacaaagcagaatcttgactgcactacaaaagcgctaactgaagcacgagggagaaaccgagacttattgacaagttttgaggattcagctaaaaaaatcaatatgcttgaggattcacttaacagactagaagaatgcacagcagagaaagactctttgttggcagtagaaagaaaacaaaacaaaacgaccaaagaagaactggccaatgcccagaaaacaatcgatgaattagtacatgagtcacagcagtcccaggaaataagaaatcaattggaagataccatcaagaggtttaaagcagaatcgactgccagagacacaatattattatcagagaaacaggcacatgagacgaccaagaaagttctaactgaaattcagtcgagaaatgaagagttaatcaagaaaattcaggattgtgataaaaatattcttgagcttcagctaactgtggagaggcttcaggaaaacacatctactacagaggctttactgttgagagaacgagaacaaaacaatgcaaccatgaaggcacaagctgaaactcaagaaataaatttgcagttactgaacaagcttgaggacgttgagacaaaaattggtcttcttcaaggaagtgtacaaaggcttggtgataatacagcgaaagacactttgctgctatctgagaaacgtgagaaggatgccctgaaggaagcacttactgagtctgaatacaaaaatgaagagttactgataaaaactgaagaagccaacaaaaaagttgagcatcttcaaaacactataaattcgcttaaggagaacatggcagcttctttggaagctgaaagacaagaaaatgaagcaatcaagaggtcccttgttgaagctcaggagagaaacgatgcattatttaagaaagttagggatagcgaatacagggcccaccagcttcaagatactgtccaaaagcttcaagtagatgccatatctagactgtctagctttgtaatggagagacaagatggtgatggtgtcaagaatgcacatactgaggttcatggaacaaatgaagatctaatgaggagaaatgaaaacctcctaaaaaggaatgatgacttggtgaagaagattgaagattctgctatacttgttactgagcttagagggaacttggaaaggttagaagggaaagctgctaatttagaggctgaaaatcaattgcttcgtcaacaagcaattgcaactcctccatcaacagcaaagtcttctcaagctgcatgctctaaaatcagtatgatccatagatgtcaagaaagtggtcatattttaaatggcaacgtagcatatgctgaaatgaagtcctcaaccggtcaaacagaaatgagaccctcgatgggcagttcccttgatttgattaaccacaaggtttatgaaaatgggcaaagcttgtttaatgatgtatatcagcaccagcaaccccagaatcatcaacagttattgctgaaatatattacccaatatcttggattctctgggagaaaacctattgctgcgtctcttatatactactgtcttcttcattggagatcttttgaagaagcaaagacaactgtctttgacagtattatacaaattgtaaactcagcaactgaggctcaacatgatacgagaagcttggcctactggctgtccaacttatccacattgtcagttctcctgcaacgttcatttaaagccaccagggcaactgcctcaactccacatagacgaagaatttcctgtgaaaggatttttcaagccaatcaaacttcaagcagtggacttgcttgtctcagtgctcaatcagtggatggaggtaccgtgtttcaccaaattgaagcaaggtatccggcttcgctcttcaagcagcagctagtggatcaggttgaaaaggtgtatggagtgataagcgataaaataaaaaaggagctaaacccattacttgagttgtgcatacaggatccaagaacttactcaaatcaagcaaaggccttgatgtctccttctagtggcttgggccaacaggatcaactcatgcattggctgagcatcgtgaaaatcttcaacagctatttgcatgtcctcagagccaatcatgttccctcaattttggtccacaaattgcttacccaaatattttctgtggtcaatgtgcaattgtttaacaggctcctcttgaggcgtgaatgctgttcctttagcaatgggcaatacatcaaagatgggctaactcaactaagatattggtgcaatgacgtcagtcaagagtttgcagactcagcatgggtagcactgaggcatataagacaagctgttgactttgtggtaatttctctgaagccgataaggacatgggaagagatatgcaatgatatttgcccggctctcagtttgcagcagctagagcggatagtcggtatgtattgggatgatttaaagggaacaaatgtaacttcagccgagttcatgtcaagcatgagagctatgctgcgcgaagaatcaaatagcgtctccagcttttcggtcctgctggatgatgattccagcatacccttttcgcttgaagatatttcgaagtcaatgccaaacattgaggagacgtcagttaatgacctgctgcctttcatccgcgagaaccaaagctttgcgtttttattgtagtggagaggacacgaatccttagatttgttgtatgagattgcaggccagtctgtgtggagttactatccgtctgatgggtatgcgttgactttacacgtgctactgtttgattacctagcttacctgcatccacaggaactctcaaaactgacgtatccattcggccaccctcacgggagcctgcaggtatcca

SEQ ID NO: 37028 - DNA, 757 bp, Zea Mays
gccgcctcgggagcgcagagcgattaatcgggctgatcgtcgactaatcgtaattagtcggctgatcacccttctggcgatcagaggctaatcgccgatctgaaaactttgctctgctggtgctgcaacggattcggaacctgctgctgcgatggatccgggacctggttgctgtaacgcattcagctcctgctgctcttaatggtctgttcacaaattgcagctcagcatgcagccaattctaaccttgataaactatttattacaaaagtttggctactgacgagggcgaggaggatcatgatttggatgtctcgttggtgaaaaatcggagctgtctcgaggcttggcaacaaatgcgcatcgcggtcttcctcctatttgtagtcgtcgtcgagtttcctttgatcttgtgatgcccgtcttagagagttggagttgctcgtctgttgtgttgagctcggcaacgatgactcagcatgagtattgtgtgtggggttgctgttatctgagttggcaccctgtgtaggttttagaactggttttccttaaaactggatcaatttctttattcttaattaagagattgtcattacgtttttttaaaaaagaaccaccttcccgtccacgttgtggttgagatgatcagaacctggagccaacaatgtgtgtccaacacaagttcttgaggatggaaggtaattagtacatgaaatgtttgtttcgatcagttttgtgatttctatatttgaggtca

SEQ ID NO: 37029 - DNA, 4254 bp, Zea Mays
tcctcttcccccgtccacccattctcctggccgctcttccccttcgtcgtcgcactccgctagctcacctcctcgtccccatataaaccatatccctctccgggccccgcgcagccgccggcgacaagcgcgcaggagcagcagttgtcgcgcctcactgatggcgaccgccgtggcgtcgcagccgtgccaccttcccctcagcgccggcggagatcccaggtgcgcggccagcacttcgaatgttcatactctggagaaagtatatggtttcagattcatatgcagaagcattgttgatgtaaagactcacaaattccactcccgcatttcaaagaggaagtgctacttgaggaactcactgtcggagtgtgacaggaccatccacagtggtagatggttggagtttcggagacacaagggagtcttccagagaactagaaggatggttcacattattccattggcttctgatggtgatggcaaccatatatctgttaatggagctctgcaagttggttctacaagcaacattgatgaaataaagttgaaattgaataaagcattgcagagtgaagatatcagcaatggactcgtccagtcgatacatgatgctgcaagatctattgagttggctctcatagagcacagcaaattgccaaagagctcttggtttccaaagacatggctaggcgttgagaacaatgcttggataaaatcactgtcttaccaggctgctgtagactcattgttgaaagcagttatcgatgtttcatctcgtgggaatgacagagatagagatattaatgtgtttgttcaaaggagtttgtcccgcctgctcaccccccttgagagtgttatcaagaatgaattatctaagagggaacctgcattgtatgaatggtattcatccgatcaaaatcctttggtggtgagacaatttgtaaacatttttgaaaatgatccaatgttttactctgctacagcaatatgccttgaaggcgagccgatgaatactagtgaaagtgatctttctctgcttatgctaggtttgatctgtcttgctgcaatcacaaagtttggatcagcaaaagtttcttgtcagcaattctcttcaatggtgcctgatattattggtcgattcatggatatgcttcttgagtttgcccctctaagtaaagcatataacttggcgaaagatattggtcttcggagagaatttttgtataattttggtcctcgtgctgctgttcctaaacttggcaatgaccatggacttgaaatatcattttggattgaactggtgcagaagcaattactctgggctcttgatcgtgaaaagatatggtcaagactgacaacaagtgaaagcattgaggttctggaaaaggatcttgcaatatttggtttttttgttgctttgggtagaagcacacaaggatatttgtctttcaagggtttgactgatttggatgattcactgaatggtattgtaaggtatcttatcggtgggagtgtactatattatccacagctgtcctcgattagttcatatcaactgtatgtggaggtagtctgtgaagagctcgagtggcttcctttttacaatgatgatgttttaagtgcaaaaactgatactgaaggtagagaagaagtgcctaaaggagaagtcatatcaagagtcctaaatgtgtgctcttactggatgactagttttacaaagtacagctcatggcttgagaacccttcaaatgtgaaggctgcaaagttcctttctaagggacatgtcatgttgagtgactgcatgaaggagcttgacatatcaagaaatatgtcaaacgacagtggcttcctagaacctgaagaagaattggatactggaacagaattagcttcctttgacaagtcgcttgaaaatgttgaagaagctctggttaagttagaaaatttgcttcaagaattacatgtttccagttcgcactctggtaaggaggatctgaaggctgcatgctctgatcttgaaatgataagaagactgaagaaagaagctgagcttcttgaggcatcctttctagcaaaagcagaatatctggaggccgatgcaagtagcggatcactatctcctgcagaggaaggacctgtaaagacaagtagcaggacgaacgatacatcagcaccacaaaaaacaggaagcagggtggataataaacgtcgcccattttgggacttctttggtcggtctttgaaagttgatccagctcttgcagatcaggatctgatcactgtcgccaatgtggagaaggaaggcatggagtcaaatgacatcctccgcttcgaacagttaagacgtgagctgattgagttagaaaagagagtgcagaagagtgcggatgaagctcaaaaggaggagatggttgtcgcagaaaaaacaactgcaccatcgcctggatcatcagtttcttctcgtcagactaccaagaaagaaaatgtcataactaaatcagtggagaaggtcaaagagactacaacgactgtgttgcaggggacacaactattagcaattgatacaggagctgctatgggtttgctaaaaagagctcttattggggatgaactaactcagaaggaaaagcaggctcttcaaagaacattgacagatttggcgtctgtcgttcctataggaatactcatgcttttgccacttaccgccgttggtcatgctgctattttggctttcatccagagatatgtgccatcgatgatcccgtccacatatgcccccggtaggttggatctccttaggcagattgagaaggttaaggaaatggaagttgctgaaggcagcagtgaagatatattggaggaactgaacaaatgaaataagctgggcatgtacagatggacatgattatactgcttagcttacggtctttcctgtaaagttgttttggaacaagacatttgagggggtttgttttatctaaagattctttgaatggcatacccgctggaaacagaagtgcaaggccctaggaataagtaaccaatcattgtgtcgacaaatgttccacgtctgcaggctggtgtatacataaaacatactccacattatacattacatgggcggctcacggtgcccttcaacatagtagaggatgaatgtccaagttcctcctggacagtgttctgtgtagggtagtggttttgatagaggattgtatatctagttggtatgttggtgatcacctttgttttgttttttaggaaccaagcctactacatgcattattgtctgtacccaaatgccaagttcagtgatctcctacgggattgagtggtgcgggcattttctaataataagccaagcccgtgagcaagatgtaggcgtgaacagtgttcgtcagtcgccgccaccgtctcccctcctgatccaatccaatggcgcgcctccacctcgtagccgtggcaatgggcttgctcttggccttgacgacggcgcaggcaccgggcgcgtccacgatgcccgcgcccatggcgcagcctccggcgacctcggcgcctcctcgtcccgcgccatccccgacccagaagaccgctccagctccggcgcccaatgccacggtacccgcccccgcctcgccgccggcgccgagctctatcgggcagacgccgaccgaggcgccgtcctcccctccgccgcccagcgccgcgtccagcgttgcctccgccttgtacgtggccgccgctatggcggctgtcgtgtttttcttctgaggtcggtactcggcgccgatggatccgccgcctatggtatggtacggtgcggtgtggatttgacacgatggctcccgctaccgctggtcgagtttgcttattaggatactagtagttaattaatagttgggttgatcagatcagatctagcgtttttgttgagtggggatattatttcttctacggatctgcacactagggttatgtcactatggttgccattgttattagggaaggtgcaaacttctaatttgaatcacatgatgttgatccaagggacgcataagggacgccaagcttattaaaacgataaaacgatggaacgctcatgggtgaaattttgacttttaaacgtttaaactttgtttaaacatagttttaaacaacataggaaaaataccaatatatcataatttcagacaataatatgaagttaaatactccctccgtcccaggatataaggcgtaactactttttat

SEQ ID NO: 37030 - DNA, 333 bp, Zea Mays
aagtcttcagtgtcacctggccggcacgaaggttggagaacctgaactccactcgctccccaagtcggttcaaggaacgcctgcgccgcggtttagcctcgacatccagccctcacccccgtcgccggtttggacgtgcgtgcgcaatcaatctggcttctggcctcctctgcgccgtagcgctatacctgtatggatcattgcgatatacatgcaggggtaatacctgcatggatcattgcgacatgcaagcagaggtaaaggattgaggaaccaggctgaggctcgacgaagacgtgaaaagggtcgctttttttagctgctaataatacc

SEQ ID NO: 37031 - DNA, 1116 bp, Zea Mays
gctagcgctcagctccgtcctttcttcctctattcgctcacgcgcaggcgcgcttcgccgagctcgcccctgcacgtcctgctcgcccctgcttttctctgttggccgctgcacagctccagctcggatttcgctgtgcgctccttagttcgacacccggtgctgctccatggatggccgatgttgctccatcggttcgctctcgccgcgcgcggttgagctctctgcgcacatgccacgcgcagccgtgtctctatgctcgtcgtggccggttccctatgttgtgcccgggattttgccgcgcgtccctgcttgccgtctgtccacgcgtcatgcgtggagcaacaaaacaaaaatctgtgcgcgtcgagctcccgcgccgaattctttttcagcttgatcgtgacgcgcgcataatggacttgatgtagtcgctgcgtgtgcttgtgtccgagtccacccggccgcaacctcgctttgctctccgcgtcgctgttcgtcgggtcaagccccatgttgtcgcgtctctgtttcagtttgtcgtgccatgccatcatcacttctgtcgcaagctcgttagccacagttatcttgaccgtgtcagcacgtgactgtggtcgtgttcatcgatttcgccaacgctctgttgccgattcgactgtcgtcgctggtgatagcttcgcgtgttgtcgagccggtcgttttccctgtcctgtgctcgcgcagtttcctattcgctagcgcgccccctcggctcgcttggccttaattcccatcgcgtcgtcgatttcgccggttatcatcgttcatcgtcgcgtcgcgtgtgcagctctatatacgtcaccctcatgtgtcgttgtcgttcagcgcgtcatcaagaaatcccaagaatcaggtgaagacgaagccagcagcatggtgtttcactaagtgcgcgacaaaaagcttgaacatcctacgcgactcaagttcgattcgtcaaaaattattcagtcgaggagaagatcttcatcaattgattaccgaagaaaagaagacccctggatgacgtcaaccggaaaccgtcagagtgcttccgactatcacgtcgaattagtcagggtaagcaaacttgtt

SEQ ID NO: 37032 - DNA, 2915 bp, Zea Mays
catcggcaaggctttgctggcttgctgcagaagttgaagaacatcattacaaacgagctccctacaaagtatacagactaaaaaaaatagaaaaggaattccgcataaacccctcccagccaaaaaaaaccacccccgccgcggccgccgagcgagcggtaagcagccgccgcaccacgagagcgggatggcgtcggctccggagccggagaacgggagggaactctacgcgctgctccacctctcgccggacgcctccagcgaggaagtccgcagggcgtaccgccagtttgcgcaaatctaccaccccgataaataccaggacccgcagatgaaggatgtagcaactgaaaacttccaacgaatatgtgaagcttatgagatactatcagatgataacaaaagacaggtgtatgacatctatggtatggaaggtttaaattctggcctggaacttggtcccaagctaactaaaccagaagaaatcaaggaacagttagaacgactgcggcggcgcaaggaggaagaaaaacttttcaagcatgctctacccaatggctcaatcattgctaatttctcagtgccacaatatttaaatgacgggagcatcatgagaggcaacttctggacttgctgtttctttgagagatgggtctatcaacttgtcaaatgcctggactcgccaattgtctgacaatactgttggaaatatacagctagtccttggcgatgaatcaagtatttctgttggatggcaaaagaaggatgaaaaacgtactgcaactggagaagtaaaggtagtttcacttaggtagtgtttggttgaagagccaagtagaacggaactgttctgtcccagttttgttgttgtttggttacaaagtaactagaacggaatgactccaattagggaatattctcctcagatctggaaccatcccgctccaaaaaatcaaccggacggagccgcttcgttcccagcccgctcgcacagtcacgctccgttccgttcactctccaaccaaacaaaaaacagagccgctccgttccatattaccaaacacagaacagagcggctccgttcctagaatcagggatggaacgactccgttctacttggcttctcaaccaaacactaccttagaagccaactcagacattaatgaaactgttggcattatcttagaaatgcatggttaactccgtatagatctagtttgatagatgtgttcttattgttttgttctgaagaatctatgccccttttcatataaatattcccatctagttctctttggaacataagagtagtacttgttgtagtcgtttcaaaaactttccattgtgttctgaagctagttgtgtagtcagtaatgaggtaggattatagagcagcttaaaagtggtcatagcttcatggccatcatatactttattttttaggagaacagtgatgaaggtcctccagaaattttaatatcattgatataggctaatgttgtgcaaagacttgcaaaacaaaacaaaggtcttcatgaccaggaaaaggcagtatacttctaaaagatgaagatgcatttttctgtctaatagtttaagaactatcttgtgtttaatgtgggtccttgaaaacaagaagcacatctatgcacataacctgtggtgagtatgctacaattccatgtgatatcttcttacaacacatgcggagtatattgtccacacatttgaactgattttgtgtattttggttgtaaatctgcaatgccttcttccttcaacagctatctgtttttatgtattttctcctcttatgtcaggccaacatctgatgctctcagtggtgttcatttattaattaccttttctttttctctttagtttggaactaatttttttggtgcatctgctcattatacacatcgcttctcctccaaatctcatgcacgcatcgctggtagagttggaagcacaatccttgattttgaaattggaggagggaggcgaatatcagaatttagtactgtaaggatgatgtataacataggaattcagggcgtatcttggaagtttgagttacatcgtgctggtcaaaagttaatcatcccagtcttgctttcaactgatttaaatccattatttgttaccagtgcatttgctattccttcaacactgtattttctacttcagacatatgttgtaaagccttactaccttaagcgagaaaagcagaaaacactagaaaagatggaaggcttatctacacagctaactgaagccagaaaggcagctgaaaaagctcaaaaattactggaacctgtctccaaccgtaagaagaatagacagctagagaacaacggattggtgataacgaaggctctatatggcagtcgccaaaaaatcaaaatgagcagtgaattgaatgatatacacaatgacatggcttcacaagtatttgatgtgaccatcccactgaacttcctcgttactgaggcaggccagctcaagcttcatgacgggataaagaagtctggaataatgggtttctacgatccttgtcctggagacccgaagctattacttgtcgagtatacgtttcatggtcataaatacaaggtcatggtggatgactatgaggcgctgttgataccacaagatatccatcaattttgaacggttcctgatgtaaaagccacatcaaaacgattttgggtcatcagctccctttctcacattttttgttccttttgtgttgagctatctctgttttcggtcattccttaatgcgcctcgtatttgtatacacatgtcggtttgtgccacctcgaggtcatacacaccaacagcaggtaataaagctgtagccagtagttttccagaaagaaaaaaaataaaaataaaagtaaaactcaatg

SEQ ID NO: 37033 - DNA, 305 bp, Zea Mays
attggcctttgtaccgcccgcgtcaagtggccaacagctaacagtactcactaccgccccggttcgccggctcgtcgtcgtcgtcacgcttgcagagttgcagatgcgtgcgtgcggtgtgaacctgggcgcgacagatcccacttccaggagcaaataatcgcgtgctctgctgcagacatgggcatggtcgcagcgagggcaagcaaaacactgccgatgtgggccgtccagtgcgttcgtccgtcgtctgacctgaccaccacgccggtcgccgccacggcgccacgctcatgtcgcgcctg

SEQ ID NO: 37034 - DNA, 4980 bp, Zea Mays
aggggaggttataagggctagctgatgtccctgagcaaccgaggcagccctttcgatcatatgagaccaagatgttttctggtcccaaaaccatgaaggcagtacatgaataccagtttcttcctgagcagccaagtgatacatatgagagggcaagccagtcacacttctatgattcttcagcagaagcgtcaaacttgagggtagctccgctgtctacaggatcacgctttctccatggagttgagcaggcacctagctatacatttcacagtcaatcatctggttctagccatttgactcaacgtggcagtggcaggtcacctattgcatcggcattgacagatcatgagggggctttgtcaaatattaatgctagcacaactccaatccacggccaacttggcatccctcaagttgccggattcgaaagccccctggcatcccctgaaagattgggttatcatgatgaagatacatatcacatggacagaaagcgcaagcataatgaggaagctaagattgctagggaggttgaggctcatgaaaagagaatcagaaaggagcttgagaagcaagatctgctgaacagaaagagagaagaacaaatgcggagagaaatggagagacatgatcgtgagagacgtaaggaagaggagaggttgatgcgtgaaaggcagagggaagaagagaaattccaaagggaacaaagacgcgaacacaagcgcatggagaagtttatgcagaaacaatctatacgagctgaaaaactgagacaaagagaggagcttcgacgagagaaagaagctgcgaggcagaaggctgctaatgagagggctacagctcgtagaattgcgcgagagagtatggaactgatggaagatgagcgcttggaactattagagttggcctctcgtagtaaagggctgccctcaatggtttctcttgatagtgacacattacagcagcttgattcattcagaggaatgctggggaagttccctcctgaaactgtgagactgaaggtgcctttttcaataaaaccatgggcagcttccgaggatattattggaaaccttttgatggcttggaagttttttgttaccttcggtgatgttcttgggcttccgtcatttacgttggatgaatttgtgcaggctcttcatgattatgattcaaggcttttaggtgaattgcatgtttctctgctgaaatctgttataaaagatattgaggatgttgcccggactccttcagttgctttaggtgtaaatcagagcagttctgctaatcctggaggtggtcacccacaaattgttgaaggggcctatgcttggggcatcaacatactcaactggcagagacacttgaactttcttacatggcctgaaatattgcgccaatttggtttatgtgctggttttgggcctcagttaaagaaaagtgatgctgaaattgtccatcaccgcgatgataacgagggtcgtaatggtgtagatgtcatttccattctgcgaaatggttcagccgctgtgaaggctgctgctttaatgaaagaaagagggtatactaatcgtcgtaggtctcgacaccgtctgacacctggaacagtaaagtttgctgctttccatgtactgtcacttgaagggagcaaaggtctcacaatattggaagttgcagaaaagatccagaaatctggacttagagaccttacaacaagtaagacaccagaggcatctatatctgcggcattgtcgagagacactaagctttttgaaagaacggcaccttcgacatattgtgttaaaactccttacagaaaggacccagatgattctgaggctgtgttggcagcggcacgtgaaaaaatcagggcgtttcagaatgcgcttccggagtgtgaagaagtcgagaaggatgtggatgaggctgagagggatgatgattctgaatgtgatgatgccgatgatgatgctgatggtgatgatgtgaatattgaagacaaggatgccaagtcgccccttgttggagctcaatatggtgcacaaattacagtagttggtgacataaagaaagaatcaaacatcgtgatgaacacatcagtgccaccaagcattcagattaaatctagtgcaagtgtaccatttcatactttagacagtaaagcaagtagttcaactgatccagaggttggagatgatgctaaagacattgagatagacgaaagtaatcaaggggagtcctgggtacaggggctagctgagggtgactactgtgatcttagtgtagacgaacgcctcaatgctttggttgcacttattgccgttgctaacgagggaaattctatccgtgcaattctggaggaacgcctagaagcagcgagtgctttgaaaaaacaattgtgggctgaggcacaacttgataagaggcgtataagggatgactttactagtaagatgcagtatgattcttataaccagcttactactggtgatgtatatcatcagcggaatggtgcaagccgagaatcgagtactaacgcagaaagcttgtctgttcagcaatatgcttcatctgagaaaactcgatctcagttgaaatccttcataggtcacaaggcagaacagctttatgtgtacaggtctctaccacttggacaagaccggagacggaaccggtattggcagttctctgcatcttcatcatcctatgaccctggttcgggaagaatcttttttgaatctagagatggatactggagggtcattgatacatcagaggcatttgaagctttggtagcttcccttgatactcgtggcatccgcgagtcacatttgcactcaattttgcaaagtatcgagccaaccttcaaggaagctgttgagaggaaaaggtgtgctaatttagaacacccaactggacggacttcggaaaatggaagtaatgaaagtccaaattgcaacaatgaatttggaagtccatgcagtaccctttctggtgttgcttctgataatcttatggcacattcagatattttcaagatagaggttgggcgcaatgaagctgagaagaattctatctcgaaaagggcttccgtgtttctgaaatggatctggagagagtgctacagtcaccaatctacatacgccatgagatatggaaagaagcggtgtcctgagttgattcactcttgtgattattgctaccagatatacttagctgaagaaaggcactgttcttgccacaaaacattcaaacacattcacaatttcttggaacactcatcacaatgtgaagaaaaacaaagaacagatcccaattggaagatgcaaactgtggacctttctgtacccgtaggattgagattgctaaggctgctcttagctaccattgaggccttagtaccggcagaagctcttctacctttttggacggatgggtatcggaaatcttggggtgcgaagttgtattctgcatcatctgccgaagaagtcttgcagatgcttagtgtgctggaaagtgcaataaagcgagactacttatcatctaactttgaaacgacaactgagttgcttaattcaagcacacaagattttgctactcagaattcggctggaggttctggatctgccactgcacttccatgggttcctgacactactgctgctgtagccttgagattgttagacttggatgcttccatctcatacacccttcatccaaagttgggttcaaataaggagcaagaatctggagatttcatgaaacttccaccgagatatccttctatgaataagggcaaacaagaaatagaacagttcaggcctattggttttgatcaacaggatggaacgttgctacctaacagcaatggtcgtagaggtcggggaaggggaggtagaggaggcagcaggggaggtagatctcgtggtcatggtggtagggttcccagaggtattggcagctcttccaggattcagttcagggatgacaatagtatgctctatgggagagccccacgaaagaatgcacgtggtggccgcggccgtggacgtggacgtggacgtggacttcgaactgttagacctcggcaaccatccgagctcagtgccagatcaattccaaaggcaaacctattgggcagttttagcatgttaagtaagacaaatcacactggcactacgcattctcccgagagctcaggtgcagaagagtgggcctttgagaggagggaatatgtgaaggatgatgagaacaatttggtctctcaatccgatgagtctgaggaaaatgtcgaacctatgaatgaggaatatggtgagcatatttcaggctatccaagagacaattccgactccagacccgtacagatgatgggtgatgggagcgacgataatgatgaggatgctgaaggagatgagggtgaggaagatggagaggactatgaagctgaagatcctggtgatgaggatgatgacgttgagatggatggggatgatgatgtcgaggtggatgaggatgatgacattgagatggatggggatgatgacattgaagatgatgatgacgacgacggtggagatggagcagccaacggagatgaggatggaggtggtacatcatcatattcttcagagtatagtgaatgatgagtgattgaagttgtgcaggcttgtggtaaatgatgtaacagaggctttggtgggctcaccaacgctaatgctgacttgaaaaactatttaggaggttgccagttctaaactgtcttgtgtggcttgttattagatagaagccactcaacattagaagatcggccttgtgtgtatacatacataccaattatcaaaagttgaaaatgagggtcgatcagctgtctgttttatgttcagctacttttttcattgttatatattgggagcgttctctttaagacggttgacatatttctaaactcactctcaattttgattttgtagcaag

SEQ ID NO: 37035 - DNA, 3877 bp, Zea Mays
ggcagacacaatgaaaaatgattgaaatactgcgagtgtggcaaacaaactagctagttccaattttgagcactgctactttacataagtaaatgaccaaacctatcaccaaaaaggaaattgtgtacacaaaatggaagaaaaaacacaggacgaaatacgcgagaaattccaggacacagcggcggtcacgcgttttctgacggctgacctgattgggagcacgccgctgccgttggagttgacgccccggcctggagccaccgtcatcgaggggggattgccgcgttcggcgccgctcgcggtgacggtcggcctcgcactcgctactggtggtggtggaagcctcgcactcgctatcgctagtcgctactgatggttccaagagcaaaggcccatgttgtttgggatccagtaggcccaatcaagccgttgactccgaggagagccgcttccgatgtcctcgcctcttgccgacaccttcacccactcccagcaggccagcacacattggcgacgcttctcgccggagaagggtgggcggaggatgccctgcctggcccctgccaattgacggccacatggcttcttctagcaggcaagtagataaacctaccacgacgagcaaacgcagatctgtagcctagtcgttcggggtggtcgaatggcagacccagtgaccattgctgcagtgggctggggcatcgctgctgtaggctggctcgtctcgcccatcatcaccaggcttctcaacaaagccttttcctacctcggtgtcgacggagccaagaagctgaaagagctcgagactaaagttttacagctggagctgttgatggaagcggttgaggagagtcctcgcagaaaccagctggagagattgtttcaggatctcaggtctgccttctacgaggctgaagacatcctggacgatgtcgagtactgcagtctggaaaggcaggccttatctttatctcaccccggtgacaagttggattcccagagcatgccttctagtggcaagaactgggtaaacggtgctacttcaaatggcccacctcttagggtgtcaaaaatggagctcagtaaaatcctggagaaaatagaaaatattgtgactgaagcacacaaaattttgcagcttttgaacttgccaagcggcagtaatgttgacaagagacaaattgttgctgagaattcacgcggtgcagtcactactgtggcccctccacgtttagtaattggccgcgacgaggatcgcgtcaaggtcatatctatgcttcgtgagacacttgatgatggtcaacaggatcgcagcggtgctaaaccatactctacaattggcatttatggcattcctgggtctggtaaatctaccctcgcacagtatgtttgcgcccatgaggaagacaatatccactttgacattgtcatctgggtccatgtgtcgcagaaatttagtgtgcgagccgttttgagggagatgatcgagcagggttttgagggagaaagcatcgagaccgaggagagtttcagatggtcggagctgagattgcgaaaaagctcaagcggtcacctctagctgccagaacagtgggaagacagttatgtataagaccaaacatcgagttttggaggaatactcgggatcgagaccttctggacgagacaatgggagctctgtggtggagctaccagcatctagatgagcaggtcaggcgatgcttttcttattgcagtatttttcccaggaggcattggctggaccctgagtatttagtcaggttgtgggtggcagaaggatttgtcaccagccgcaatacaggggaggaactggaggctgttggtcgaggctactttgatgagttagtgtcagcctcatttctgcaaccagtagatggtgacaaggaacgctatacgatccatgatctgttgcatgacttggtaagtaaagtagctggaagtgactgcttcagagctgacaatggctgggaaggagaatttcctcaggatgtccgtcatctttgggttgagaactgtaaactagacttgattgcccacaagattaccagactgaaaaagctacgcaccctgatcatttctgctggtgagaatgacacgccagttgaggaaaaagccttgttggaaaatattttcacgggtgtgacgacattgcgggtgctccagataacaccctggacagcaggaactctctcattcccagcatctgtcgggcggctaaagcatctacgctatctttctgtcggatctctgaatgtaccaaacataggcaggattgtgtcactccgaactcttcgatgcttcagggtaaagaagaaggcaggctacgagttgtggcagctgaagcacctcaacaagcttgagaagaagctagtgatccgcggccttcagaacgctggacgcaagggagaggctccagaagccaatctagctgccaaggaacggctcacaagcctagcccttgagtgggacagtgatgcgccgctgagctgcggcgcggacctccaagcagaggtactggagggcctctgccctccgttgcacctcgaaaaactgcggctctgttggtacggcggctcgaggtacccagactggattgttggtgtgcgatgcctttgtctctaccggtgcagccgactaggcgcctttcatggatgctccccccgtcttgtcaaactgaaaattttagagtgcggctgggatgccttgccagataacatggagcacctcgcctcactccggaagttggttattgacggctgcaaggatctacggtcgcttccagagctgcctcgctctctgctgcaccttaagatctccggctgcgatggcgaggtcatgaggtcatgcaaaacggttggacatcccaatcgcaaaaggatacagcacgttcgcacagtaatcatcggatgggaatcacttcccagagcagagctattagatcactttgagagcgagcctgtggtgccggagaaagagaaggagatcgccgcccttgttaaaaagttgctcgtgatgcttggccttctactactttgcatgttcagtgtgattgcaaggttgcttgtgggctctttcctgctcccagctccgctggtcgtcgtaattttgctgcttgtggtatggataattttgacactctagaggcctgtgaaatcggttatgcctggtgccgttaaacacggacactactctctatcaattttcttctcttctctatggatattatgtttgcttgcctatatctactcgaccagtctgagaaaagatactatgtagttgtttgtatggaaaaaatgttgtataagataaaaaacgaatataaagctatgacctttttttttgtttttggatgagtatacttttagtgtttttgtttagctagagatgctagtgtgtttgcttgttgttgtgcacagtttgtggtactgtgtatggcctaacgctccggcggccctgaagttgagacggaaagggtggttgcggacagtccgttcttagaagcggacagtccacgattagatcagacggattaacttctatctccacacatgtttatctctttaaatacgtgtgagttattagaagtgctgagctagctctgcatgtacatacataaataaaaaatctcaagaaagtccctagatcaaacaaataaataaacaaaggaaacaaagagcagaaacgaatcaaaggatccagatccacacctagatagatacaataatataggcaatcagatgtattggtgcgatcgtgcaattaaacaatctctacgtttgatcctatatatatattattattaagatattatcaccgcatgatttataatcaatgacacaaattgcttgatcct

SEQ ID NO: 37036 - DNA, 3818 bp, Zea Mays
gtacgaggcccatctcccacgacaaatgaaaaccctaatctccagcaccccggcggcctccagcgctcccgctccttgctcgcctccacccgcggcaaccaccgccctgcggcccccgccgcttgccagcctccaccgcgccgcgagtcgcgttgttcctgcaccagctggtcctggagcacgggaggacgagcatgtcctggttcggccccaaccccaaggtgaccatcgtcgacccggacctggccaaggacgtgctgtccaacaagttcggccacttcgagaagctcaaggtcccggtgctgtccaagatgctgggctccggcgtggccagccacgagggcgagaagtgggtcaagcaccggaggatcctcaaccctgcgttccatcttgagaagctcaaggtactactaactactacatataattaattgcatataattaattgatccttggaattatctggcaatgtgcagcgcatgctgccggcgttttctacgtgctgcgaggagctggtgagcaggtgggcggcggagtcccttggctccgacggctcatgcgagctggacgtctggccggagctgcagaacctgacgggagacgtcatttctcgcaccgcgttcagcagcagctacagcgaagggagaaggatcttccagctacaggccgagcaagcttcgcttgtcatgaccaacattcggaagatcatgatccccgactacatgaagatgcgcaggaacaacagggaggtggagtcaatcctgcgagagataatcgggaagaggatccaggcgatggaacgaggcgagggcaccaaagacgacctggtgggtctactgttggagacaaacatgagagacgacatggggatgacgatcgaagacgtgatcgaggagtgcaaggtgttctacttcgccgggatggagaccatgtcggtgctgctacgtggacgatggtggtgctcagcatgcacccggagtggcaggaccgcgcgagggaggaggtgacggctctgttcggcagggacggcaagcccgagtacgacggtctaagccgcctcaaagtcgtgaccatggtgctctacgaggtgctccggctgtacccgtcggccacctccgtcgtccggcaaacgtacaaggagatggaggtcggaggcgtcacctaccccgccggcgtgatcctggagctgcccgtgctgctcatccaccacgacccggacatctggggaggcgcgcgagttcaggcctgacaggttctccgagggcgtgtctagggcctccaaggaccccggcgcgttcctcccgttcggctagggcccgcgcatctgcatcggccagaacttcgcgctgttggaggccaagatggcgctctgcatgatcctccagtggttcgagttcgggctcgcgccatcctacgctcatgcgccgcataccgtgataaccttgcatcctatgcacggtgcgcagcttaagctcagagcaatatgatctcgacacgatgggtgtcccatcgttgatgccattgttacgtataaccttacaattcagataggcattcggcccctgttaatgtctgaaataagtatcttcgcgttggcattttgtaatgtgcttttcacgtaccattggtgctttattgccttttgtatataaacatgtggatatatgtaactcatacattacacaaacaaacacaaacacaccagagccagagctatagggtggagctataaaccgtggctctacttttgtacacaaaactggctccacatgttcttccaatcctgcaactgcgtttttcgcatccccgtttgattgcaagaacgggactgctaagcaagctaagatttcaatggcatattccttcatacataggccattgagcgacgaggcactccgcgtcagcactcccgtggtggtcacttgcaatgaccagagacgggaggtctccgttgcccagaacatcgctaacaaggaaattaaccgcactgttgcattcgacaaggtgctaggtccaaagtctcaacagcaggacgtcttcaaccatgctgttgtgccacttgtcagtgaggttttggacggttataattgcacaatatttgcatatggccagactggaactggcaaaacatacacaatggaaggaggagggggcaaagcactagtgcagtttttattatatatattcacatgctacacatgtttctgaattctgatgcagttagtttgctgcttcaactgacgccataactctactccattcctgtagaatgatgacctcccgactgatgtcggtgtcattccaagtgctgttaagcgcatatttgacatcctcgaggcacagagtgcagagtacaacatgaaggtttcttttcttgagctgtacaatgcggagctcactgatcttctagctctacaatgagattgcaagaacgggactgctaagcaagctaagatttcaatggcctattccttcatacataggccattgaaccggaagattttatgattgcaataagatatcatgaggcgcgccgaggagaacagggacctcctctccgcctcctccttcgacaggcagctgctgcggaaggaggtggtgaggagggtcaaggccgcggtggcgggacgtgagtgaagtgagctttgtcgagcctatatgtggaggtcggtcgtgaagctgggactaggacaagggcgagctgaaggctagaagctgtaaatgcacccttcaagagtcttcataggccaagtctctacgtaggtgttgacaaaaaggaaaattcatgacaatgcgtttatatgagattgtccaatatcgaaaccaagaatacatgggggacaactgtattcgatttttgtttctctttcgtggagtattactgaaatatatgcttccaatgttgaagtttccaaattaaatgttatctctgtacaaagtgtgcaggctcggttataggaattttataaagcaaatgacaaatatacatgtacgaacttcaaatatttcctggtactaacctctctgctctgagatgacatgttcttttgttgttatgaaatcaaatatttcttcatgatctcttataatctgtcaaatgatgtttgcccagtggcaatagaaaacccttatattaaagagataatcgatgatgatgcgaacagacctaaagattagaaggaaacagtgggcgatgaaagcaaggaatttgggaggtacatgcgacagagagaagagcaagagaagcaggaagcggagttgttcactcgggctcttgtaaccaaacatgataagcagatcgagaagcgcataaggagacaacttcatgggctaggaggcttaactgacggttttggccttgggatgaacatgctgttgggaggagacaaggaagatgatggcggttcaagaaagtcgcatggcaaaagcggaaactgaaagaagcacgtgaagaacagcaagaagaggatgaggcattagccctagacccacactgttgtagcacttcaatatactgatagagcctagaagatggttcaagcaagccacacgaaaagttgaagccggagaaaataccaagaaaccaagtagagaaaaaaagttttggttcctataggcgtattatttctgaaacacaaaacttgatctgagcgactgatcgtgagctaatgtaacagtatgaattatatggcttgaacatggtaggtgtaaaatgttttgttcatcggtagagtattccagatgtgatcggcttaacagtatgaattatatagaactatgtgagccaatgtaacagtatgaattatataagttatcaa

SEQ ID NO: 37037 - DNA, 2074 bp, Zea Mays
ccccccgtggtcccgtcgcccggccgtgagacccaacggcgtttggacgagtgcaacagccgcacgccacgagcgtgggcgtgagtcgtgaccacgtgcggcctgggccagtaccggatccgggcgcgggcggacaccggacggacacaccgcaccgccatcgcccatcggcatcgcctcccaaccgtggttgacgagctcctggagcagatcacccaaacgcgaaagccaaaagccaaagcgagcggagcacaatttatcgtgcgcagcatcggcgcagcccctttccccgcccgcccacaccgcgcaccgcccgaccagctacgggagcacgccgcccctcccccctccccctccccgccccgtgccgtcgctcaccagccccagcgtcgccgttccctgctaactctatcccctccgcctctcgtcgtgctgaggagggcggagacaactgcggtgcggtggtgcctcctcaaatccccgccgacactttctgccgcccccaggtggatcctgtccgcggatccaggaggtgctatctagctccctgatccaagctgaaattaggatctgaaccttccggggcgagctgatgtacggctcgccggtgtccaaggacctcaacgtcccggtgcagccgcccatgatctcgtccgggctgctgaggtacagatcggcgcccagcacggtgcttggcgacctctgcgaggacttcctcccttccgcgtccggcgccgccagccccgacaacgtcttctccaggttcctcgccgagcaccacacccgggacgacaagccgtcgccgccaccgcctgccgcggtccacttcccgagcgaagcggacatggcttcccagcagcagcagcaaatgatgttccactcccaccaccaccagcagcagcagcagatggtgggtgccaagtccggcctttaccgcaccgtgagctcagacatagaaaccgcggccgctgttggcaccggtggcgccagcaacctgattcggcagagcagctcccccgccggattcctcgatcatctgaacatggacaacggatacggggccatgctgagggcgggcatggccacggcggactccctcgcaggtagcggtagcaggctaaagggccagctgagcttctcgtcacggcaggggtcattgatgtcccagatctcagagatggacagcgaggaggtcggagggagcagcccagaggctgccggcggaggcagggggtacatccctgggtacccaatgggttctggttctgggtgggaggactcatcggcgctcatgtcagacaatttgtctggcctgaaacgcccccgggactcgtcggagcctggccagagccgcatcacgcaccagttcagcctgcccaagacgtcgtctgagatggcaagtattgataaattcctccagttccaggacgcggtgccttgtaagatccgtgccaagcggggatgcgccacccatccgcgcagcatcgccgagagggtgaggagaacaaagatcagtgagcgaatccgaaagctgcaagaactcgttccgaacatggacaagcaaaccaacacatctgacatgctagatttggctgtcgactacatcaaggaactccagaagcaggttaaggtgttaaaggagacccaagctaattgcacctgcccagcaagcaagagccagcagcactcttgctgaagccctgatgcacactatacatgacctgcagaactcgaaagcatcttcacttgggatagaaaaagattgtgtagctttatatgagcacaggggaatggaacaatggcatcatcctcaagcattcaagtgatagggagaagggtaaaattggggagatatataggagaaacaactgtatagtttcgttgtagctttgctatatgtatactacactttcggtataaagtggttaatttacccctattgctagtcgtagcagctgtaaatgtgccgcagataagttgtagaaaaacttggatgcgttcaatgcgagcgatagtgtttcgactctgaacatatattatcattgaattaatgggcatcctctactgaggtctg

SEQ ID NO: 37038 - DNA, 2409 bp, Zea Mays
tcttcatcttcctcgcaacgccgacgctgcaacttccgctccctccccgactcgcgctcggcacgcaggcaggcgactgcggtggcgctcaggctcgggctctcagcaacggcggggcagtcccagactcagcggctccctctctccaatcgccttgcgccctcgctccgttcctctgctcaccggccgattctgcgttgcaatattttccagcatagcttgctcacctacttctcaatttagaagacttcaatttctggatctgagcatcaaatcaagaccataccactttagtcagtcctgtctgatggcactggctgcagctccagccagtggtgattcacagagtggtcctcagaggaactatcaggttgttgtggctgccactcgtgacatgggcattggcaagggtggggtcatgccatggaagcttcttggtgatcttaaattcttcaaagaacttacactaactacaactgatcctgccaaaaagaatgcagttataatgggaaggaaaacatgggagagcattcctgttaagtcaaggccactgcctggtcgtttgaatgtcatacttactcgatctggtagttttgattttgcaacagtagagaatgttgttatatgtggaagtatgaagtctgccttagagctgctagcatcaactccatactgcttatcaattgagaaagtttttgtcataggaggtgggcaggtactgagagaatatttgaatggacctgcatgtgaggctatccatctgactgatattcagtcaagcattgagtgtgatactttcatccctccagttgacttttcagtgttccagccatggtattcatctttcccagtggtagagagcaacattaggcattcttttgtgacttttgttcgtgttagaaagtcagtggcagaaactcatgagtcaaatggcaaggaatcaactgagattgataccaagaatgacaaatttgaaatagagaatttctcttttctccccaagatagtatatgaccgccatgaggagtatcaatatctcaatcttgttgaagatattataaggttcggtgctcagaaaaatgacaggacaggaactggaacattgtcaaaatttgggtgtcagatgcgattcaacttaaggaaaaattttcctctgctgacaacaaagagggtgttttggcgtggtgttgtcgaagaactcctttggttcatcagtggctcaacaaatgcaaaggttttgcaagaaaagggtattcatatctgggatggcaatgcttcaagagagtatcttgaccgggaggaaggtgatctaggtccagtttatggatttcaatggcgacactttggtgccgaatatactgacatgcatgctgactatactggaaaaggctttgatcagctaatggatgtgattgacaagattaagaacaatcctgatgaccgccgaataattttatcggcgtggaatccttcagatctcaagaagatggctcttcctccttgccacatgtttgcacaattttatgtggagaacggggagctatcctgccagatgtatcaacgctctgcagacatggggcttggtgttccattcaacatcgcatcatattctcttttgacatatatgattgctcaagtttgtgatctttctccaggagattttgtccatgttataggggatgctcatgtctatagaaatcacgttcgagctctggaggaacagattcagaagatgcctaaaccatttccaattttgaagataaatccttcgaaaaaggatatagattctttcatggcgtcagacttcaagctggttggctatgatcctcaccagaagctagagatgaaaatggcagtgtaacggtggcttagctctggagcccccagccttggaacctcggtgggtgaaatcagtcgaacgaactggtactacataaaaaatgaaccggacatcgcactagcttgtttttggtgatggtgctgaatgttgtgcgggaggcgttttcccccgttattagtagcgatctgcgtgctatatatggtcgctgaagtcaaaattggctctcttttattttttatctactactactactcatttgcgagtgagagatggtctgggcacaccattcaattgcaacggcctactggtgtgttgccccccaatgagggctgtgacgattgcgccactacctcgtgagaaacatgatgtgaccgaaattgctgtgtacctgcatggtagaacaacgcactctttggtatctggttgccttaatacgtgacctggttaattcagtttccagtttggatgggcacaagatagcgatttgctgtggcgttttagttgttgttgctgtgctgggggcagaaagtctagtgccgtgcttgacgaagacggggtcaaagcgcttg

SEQ ID NO: 37039 - DNA, 1301 bp, Zea Mays
gccatctcctgattcgtcttcgtctagaacgtcagaattcaccaaatcagccctcgcgtttctcccttcccccggctcccggcgtctctgcgctgcggccgtacggcgatgcggtggctatcgaggctgctctctcaagccgtcgccgccaggagggcctccgcggcggcgaggtccaacactagtctcgtcaagggaggatcccacgggttcgctagtggcggcagggatgggtcaccggaggtgcctcgggagtggttgcggaagctgtgggtagacgagctgaagaagcagaaggaagccgcgaggagatggggcgtcggctcatcattagaggttgcaggagcgaccgaggaggcaccgtcaaggagctatcagtacgaatacagcggctctaaccccgtggaggccaaactggctccgcttcttgcaagagctaacctcgtcattgccagggatattgagtgggcaaacatcatgtttgcttttgagcaggagagcaggtatatcataatggacccactctttccacaatctccagtaggttttattcgagagaaaagcaacatcatctttagacagctactcagaacaagacggccatttgttgcagaaataactgatgctatgggtaacgagatatttaaggttcgccggccattttggtggatcaacagctcaatttatgtagaagtgaatgataaggagataggtgtagtccacaggcgttggcacctttggcggagaatttatgacttgtacttaggctcttcacggatgctggccagtatgctatccggtttggtgatgaggggcaaagccacaagtttgctcccgcagaagatgtcgaagaactgcatgttgttcgccagctgactttgcctgaaagggcagtggctcttgctctcgcgatttccttggacagtgattacttctctagaagaggtggctggggacttccgtttctgatagccacagagtagacaaatgaaccaccctcgcccacactcaaggaaaaaactttttttggggctctcaatttcccaagagtgcaagtgtatgatatgagtggcttttagaattgctaaaactcaatcattactacgccattgtcacattagttggtaaacaggatgttgttgatgaaagggatgacttttgcttcatcggtgcccagtcggtgtcccagtcttgatcagcttgaacggatgtgttgcctttgcctcagcggtgcccagcaacgacgtgtccgatctcgtttacacaaaacgtgtcgttggaataataatgacaagtttcac

SEQ ID NO: 37040 - DNA, 6403 bp, Zea Mays
ctagggcgcactcgcaccctccgccggtcctgaactcatcgatcgcagaagcgagagagagagagagaggaggccgtacccacgccgccgcttcgccgccgccgacctccgtctctcgcttccaccatctctctccttttcaccctctctcgcggccaccctcggtcccctccctgagccttacccttgactgagtggtttccaatttcagttccactccctcttccaccactattcacggggaggcgcggcgaatcctgcgagattcctcccggcccacgcgtgcgcacgttggcgatacagggctagagtttcgtctccggcgctttgcggagttaattaggagaaggaactggagaatgtgtaggtggtgggcgctgaaaccctagctgttcgggacgggcgtgcgtgcggggatggcaggggagctggggcagcagacggtggagctgggcgcggtggtgcggcgtgcggcggaggagtcttatctcgctctgcgggagctcgtggagaagtcgcaggcggaggccgaggggaagggcatcggcgccggagccaatggcagctggcagcggtccgacaccgagaagaagattgacttgctcaagttcatcacacgcacacgccagcgcatgcttcgtctccacgtccttgccaagtggtgtcagcaggttcctttggtccattattgtcaacagctcggatcaactctccacagccatgaaacatgcttcacccaaacagctgactcgctgttttatatgcacgagtgcttgcagcaggctcgggctcctatgttcgatgttccttctgctattgaagtcatgcttacagggggttatcagaggcttccaagatgcatagaagagataggaagtcaacataaactttccccagatgaagaaaagcgcgctctgcgaaaattagatgctagcgtgcggtacagagtacttgtgacaccaagacctaaagaagtatctaatgtttcagtaactgatgggatagctgttttccgtgtggatggagaatttaaaattcttcttacattaggttaccgtggtaatgtagacttatggaggatattgcatatggagttactggttggtgagaagaagggtcctattaaactggatgaaagtaggagatttgctcttggtgatgatatagaaagaagaatggcagcttctgagaatccctttgcagtgctatatgctatacttcatgaattctgcatctctcttgctatggacactattattaagcaagctaatgttcttcgacagggaaggtggaaagatgccataagatctgaactcatctctgacagtgccactgtacaaacgggaaatactcctctaatgcagcttgttcaagatgcggagttcgattcaagtggttttaagatacctggcctgaaagttaattactggctagatgagaaaagcactagcacagcagaacctgattcatctccatttattaaaattgaggcagggctggacatgcagataaagtgtcagcatagttcatttatacttgatccatttacagataaagaggcgagcctttctcttgatctaagttgcattgatgttgagcaacttattttgagagcagtttcttgcaataggcacacacgccttcttaatattcagagacaactgtgcaaaaatgtccaaatttttcagtccccaaaagatgttgtcttgacacgagatgttgcagcagcgaaggacccaatgatgaatgcggagaagggtttctcagattgttttgggaatgaagtgcttcaagtaagggcatgtggtcaggcatatgttagtcttggaataaatatcaggagtggccgctttctcctccaatcaccagaaaatatattaccccgtgctgcacttatggactgtgaggaagctctaaacaaagggagtacatcagctaccgaggttttttcaagccttaggaccaggagcattctccacctacttgctgcaactggaagtttttttggccttaaggtttaccagcagtctcagggcactctgaagattcccaagaccttattacatggctcagatttgatggtcatggggtttccacattgtgcaaatgcctattatctgttgatgcaacttgataaggacttcaggcctgtttttcatttgcttgagacacagtgtgatgcaaatggtaatactaatgcaagtggagatgtgaaagaagctattagatataacaaaatcaatataggacagatgcaaatacttaaaaatgagatgaatgagaacccttttgatgtgaagctgcaggccctacaaagtttagtggactctgctgacatgatggagagtgatcttcctgtccaaaatgcaattgaacctcttccactacttcctgcttgttcaccatcattttcatctattgttgatgaggttttcgaatatgaacgtggttctactgctgcgcagaatcgttgtcttccagttgatattcaaggaataaatgctagggttgtctcaccaatgcatgatggatgcttatcttatacccaagctaataataacatgaatgttcatcctaatgtcagtttgaatagctatttcccaagtaactttagacatttacaaggtgcaaataaatcacttcagcttgtgccttcaagcaacgataacagcaatcaaatccctgctcaaagctcacattcagggaatcttgggaatgctacgcctggccatttgattggatcttcaactacaaccggaggattagggaagctcatcactgctggttctgatggtgcatctaggaaacactatctttcagatttcttatcaagtatcccttcattacgaggactgcaacctagtgagccaagaaagcggagaaaaaaaacagaatcagtgcagagtctcctgcctttgcaggcacactcttctaatttgcaatcaagaggcagtctcacctatggagatgttcttgctgaaagaaataattgtgttccggcaactatatatgcttctgtgctactacatgtcataagacactgttcattatgcatcaaacatgcccaactcactgctcagatggattcccttgcgattccatatgttgaagaagttggtctgcggagaccatcgtctaatctttggttgagattaccttttgcacaggatgattcttggaaccatatatgcttgcgccttggtaaggctggaagcatgtcttgggatgttaggataaatgatccacatttcagggaactttgggaacttaatggaggaagcaccaaaacacaatggggtgttggcattcgcattgcgaatagctcagaaatggattcacatatctcatttgattccagtggtgttgttttaacttacaacactgttgaggcagatagtgtccagaagcttgtgtcagatttacgccgactttcaaatgctcgttcttttgctcttggaatgaggagactgattggtgtgaaatttcaagacaagctagatgacaaccagttaaccatggaggtgaaatcacaatctgttaataaaggtaacagtgatgctgctgacaagctatctgagcaaatgagaaagacattcaggattgaagctgtcggtctaatgagcttatggtttagctacggcaccatgcctatggtacacatagttgttgaatgggagattgctaaggctggttgcacaatgcacgtttctccagatcagctttggccacacacaaagtttctggaggatttcgtgaatggtggagaggtagcatccttcttggattgcattcggcttacagcaggaccattacttgcccttggaggtgcaattcgtcctgcaaggatgcctgttgctgtctcatctggatatagctctatgccaaaacagccgaacatccccacacaagggcctttagtaaatggttcatcttcaactatacatcacgcacctggcccctcaaatgctgcatctgcccatttaggcagtcataaccttcatgctgctgccatgctttcagctgttggacgcggtggacctgggcttgttcccagttcattactgccttttgatgtttcggttgtacttcgtgggccatactggatacgcattatatatcgcaagaaattttctgttgacatgcgctgctttgctggggatcaggtttggctccagccagctactcctcctaaaggtggaccttcagttggtggatcgttgccatgcccacagttccggcctttcataatggaacatgttgctcagggtctaaatgctcttgaacccaacttcatgaatgctacacaggctagtggacacttaaataacaatgcaggagttccacaaactgctcctagtgcaaatcgtttaaatgctacccctggtgtttctatggtcaggccaacatctggtgttgctaaccatgtagcagccagtttgagtcgagcaggaaatgccatgttggcttcttcggctcttgcttctggtattagtggaacttctgtgcgacttactgctggagctggtctccctgttcacatgaaaggtgaactaaacacagctttcataggactgggggatgacggtggatatggtggtggctgggttcctttggcagctcttaaaaaggtgctgagagggatcctaaagtacctaggagttctatggttgtttgcacaattgcctgaacttttgaaagaaatactaggatcaatcttaaaggacaatgaaggtgctctcttgaatttggatcaagagcagcctgcactccggttctatgtcggaggatatgtatttgcagtaagtgtacatcgggttcaactgcttctacaagttttgagtgtgaaaagatttcaccaccagcaacagcagcagcaggctcaaagcaatgctcaggaagagctagcagcagttgaaatcaatgaaatatgtgactactttagcagacgtgttgcctccgaaccatatgatgcttctagagttgcttcttttatcactttgcttacattaccaattttggttctgcgcgagtttttaaagctgattacatggaagaaaggtctttccccggttcatggggacattgctactgcacagagggctcgcatcgagctttgtttggagaatcactcaggatcagcttcgtctgataacaccgagaacagcagtttagccaagactggaggagctgcctggcttccatattgtgtatctgtgaaacttcgctattcttttggggacaacaatcatatagctttccttgctatgaatgggagccatggtgggagagcctgctggttgcagtttgaggagtgggaaagatgtaagcagaaggtttcaagagctgtggaaactgtgaatgggtctggtgtagctggagaggtaggccaaggaaggctgcgaatggttgcagagatgatccaaaagcagcttcaactctgtctacaacagctaagagatgacccactttctgcaggctcgactgcatcatgaacttgcttggaatgagctctatcaaggccattgatgtctgtcatattcagcatggcctttggctttgttaacgtgtagatgtgaaggaatacacatttggtagcagtgacagtttcgcctgaggcttgctcagatgacaattttgtacagtataaatggtggcggttgactctgatggacctttagttagcccatttgaacgtggcctgtaacatagctagggtgggtaataatgtgccaaggtggaattgctcagggatgcaaaatgatcttcgggaattggttgtctgtatcatctactgtaatcgtgtcctttttctccctttctgatggatagttcatttttggattcgttatcatctttcttctgtctgtactatgttaatctagacattggtggatctggtatatgtgttgttgtacatgatatattggcactggacttgagactgacgcatttgacgtcttagtattagcaggacatctctagttgtgttcagagtgattggacacaaaaaatattgcttggagcttttctttagggctagtttgggaacttaaatctcgaccccatagattcctggagaagatttgagttcccaaactagttcttaatgtttcttttttttttctattgcatcttcttagtaaatgatgtttttgtaactgtaaaaaccgtgccggtcaagattgatacctggatggataagatgatgttgggtcagatttcttgctcatggttaggaaattgatgtgagcactctggccagtttgtttgaaactgatattcgtgagttgtgattggaagcgtatggataggctttttaatcgtgttaaccgtcatacgggtaggcctttttagttctcgtgcttctacgtttgggacacaggtgtcagtttttgtgctttaa

SEQ ID NO: 37041 - DNA, 3472 bp, Zea Mays
gggcgcaccacaaggccacaaagcgcgccgcgcggcggcacccgccacctacctggtcgcccaacctactgcctatacgaggggagggggatagggagtagcagtagccagtaggcagcgtagcactgcggctcctactaccaagtaccaaccacacctccaacccccgccgtataccaatccgccggaggtctctattcagtccacttgcctttttccctcaccggtcactgcatcgagctatcggagtggtagatctgccgaacattattgtgccaaaagctgttggtgggcaaacccctggtttttgggaagtgcggtttcctcaatgtctatttgaatcacagcatactgaactgaatcaagtgataattgtgttctggtcatacactaagatatacctgaaacttctgcttcatatgttcacacatcataaatattccaacaaaggtcagatgaacagcgaaaggaatgtgaagatcatatcaggtcgtgatgggcaaaagaagggaaattcacagtatggccaaattgtacacatgccaaaggacatggtcacaacagtcaatggaaacgtagatgcaaaatttgaagatgaagttagagttgtgaagaatgataggttccaaaggcaacgagagtcttggggtggggaatgcaagaagggctcaaaaccatggcctggtcgaaaggcagctactgttgatgaacttgttaaacatatgtcaaatgttccttcatatttacagcgtaaagaaacttctgaccatcttcaagacaaggcactgaatgttggagttcttgagtgggggcttcttgctaactggtctcagcaagaaaagcataagctcactagaagctatggaccatctccacccaatactagcaggtctgtactattcccatctccatcacattcttctccaagccccagcagcagatctcttgagagtaatcaatctaccccaatgagtggccatcatcattcatccatcagagcacagcagaataggctcacagataaacaccatgagagggccagatgtccacctagcccaaattctgcagtactgagcttattgtcaggtcatggcacacatccctgtccagagaacggtcataattatgttgggttgggtctcagcaatgtttctttagcctcagactctctaggttcttcctctagaagttgtggaagacatgaaatggttggagatgaagagactagacggaagactgaagacgttgtccatcattgttctcgtaggctttttgcagacagcgataacattgggaaacatttcttcgcatcaaataccaatgactccatgtgtaatgatcctgaacagagtattggcttgaatggggaaaattttgagtcactaacgtctgatgctgtaatggacacagctagaaatgacagtaagtcgtctgactatttactggaggatattgagccatcccttgaatttcctcgaatcccatattcatgtccacttcccatcatagattcagcagccaaagagattggcatcactagcactgaggctggagatgcaaaagtgagtaaaaattctaaccggaaccaatctgccatgaatgtcactgagaatcctccccaatactcagcaaagtttagtgataagatgccttattgtcatctaggttctgggatgaatcgagggagctgcagctctagcctcaaggagtcaccacatattcgacaacccaatatagttcctcctgtcgataagacaggagacaggtcatcacccaacagcaaaggtaggcgaagcccattgaggaggatgttagatccaatattaaagccaagacattctagtccagtacgtccttcatttgttcctaagtgtcaacttccagtcaataccaccaagcagtctctggacttggggaaatcagtgccacataatgttcagcgaaggtcggttgatttggtagtcaattcgaattatctgatcgaagaaaatagaaatcagcctcctccccgtgtgctattgaacagtgcaagatacatacaaaaaggaaatgattcagcaacaacaaggcaagcacttctgcagctagcatggaagaacggcttgcctttattcatactctcttatggtgattctgacatcctggcagccactgttagaaggaagggcatccctgaaaaggatggtctggaaagcacatatgctgtattcactgttgaagaaccgaagaaaaaaagtggagcttggatcaagacagggggcaagaacaaaaaacatcaccttttatctagcatagttggggaaataaaggttgcgcgtcgaaaatcaagatgccaccatacaaccgatgttcatgtacacagggaatttgtgttggttggttccaaatttctaccatcgtctgaagaatcaggtgattcaaatgttagtggagagcttgcagcttttatcagcacacttcctcagcaagaagcagaaacctcgaagcaatcatcttcacagaataccaggcaaagaaattcaatgccaattggctgtggttgccccccactgggaaatttccatcctagcacgagaagtgctaattctgcttcagccaatgttgttgcagtacttcctgatggcttccatggcacaataacatctggacagccattgcctttgattgagaggtggaggtcaggaggagcttgtgactgtggcggatgggatgaaggttgtatgctaagcgtcctcactgatgcgtccgaagaaaatgatgccattcaggctaaccaggcaaaggatggcagccagagatttgagcttctagatcagggtcgatcacgagaagagaggcatgccttcagtatgacttccttcaaagaggggctttatacagtggaattcagatcatccattgcattacttcaggcttttgcaatgtgtatagtgatgctccatggaaggtacccaagaagaacgcaagttggctcgcaagcagagcaggagcatgatctccttgctggtcatgagctcaaggcaatggcagccagtcaaggaagaaggcctccgacaagctatgtgccccaccggccacctctttctcctgtaggccgagcctagcttatcacgatttagtgtatgttctttctgtgtctgtcctctttcttcagctgcgtagtgccggtgggattgatataccatggtccaatggtccatatgtaatacgcatgtccaaagtgacaatctctgcgcaagtctttagagatagctccctgtacatgctgtgatgttgttgatggtgtatgactgtaccagtaccgtgatgtggctgcaaggtccatctcagtgcttagttacccttttatatgtccgcttatctgttgcttctgtatatgctgaaatgcgcctgcaatctgttgcaacccttgtttaaattgtgcgttgcatcgcagcagcatttgtgcagctgctgaagttatgttttctgg

SEQ ID NO: 37042 - DNA, 3185 bp, Zea Mays
aattccaattttctcctacctaccactgccggactgcggaatccggaggtatatccgcaaaacccaaggagaacccccacccgcttggctcgccatggacctgcagctcgcgccaccaccccacgctaacctccgcctcctcccccgccgccccaaggccgcctccgcctccgcctccacctccgctgtcaccgccgcgccctccacctcctgctcctcttccgcggagcccctcaagccccgcccacgcctcccgcgccagagccccgcgcccaggcccaggcccaaccccgctcgcctccccgccctctgcgctgccatcgagcggcacgcggcggctggccgccacgctgaggccctcgacctgttccgcctcgcccgcgcggcggctcccttcacgcccctcccggcccgcacctaccacgccctgctccgcgccgctgccgcgctgcgggagcccggcgcggccgcggcggtggcctggcacgtcgagagctccggcttcgagctcgacctgtacacgcacaaccacgtcctgaggatgtacctcgagtgcgggatgctcgccgaggcgcgccaggcgttcgacgggatgcccgaccggaacggcgtcacgtgggggatcatgatgggcggcctcgtcgaccggggccgcccccgggccgcactggcgctgttccgggagatgtgggcggaggccggtggggacgctccgccgaggtccctcgtggtggctgtccgtgcggctgcgtcctcggggtcggcgcgagccgggcggcagctgcactgctgtgttgtcaaggcgggggcgtgtggtgacgtcgctgaccggtacctgacgtgcgcgctgctcgacatgtacagcaagtgtggccggattgacgaggcgaggcgggtgtttgacgggctgccacgtcctcatcggacgactgtcgtggcatggaactccatgttggcggcgtatgttctccatggccacagcgaggaggcgctggagctgtaccaaaagatgtgcagcactcatgtcgccatggaccagttcacgttctcgaccatgctaggggtgttctctaggctggggctgctggagcacgcgaagcaggcgcacgctggcttgatccagagaggattgccactggacattgttgggaacacggcgcttgtggacctgtactgcaaatggggaagaatggaggacgcgagaaatgtcttcgagaggatgcctaggaggaacttgatctcatggaacgctctgatagctggatacggctaccatggcatgggagataaggcgatcgagatgttcgagaggctgatagctgagggtgctgtgccaaaccatgtaacttttctggcagtgctgaatgcatgtaggttttcaggtcttgttgacgaagggaagaggattttccagttgatgactgaaaatctgaggataaaaccacgggccatgcattatgcatgtgttattgagctttttggtagagaaggtctacttgatgaatcctattcaatgataagaagagcaccgttcactccaactgcaaacatgtggggagccttgcttactgctagcaggatccacaagagcatgcatcttgcaaaattttctgccgagcagctattggcaatggaacctgagaaaataaacagctatgttgtgctcctcaacttgtatgttagctctggtagacaggacagcgcctgcaaggtagttgaaacactgaagaggaaaggtttatatattggtaatgcctgtagctggatcacagtcaagaaaacggatcacaggtttttctttaaagatactttgcatccacaaagtgctgaaatatacaggaggctggacacattaatgaaggaggtacgagaagctggctttgttgctgaggagaatgaattgctccctgatattcatcctgacgagcaaaagatatcaagagcttaccacagtgagagactggcaattgcttttggccttatcagcacagccccacagactcccttgaggatcagtcaaagccatcgtttgtgcagtgactgccacaatttaattaagtttgtgtcaagagttaccaagagggaaatcattgttagggatggtagcaggttccaccactttaaactcggggtctgctcttgtggtgactactggtaattggctaatgactccaatgtttcaagccaattatctggaaattactttgattaatgaggataaagcagattggtcgaccatgatgctccaatgtttcagtgctacatgcaggcttggtgatcttccattcagcaaccttctcagctggtacaagtccgagagcacgctacaatggcgaggatgggagttgctattctggtctgcgtagtggttttagccctggacgtcacagctggcatactaggaattgaggcgcaggctgctcagaacaagactaagaaggtgacgatcctcttcatccagtgcgagaaaccagtgtacagagcgtaccagcttggcctcgcagctgcagtgctcctggtagttgcccacgcggtagccaacttcctcggcggctgtgcctgcatctgctcccagctggagttcatcaaggcgtccatcaacaggaagctggcagccaccaccataattctctcatggatcgccctgattgccggattctcgctgctgctcgccggcgccatgtccaactccaagtccaagacgtcgtgcgggttcactcacggacacaccttggccctcggagggatcatgtgcttcgtccacggcgggatcaccgtcgcctactatgtcaccgccactgccgcagcgcacgaggttccttagtcgagcattttgcccgagagatcaccgctgttctttccttggtccagctgctccttgcttttctccttgtgatttgacatctacaagcatccgaagatatatgccttttttccgttcaaaaaaaaagaatacatgcctgttgtttgatttgttgctattgctgaggaaaaaacatgtcaaagttagcgtcagtgtgccacagtaatttaatttacgttgttgagaaagacaataacgccgctccatcttgtctcctggtgagggaggctacctcaagcagaccgtatatacggacagtgtataaaagaccacactgttttgcactgtagtagagtataatgtttgcatagtgaaatttaaa

SEQ ID NO: 37043 - DNA, 1792 bp, Zea Mays
aaaaatccccaaatctctccactcccagccgctgcacctggcttcttcgccactctctcctctcctcgttcactctgccaggtggccggccgcccctgctcccatctcccacagccgccgccgccctcagctcctcagccacctcccatggcctcgtctccctgctgcagcgaagccgaccaccgtttcctgcagcctcgatagctcccccccccccccccccccccatgccgtccctgctcacctcaccttcgtcggccgtccttggacgccgtgctcggcgcccgagctccctacgccggccaccatccttcccatggcaggagctccgatcggcccctgctgaccttggcactcggcgtggctccaagcagcgccttctcccccaggaccggctcaccgtcagccgcgagctcctctccctcacgtcccctacagacaagcagtgtcgccggtgagcagcagccacagcaactccgcgctccgccggcttgcggttttgtcaagcccagtagacagcagcaaccccgatgtcttcacgtcgtgcgctccaccccgatttgcgcagcccctgcgcgacgtcgtccacccgctagatgttgacgctgtgccacgcgcaccaagcgttcgacgaaatgcccaaccaacggacagcacgcgggtctcgaacccgattcggctaggaacggggcacccgaaggtgaggcccgtgacccctttccggcccacttgccgagaaagtccgtgaggcagggcggatgagcaagccccgccaagcaagtctgcgaggcggggcgagcgaccaagtccccgccgagcaggtccgcgaggcggggcgagcgaccaagtcccgctaagcaggtccacgaggcggggcggacgagcaaacccccgccgagcaagtctgcgaggcggggcgaacgaccaagtccccgccaagcagaccaacaaggaaggagcccaggacgacgctgctggcctacgtcagcacgacaagacagatcatcaccaaaccacgaccggatcatgggagcagtgccgaagggcctctatcaaaacatgactcagggtacgttctcagacatgcccccactgaccggtgggaccagtcaaccccagtcgcagggacctcagcatcggggtctctacagtgacccgtactccagaaggggatagaacagtacgtcataccgagcatgtgcctacgcatgctggaagatgacgtagaggggatggcggaagatgaagctgtactgaagacatccctgaacctctctgcaagtctgctctgcgggacccgccaggtaccgctacatcagcatcagaatagctacaggagcccgtatggcaaacggacgagacgcggtgccataccaggggtacgacgacgcacgacccggccaacgatatcagaggagccgcgccacatcgaggcagcaggccgaactcctccctggatgaataccagtcctcactgtaaagtctacccttgggctataaaagggcaagacaattctcatcttctacacacaagcactcagctgtaacacgccctaagcattactacgcttagcactacactggctagggccccggcctgaaccagtataaccacccgtgtcttagctccctagctcgaatccctgtgattcaccattcggagtgagtccgcgcttgcatccccgccgaacacaaatctattgtccccctggtttccgaaaccacgacagttggcgcgccaggtagaggactttaagcgtgccaaagcgacttttttttactccgatggccg

SEQ ID NO: 37044 - DNA, 4338 bp, Zea Mays
gcattgccggctgatggcctgacccactacaacgagcgaaacctatcgcctcctccgatcgccattaacgggtcggtggctctgcgccaccacggcaccacctgtgcccgcgcggacgagacgctgctggcaagctcaccgcccctacagtcgacagcgagcacggcagctagcaggctagcgcacaccgaaccaactcccttttggccgtttcaaactcttttaaagccccaccagctggtgcaggcaccgtcatcactcctaggctcgaccgctcgaggccgaaaggcacgaccttcggccagtcgagcagctgggcgcgtggcgcggccagggacgagggcgccatgagctcgccggagaatggcgccgccccggaggccagcgggaagaagaagaagaaggcggaagaggaggaggtggtggccaaggtgccgttcctgaagctgttctcgttcgcggaccggtgggactgcgtgctgatggcggtgggctcgctgggcgcgtgcgcgcacggcgcctccgtcccggtcttcttcatcttcttcggcaagctcatcaacatcatcggcctcgcctacctcttccccaccaccgtctccggccgcgtcgccaagtactcgctggacttcgtgtacctcggcatcgtcatattcttctcgtcgtggaccgaggtggcgtgctggatgcacacgggcgagcggcaggcggcgaagatgcggctggcctacctgcgcgcgatgctggaccaggacatcgccgtcttcgacacggaggcgtccaccggcgaggtcatcaacgccatcaccagcgacatcctcgtcgtccaggacgccatctccgagaaggtgggcaacttcatgcactacatcagccggttcctggccggcttcgccatcggcttctcgcaggtgtggcagatcagcctcgtcaccctcgccatcgttccgctcatcgccatcgccggcggcacctacgcctacgtcaccatcggcctcatggcccgcgtgcgcaagtcctacgtcaaggctggcgagatcgccgaggaggcgttcgtcggcgaggagaaggccgtgaggtcgtaccgggaggcgcttctgaggacgtacaagtacggcaagaggggcggcctcgccaagggcctcggcctcggctccatgcactctgtgcttttcctctcgtgggcgctgctcatctggttcaccagcgtcgtcgtccacaagcggatatccaatggcggcgagtccttcaccaccatgctcaacgtcgtcatcgctggcctgtcgctcggccaggcggcgccgaacatttcgacgttcctgcgggcgaggacggcggcgtaccccatcttccagatgatcgagaggagcaccgtgaacacggcgagctccaggacgggccgcacgctgccggtggtcgacgggcacatccagttccgcaacgtcgacttcagctacccgtcacggccggacgttgtcatcctcgataggttcagcctgaacttccctgccggcaagatcgtcgctctcgtcggcggcagcgggtccggcaagagcaccgttgtctcgctcatcgagcgcttctatgagccgctgtccggctccattctgctcgatgggcacgacatcaaagagctcgacgtcaagtggctccgccgccagatcgggctggtcaaccaggagccggccctgttcgcgacgagcatccgggagaacatactctacggcaaaggcgacgctaccgcggaggagatcaaccacgcggcgaagctgtcggaggcgatcacgttcatcaaccacctccctgatcggtacgagacgcaggtcggcgagcgcgggatacagctgtccggcggccagaagcagcgcatcgcgatctcgagggcgatactgaagaacccgtcgatactgctcctagacgaggcgacgagcgcgctggacgccgagtccgagaagagcgtgcaggaggcgctggaccgcgtcatggtcggccgcaccaccgtggtgatcgcgcaccgcctgtcgaccatccggaacgccgatacgatcgcggtcgtcgacggaggcaggatcgtcgagacaggcacgcacgagcagctcatggcgaacccgtacagtgcctactcctcgctgatccaactccaagaggctgcccagctccaacacaagccttctttgtctgacagcgcaagcattaccaggccactaagtttcaagtattcaagggagttgtccgggaggacgagcatgggcgccagcttccgctccgacaaggactcaatcagccggtacggcggcgccggagaggcgcatgacgaggtgcgcaaggggaagcccgtgtccatgaagaagctctactccatggtgcgcccggactggttcttcggcctgtcgggcaccatcagtgccttcgtggccggctcccagatgccgctcttcgcgcttggcgtcacgcaggcactggtgtcctactacatgggctgggagaccacgaagctggaggtgcgaaagattgccgtgctcttctgctgcggcgcggtgctgacggtcgtgttccacgtgatcgagcatctcagcttcggcatcatgggcgagcggctcaccctgcgcgtccgggagaagatgttctcggcgatactgcggaacgagatcggctggttcgatgataccagcaacacgagcgccatgctgtcgtcgcggctcgaggctgacgcgacgcttgtgcgcaccatcgtcgtcgaccgctccaccatcctgctccagaacgtcggtatgatcgtgacgtcgctcatcatcgctttcatactcaactggagaatcacgctggtcgtccttgccacctatcccctcatggtcagcggccacatcagcgagaaaatgttcatgaaaggctacggcggcaacctcggcaagtcctatctgaaggccaacatgctcgccgcggaggcagtgagcaacatccggacggtggctgccttctgctccgaggagaaggtgataaagctctacgcggacgagctcagggagccttctaagaggtccttccggcgaggccagggcgccggcctcttttacggagtctcccagttcttcctcttctcatcctacgcactggcgttatggtatggttcagtgctgatgagcaaggaattggccagcttcaagtccgtgatgaagtccttcatggtgctcatagtgacggcgctggccatgggggagacactggcaatggcacctgatatcatcaaagggaaccagatggcgtcctcggtgttcgagatcctggaccgtaagaccgacgtccggatcgacacaggtgaggacatcaagagggtcgaggggctgatcgagctgcgcggcatcgagttccggtacccgtcgaggcccgacgtgaccgtgttcaagggacttgacctgctgatgaaggctggcaagagcatggcgcttgtcggcatgagcggctccggcaagagtaccgtgctgtcgctcatcctccgcttctacgacccgatcgccggaagagtcttgatcgatgggaaggacgtcaagaagcttaagctcaagtgtctcaggaaacacatcggcctggtccagcaagagccggcgctgttcgcgacgacgatctacgacaacatcctgtatggcaaggacggggccacggaggccgaggtcgtcgaggcggccaagctggcgaacgcgcactcgttcatcagctcgctgccggaggggtacaagaccaaggtcggggagcgcggcgtgcagctgtcgggcgggcagaagcagcgcatcgcgatcgcgcgcgccatcgtgaaggacccggccatcctgctgctggacgaggcgacgagcgcgctggacgtggagtcggagcgcgtcgtgcagcaggcgctgaacagggtgatgaggaaccggaccaccgtgatggtggcgcaccggctgtccacggtcaagaacgccgacgtcatctcggtgctgcaggacggcaagatcatagagcagggggcgcaccagcacctgatcgaggacaagaacggcgcctaccacaagctcgtcagcttgcagcagcagcaacagatgcagacgcagcagagctcatcagaagacatttgaataagatcgtgcgtttctgtatcttgctgtggctttgtctttcttgggcttttgtaaaagatctgcgctggttatcttttcaatgaaagggagtgttcagaattacaggatgaagcattattgggttcttattcctgactcccgtaaaaaaatatatatattgtacatagaatcttgcaatgtaattctgctccatggatctcaatgtttagtgcctacttctgattct

SEQ ID NO: 37045 - DNA, 2714 bp, Zea Mays
cgcaccacagccccagtgctactccgtcaccgtcagcccgacgccccgccagaccaccctcttctgcctctccataataaaatctccctccctcctctcttctctctctctccttctctgcgctcgtgtaattctcttcagctgggatgcaagtactgcagtctgaagaattcagtggcaccacctctgcttcttattgatgataaactgtcagtgaacataagtcaccatctcctggatcacagtttttgtactggagcaagacagtaatggaccgggcagacacatctggctttgttagcggtggatcagatggtacttcactgctgctgatattctttcacttcgtctactcgactctgcacgtataagagatcagtaaaccaccttcactgtatttttcaagtacgtagcctagatgaataccatggatgattctgcagtgtcaattggtttctcggtgacgaactacacaacaggtagccatggtcagagtcaggtaacattaggcatagaccagctgggttcagcagtgaacaatagcagcggccatggccgcagaggttttcagaggtcgattcatgcgcctgctcaagatgatggatgcaggctagtcctcggactgggtccgacgcccgccccagacgttaactcttgtgattgtgatcagcagcctgccggagcagacaagtcgagaccacctgtaactttgtttggccagagcttctccttcgctgatccaggggcgctcagccttggaattcatcgggggcgtgataatgctggagcaactaaacacttgggcgtgcccgtgcctgccggaaccgtcatctccttttccactgttgacgagggctccacgtctgccaggagaagctccggcggctacatgccattgctgctcttggcgcctctgccaaactattcgacagctgaagaggagcagggtttgctagatgacacggacaacagtaataatggtggcactgatccccgcggttttcggttcagccctgaaccttcggcatccatgacggaagcttcctttggtggcgcgagctctgatgttgtgacggtggcaagcaatcctggacagcagactcaacgccggcatcccaagaagtgcaggttcaaagggtgctccaagggcgcgcgaggcgcgtcgggcctgtgcatcgctcacggtggcgggcagaggtgccagaagcccgggtgctacaagggcgccgagagccgcacggcctactgcaaggcccacggcgggggacgccggtgcctgcagctcggctgcaccaagagcgccgaagggaagacggatcactgcatcgcccatggcggcggccgacggtgcggctaccttgactgccctaaagccgcgcggggcaagtccgggcggtgcatcaagcacggcggcgggaagaggtgctcggtcgagggttgcatcaggagcgccgaggggagggtggggctgtgcatctcccacggcggcgggcggcggtgccagttcccggactgccgcaaaggagcccagggcagcaccctgtactgcaagtcgcacggcggcgggaagcggtgcgtcttcgaggggtgcggcaagggggccgaaggcagcacgccgctgtgcaaggcgcacggcggcgggaagcggtgcatgtacgagggcggcggcgtgtgccccaagagcgtccacggcggcacggacttctgcgtggcgcacggcggcgggaagcggtgcgcggtgcctgagtgcagcaagagcgcgcgcgggcgcacggactgttgcgtgaagcacggcggtggcaagcggtgcagggtggatgggtgcggcaagagcgcacaggggagcaccgagtactgcaaggcccacggcggcgggaagcgctgcaacttcggaggcgtctgcgagaagttcgcgcgcggccggagcgggctctgcgcggcgcacggcacgctggtggcctcgcggcagcgccgcagcggcggcggtggcatgattgggccaggcctcttccgcggcatcgttcggtccgccagcgcggcgaacatgtatagcgagtactcgtcgtcgggcgtgagcacggtgtcggactgcgacggctcgcctgaggcggcgacagggaggcatgagttgatccctccccaggtgctggtcccccactctatgaaatctttgacagcggcagccgtgcagccaccggcgaggagcagagagggaggggtggtcgctgtccccgaggggagggtgcacggcggtggtctgctgtcgttgcttggcgggagcttcaggaacgtcgacgtcgacaagctctgaaaatctgaagcaggctgcagcaggcagcgcttgaggctcgaattctacttctacgcctacgcctctttttcttaaaaaaggacggaagatcttccttttttccagtcatagctgtcagattattgtctgtgtataaaaatgtttcttgtctgcagatcgatcttatatggtaaaatttagattaatttcgtttcccttgtgtcaacataataagggtgaagacatgaatttgtcggggcttgtatatggttgaattattcgtagcagatccgaaaagcttcccacggcatcctgtacttgtcgtgaataagatcaatgtgtaacaatcgaacttattgctaaactgtggtatcagatgatcattctgagtaacacgtgttgctgtagatggttgtgttttact

SEQ ID NO: 37046 - DNA, 242 bp, Zea Mays
ggcgactactgctcgaggttgcaagtgtctccacgcctttagatgagggcaagaaggttcaggctttgcagtttaaaggttgtgtcctatagcgatcgagactgatgctactactgttgctgtaatggagagagccgtctctgtgttgcttgttccacgatagacgagggcaaagaaagctttttcggagtgcagtgcccgtgtaaaattcgccgatgacagtatagctagcggattccgac

SEQ ID NO: 37047 - DNA, 2300 bp, Zea Mays
aaaaaaaaactggtcccctccgccctccgccgtaccaccgcgcctccgcatttcgcatcaagccagagcgggggcagaggcgcctctcccgccggagacccgagcgagaaccgccgcttccccctccttctcctcattttgaaatcgcgttttggcggcctatctcctccgcaccgcgcaccatctctcctccgctgcaacgctacttaaccgcctcgatttgctccccatttccccgtccagcctagatagacctgagccgaaaccctaggaccccgcgcctccgcttccgcttccccctctcccgcagctgacgaggccgacgatgggggacaaggagaacgcacctcccttgggggcccggggcgcggcggcgccccggctcacgcgggccgcggccaagcgagctgcggcggcggcggcggcggcggagggtccgggcgacgccaagcggcggcgggtggcgctcggggagctcccggcgctcgccaacaacgccggcctccgcgcgccgtcctgccccgtcaagccctcgaagcctgcgtccaggcccgggaggcacgcgaggaatgttgcgccggaggcccgcgggccctcctccgcccacgaggccgagcgctgcgcgtcctccccgccgcgcaccgccgacgccgacgccgagtctaactccgtctccaaccccgcgccgcgcgccaccgcctacgccgactcctgcgcttcctcctcgccgccgcgcgccgccgccgccggggcgcccgccgacccccagctctgcgggtcctacgcctccgacatctacacctacctccgctccctggaggtggagccgcagcggcggtccagacccgattacatcgaggcggtgcaggcggacgttacggcgcacatgcgcggcatcctcgtcgactggctggtcgaggtcgccgaggagtataagctcgtcgccgacaccctgtacctcgccatctcctatgtggatcgcttcctctccgtcaatgcgctcggccgcgacaagctgcagctccttggcgtcgcctccatgctcattgctgcgaagtatgaggagatcagcccgccgcacccggaggacttttgctacatcacagacaacacctacaccaaagaggagctcctcaagatggagagcgatatactcaagcttctcaagttcgagttgggcaatcctaccattaagaccttcctgaggcggttcacaagatctgcccatgaagacaagaaggttgctaacccattcttatttatgcgctccatcttgttaatggaattcttggggagctacctggctgagttgagtctactggattatggctgtctccgattcttgccatcagtagttgctgcttcagttatgttcgttgctaggctgaccattgatccaaatgccaatccttggaacatgaagctgcagaagacgacaggctacaaagtttctgaactcaaggattgcatcgtagccatacgtgacttgcagctcaacaggaaatttccatcattaacggcaattcgagacaagtacaagcaacacaagttcaaatgtgtgtcaacgcttcttccccctgttgtggtccctacttcatactttgaagacttagctgagtagctgctcttggactgcaccactgtgaggctaacaatctgagctctccttgagctcttagggacgggagaataactgtgttatgagcttcttctcagttaagtagggttccaaaagctatttaagtgaggttctttaggaatcgcagctgagttactagtagtgaggccaggcattctcttgttttgtgaattgtattctttgtatgatatcctagtcacatcttgccttggtctgttgcccacaatgtaatgtttgatacgttagacctttccgtctgattgatctcagtaacaaattctgttactccatccatccaaaaaagaatgcaattctagcatagtaccaagttaaagtatcttgagtttcactaattatatatataaaaaatatcaatattcattagatttgccgtggtatatatttccatagcatacctatttggtgccataaacattttttcaactatatatagtacatatttggtcaaactttaggtactttaacaaagaatgtgcctagaattgcattcgatttgggggcggaggtagtagtacctgtcaagtgtgtgatatacctaaagggacttgtacaactagaacaatttcagtattatgcttattttggacagtggtaaaatataatatatggttgcctatttgttgcaactattgtctaaacc

SEQ ID NO: 37048 - DNA, 2073 bp, Zea Mays
actggtagacaggacaagcatcagaattactagtcaccagcagagggacgacgggagaaggaaacccttcgccctcgctgccgccttctccttccccggtcgcgtcttgttggggctctctcgtggtctcgacccgccggccgagttctcgcgtccaagcgtggcaatccacatatctctgtctccctctctcgctcacccctgtatccccgtctaaccgaagagcccaatcaatcgaatcggatcgaaacagaccgtgtattcaatctgctactagggaagggggaagcgcgagcgtgcttgcgtgcgtgcgttccttcgttcgtgacaaggcggcccggccggccggccgatcgatcggcgatggcgccgccgtcgagggactactggctgggcttcttccgcggcgcaggggacaacgtgttcgacgccatcgacgcggccatcacggtcgccgcgtccgaccacccggccgccctccgggagcgccgcgacggcatcgccgagcgcctcttcaccgcgctcctggtgaccggcgccgcgggggcgggggcggcggcgggccagggagggtccgcggggagaacccccgtgcccagcctctgcagctccgaccgcgccgaggccgtcaccgacgacggcgcgccgcgcggagacgatcccgtcctcgccgagacggagcgcatcaaggccgtcctcctcggcggccatgacaagtcggagtccgagttgctggagctactccggcggctgcaggagctggacctcgcgttcgacaccttggatgtgagccgccgccgccatataccaacttctctaaccttataagtacgtaactcatcaccatctctatctaacccgtgttcaattcaatccactcgttatgctcgataggtcactgcgatcggcaaagcggtgtccaacttccggaagcacagctcgaagcagatccggacactcgtgagatcgctcatcgagtacgtttccatgtgaggctggaaacgcacggttgacatgtggatcgctcggcgcagagaggccgtcgtagatcaaacgccccagtccatgggtccgtccagcctggaggatcaggaggatcgaggggcagctttcacccacatggatgaaggcgacctcttcgcaacgccaagcactacgattcggctgtccgaggaaaacccaggttccaagttctccgacgcaacggagggggatggaggcatggtgaacaacaccagcagggattgcggcgagcggtacccatcgaaccaaggggggccagctagaaggcctccgccgatgggccagcagcggtacgatccagggccgtgctggaggcaagaaccgagcagcgggcagacgaaggagcagttcgtcgcggagatgctcgctaggccctcgagtgcggcggggtcgggccccgggagaccgcagcaggcgaggcccaggcagcagcgtcaggaggacgcctcctccccagctcaaggcagcaggccgcagtctgtcggctgcttctgataaaccggtggcgcaggagcaacctgacgcgaactctgtgcgagcgaagctcgagctcgccaagaacgccaagctcgaggcggccaagaggaagctccaggaaggctaccaagagtttgataacgcaaagaagcagagaagcatacagatggttgatccccagaacctgcccaagcaagcaaacggcacccggaatttccaacctagcggcaagccaaggaatggcagcagcaggaattggtagcagttccaattccttttgagcgccaccagggatcatagacttcaaatcccctcctccctctttcttcctttggttcttgatcggctactaaagattttttttagaccatgcgagtacagaaaacagcaataaggctagtttcgaaagtctattgaaagttctggtcaattttgacgaacttgtttgagagctcgtcaatctgcttgtgctgtgtgcctgtgtcctctgtggctttgcagcttccaggcaacaggattctttcgtgtgaacaccattttgacttgcagtgcggcgctggcgtctgttctttt

SEQ ID NO: 37049 - DNA, 2516 bp, Zea Mays
ctcagttctcagtatgccccggccccgtcactagaagtcaacggccgttcagttccttccccgctccgtccttcggcatgcttctactcagcccctcgccgcccttctactcagcccctcgccgccgtctaccgccgcagcggtaacggtcccccgccgtgtcctccttactccctacaaccgcctcaaggctacgcccaccccaccgcgcctcgcctgcctccgccttcggcccgccaccccgctccgcggcatttcgtcgaggaccgcgtgccgcgcggccgctgccgatgccgatgccgatgcagtgccctcccaagctcctggaggcgatggtggcgtgcgtggcgcaatggtgcgcattggggaggctctatcgcttgggttcccggtgtgggtggcatcagcctgcgccctcgcgctgtggcggccgccggccttcctctgggtcgggcccaccgcgcagatgcttggcctctccttcacaatgcttggtcggggccttcctttccttagttccgttccccccgctagtacttgtttctacccatcttagtgctgtctcagtgtctcgtgccacttcttccaagttgactcaaactctacttcccctgtgggcttattagctctgttgatgtcctctacatgatattaaaacagctgctggcaatgagatcactgagtaaaggaaattatatctcaaaatgaaaaaatgacagacaagtgattaggagaaaagaagacaaagatttttaaaaagaaccgtacaatttcagtactctagcacaatccttcatcttttgcatattctcactttgatacgagttgttggctttctagtttctataaaatgttctctttactgtgccattatggtggaggcaacaggattaaattctcgagcactcttcagttcatggatacgatcaacacaatcttgcactcacgtctgttccactgtacatgtgcaaactgaggggtgtttactttcttgtgtgtggacatattattcacccctgttttcatttgggggtcattgcatttatagatgtgtaattgatatatgatttatacctacaggaatgggaatgacgttgactttggatgacctcaaaaccacattattgatgcccaaggagttggctgctggatttatactgcaatacacggtgatgccactgtctggattttttgtgagcaaactgttgaaattgccgtcccattatgccgctggactaattttagtggcctgttgccctggaggcacagcgagcaacatcgtgacctatttagcaaggtaatgaaaaaaaatagcgacatgccaaggataaatgccgtcacaggccttgttaaaactttagaacaataattatctggttggtgacaattcgtgaaatgttggcagaacgatatatttgaagtgattaaatgaatgtcaaggtggtgaatattcttgaattcttcagtggatataactgactggtgttgaaaattaacttgaaataagttagtgcattcgcatctggttcaaattcaatggaggcaaataataattaaaaaaattcaacagccaattgtgctgaaaagtaaagagacttagataaactaatgttcgaattgcagggcaaatgttgctctttcagttctgatgacagcagcaagcacttttgctgcagcgttcatgacccctctcctgacgtccaaactcgctgggcagtatgtcgcagtagatccaatgggactgttcgtgtccacatctcaggtcgtcctggcacctgtccttctgggtgctctgcttaatcagtactgcaatggtctggtccaactggtgtccccgttgatgcccttcattgcggtagcagcagtagccgtcctctgtggcaatgctattgcgcagaatgcttcggcagtcctggcatctggctcgcaggtggtcttgtctgtcggttgcttgcatgcatctggctttttcttcggctacgttctctcaagagtacttggcatcgatacctcctccgcgagaacaatctctattgaggttggtatgcagaactcagtgttgggccttgtccttgcaaacaagcacttgggcaaccctctcacggctgttccgtgtgctgtttcgagcatctgccactcggtctacggtagcattttggctgggatctggaggtctatgccaaacaaggacaagggagaatgatgcgatgatcaattcaaccatcagaattctttgttctccaacgatgaaagattttacccgtgagaataaacaccgcagagtggtgagcgctatataaaagcactgggcttgcactgttgttagtggttcatttgctttcttagattcggatagtacagttggtggatccatgattgatgtggatacatataccatgttgccatggcagcctgtttatcacacattcacttcaactagaacattgcggcgccctcacgggcgccctaccaagactcactcttttatgcaagaaacaacgaccaataaaacaaag

SEQ ID NO: 37050 - DNA, 2602 bp, Zea Mays
caggcaaggcctgagagcaaatcaccctggcctcacatcgcacccggcagcagcagcaaacgaggccgaggccgaaggaaccaagcggaacgaagaccaaaatcacatcacgtagctacagctcctccgtcagcagccggggagcccagcccagcagcactttgtcccttgcaccgatcgttcctccgtcctcctcgcgtcctcgccttgcgcgagcactgcaccagcaagttagttctcccgttggttgatttgtgtactggggcatattggattggaggagccagaaaacttgaaaacccagagaattactttgaacttatatttatgtcctgatttatggaatcccatttctaagagatgccatcatcgataccaccaccgccacaaaattttctcccactgccatcaccaggggttgggcagagcactcgtattaaccttggggaaatcaagctaaaactagttaagaggattggtctagagcgagcaaagaggtactttgagcacctgcagaggtttttgtctttgaagctgagcaagagtctatttgacaagttctgcctcacaatacttggtgatgataacattcagcttcataaccacctcgtttgctcaattctccacaatgcttgccaagcaagtgggccatcgacagtcagtacacctaaatcaattggagttgccaagaattcaaatcatgtcttaagtcctacagtccctttctctgacattggtgatgttctgcatcatcatgtcaaggaccactatccacgaagcagaaatgcacatgtcgtccaggagaatggtgttgtgcgtttgtccaaactgaagagatttccgcagcctcacagtgaacttgtggaactactgtccaaacgatcacgtgtggagaatgcatattcaaatttatcagaccccataaatagcaactgtcctggtgtctctggtagagaatatgtggaagctgttgcacagcatgctcgaggtccaataattgccccactaggggttgccttctgttctggtcatttcggtgggaattcaaaaaccttgacacttccctctggtgctagcagtgatgactctatttgttgttatgaccttggtcagctgtgtgatacttcatcactgagacagcgtatggggagaatagcagaaacagaagggttggatgctgtgtcattagaatgtgctaattcattgaataatggagttgatttttacttgaaataccttattggatcatgtattgagctagtaagagcaagatctcagcatgatcgaataaatcatatggcactaaaacaacagttaagtcaaaagctaataaatggtgtgcagctccaaaatcaggtgcatggtcaaagtgccactacatgtccgcaaatcagctcggtttcattgcaagacttcaaggctctatcagagacaattcctcagctgcttggagtcaatgcatcactggtacttgaaaaaataaattcatataactaatcaattcggatgcaaatggatcaatgcttccgcagagtttaatctttgcctatcagacaatagaattgaaagctcaaaattgtatctttgtcacatgcaccatcaggcaatgctgaagtgtttcttcctgtttcatctctattgccttgcgaagtccaagcctgcctccatacacttattgcagctgaggcaatggaagatgctgatgaacattgttcaatatcctgttctggtgaaatccacagctcactatcaagactgctccatcaaaataagttcagatctcataacttctagagaatgttgattatacaaagacatcaatttgtcattatgtgcaccagtgaggagtcaagtcaaggctgtacacagaaacatggtgatgctaggtgcaaaacagatttagaacaggacttccaatacaaaaagaagttgatctttccatctaagagagaaggcaaacaactgtggaaaattgaccgcaaagcacaaaaggaggatggataggaaggaaatggcatggttcaaagtattctgccaaggaagaggcatacctgtgctgacctccgagctgttcacacggactccaaaagccgatcaatctctgcgatccatggtcaccaatggaatatagaaggaaggggaatgcttgcattgatgtgccccactttctatggcctgcctccttcacctcgagagtctaggcggtcgctgtgttcaaatagtctggctgaaaagacttcgagaatgtttggcccttgtgcttccttttttttttgtattcggtgggcggtctataaatagtgagcagagacttccctccattgatgattcatggtgtgtggagggcactccgctattcttggggatccgccgttttgtgtctttcaagcctattaacggcaggcagccgggcacggttacttgcgtgcctgcgtatgaactgccagctttgctgcacatgttgcatgtttgacaagagattgttgtatacggtgtaacttgaatagcattaactgagttttcttagctggctttgaatagcatttaagtcatacatttgatttgtatactgctgtcacatgacatgagttttgtgcacctg

SEQ ID NO: 37051 - DNA, 196 bp, Zea Mays
gctagccagggatgggatgacgagaacactgtgggtggttgcgagcgcggcgcgcgatggacgagtggagaaccggttgtgcgctatggactgcgggttgattttgtaaaagtttagggagttacttgtaaaattatggtgtaggacgatcgttgaaactggttctttaagtatagtagagataacaccagcaaat

SEQ ID NO: 37052 - DNA, 1989 bp, Zea Mays
gttcgtttttacttagaattagaattccctattaccaattggaagtgcggacacaatctcagatggacgaaccagctggatctggcctgctcaaatggaaccgcgagctttcattgcgcctggcagaggatggagggggcaggcaaggatggcaacccgttgaggaattatcggattggcaagactctcggaattggctcattcgggaaggtgaaaattgcggagcatatcagcactggacacaaggtggcaatcaagattctcaaccgccgtaaaatcagaggcatggagatggaagagaaagttaaaagagagattaagatattgaggttatttatgcatccacatattatccgcctctatgaggttatagacacaccggctgatatttatgttgttatggagtatgttaagtgtggggaattatttgattacattgttgagaaaggtaggctgcaggaggaagaggctcgccgtttcttccaacagattatatccggtgttgaatattgccatagaaacatggtggtgcatcgtgatctaaagccagaaaacctcctattggattcaaaatgcaatgttaagattgcagattttggcttaagtaatgttatgcgggatggtcattttctgaagacaagttgtggtagcccaaattatgctgctcctgaggtgatatctggtaaactatatgctggacctgaagttgatgtgtggagctgtggggttattctttatgctcttttatgtggtactctgccatttgatgacgagaacataccaaacctttttaagaaaataaagggtggaatatatacccttcccagccatttgtctggtgcagcaagggatttgattccaagaatgctagttgtcgatcctatgaagcggatcaccattcgtgaaattcgcgaacatgattggttcaaaattcttctcccgcgctatttgactgtgcctcctccagatagtgcgcaacaagtcaaaaaggttgatgaggaaactctccgtgaggttttaggtatgggatatgacaagaacctgttggtggaatcaatccaaaaaaggctgcaaaatgaggcaactgttgcatattacttactcttggacaataggctccgtacaaccagtggctatcttggagctgaatgtcaagaagctatggactcctcattctcaaacatcgcatcatatgaaacaccaagttcagcacgtgggaatagacagcaaatatttatggagtctccagttggcttgagaccacatcttccagctgagaggaaatgggctcttggtcttcagtctcgagcacatccaaaagaaataatgtctgaagtgctgaaagctctgcaagaattaaatgtttactggaaaaagataggtcactataacatgaagtgcagatggagtcctggctttcctgctcaaattcataacaatcataacttcagtgcagggtccattgaaactgatagcctgagtgagaggttaagtttaattaagtttgaaattcagctgtacaaaacaagagacgagaaatacctcctcgatttgcaaagagtcagtgggccacagctcctctttctggacttgtgcgcggcctttctaactcaactgagagttctttgatttctggtgtcagctttccatcagttgcattccttgcgtttcactagaggaatgtctaaatcgctcacaaagctgtaaatagtaatctccagtagattggattttctggagtatgtagatggtaggcatgagaagatgttatgcctggcggcgatcttctgaaccagactgtgtggagtaacttatctcctaattctttacggctggccagctgccggtgaattagatcagtgcttttgctggcataatgtctatctacattaataatttcagctattacaacggttaattaaatgctgtgctgcttacaggccaaatgagattatgttttgaaggcaactctttttttttgcattaatt

SEQ ID NO: 37053 - DNA, 97 bp, Zea Mays
attacctgcactagagttctttctaccctagttcaatcactggtcctatactagccaatttctcaacaaaaaccctttatctttagtggaatgctac

SEQ ID NO: 37054 - DNA, 3040 bp, Zea Mays
cgcataacagcaccaccgcgccgcgccgccgccaccccctttcccgttcgttcccaggacgagtcgcagcagccggccagccgcacagagtggtggagcctaggaacagaggaggcgccgagccatctccgcagcctgctaccggggaacgggcgggaacggactctaacttagagagagcgcgggcgagagaggtcaaccgcagccggaggcgatggaggtggtggcgctggtgagcggcggaaaggacagctgcttcgccatgatgcgatgcatggactacggccacaaggttgtcgctttggctaatcttatccccctcgacgacaccgtcgatgagctcgacagctacatgtaccaaactgttgggcaccagattgtggtgagctacgcgaaatgcatgggcttgcctcttttccggaggcgcattcgcggatccacaagggatcagggtctcaggtacagtgtcacggcaggtgatgaggtagaagatatgtttgctctgttgagcgaggttaaacgtcgaatcccatccatcagcgcggtgtcgtcaggtgcaatcgcatccgattaccagaggctccgggttgagagtgtttgctcgaggctgggcctggtctcgctggcgtatctatggaagcaggatcagactttgctcctagaggaaatgataaggaggggcattgtggcaataattgtgaaggttgctgcactggggctgaaaccttcttcccacttagaatgcaagaattattcttgatgactctgaagtgatactccactctgctgattccattgcttctgttggaattcttcatccacgggcgtttcatcttgagcagaagccagattcatctgatagaattggggatggttctgccgttcaagagagttctagttgtgtatatgaggttgatgaagttaccactcacgatgatgtgggagaaaaacaggccctgagtccagctgttgatgcttacaccaatgttgacctatgtatctcaaagacagggaacaatttgcgttcaatgagctgttggattcaggatccatccagagcttcggaaggcctgaaggcagaccttatagcagttttgagcagaattgaaaatcagctcaaggaagaagggttaggttgggtgaatgttttgtacgttcacctctacatttcaagcatgaaggaatttggattggccaatgaagtttacgtcagctttattacggaaaagaaatgctacctgggtgttccttcgcgcagtacaattgaattgccactagttcaggctgggttgggcaaagcatatgtggaagtcctagtttcaaatgaggtggtaaagagagttctacatgtgcaaagcatctcctgctgggctcctagctgcattggaccttatagccaggcaactctttatgaagatattctttatatggctggtcagctgggccttgaccctcctacgatgaagctctgtcttggaggtccaagagcggaactagaattagcactacaaaacagtgaagctgtggccaatgcctttagctgctcaatctatatctcggcaatacactttctggtgtactgctctgctcagttgacgtccagcgagaaggaagaaattgaacagacattgaagagttcttatattactcgtttggatcgctcaaaaggtggatcatatccaactgttctgtacgtattcgcgtcagaccttccgaaaggggcacgtgtggaggtaaagcctatactgtatgtcccttccactgatgattgggttgctgccgaagagacggagaccggagttccactgccagcaccgagcaaaacctggactgattgtaccgcaccatactctgcgttgcgcgattcgtgttgccaggtccacacaaccggcgggagaatttgttccgccgtggtgtcgatcacagatgacatcgcatcgaagatctgctctgcagctggacagctgcaccacggagaggagaatctgaaaataatggctagattctgtgctttccagatcgcgaagaccctggcagacaacagattttcctgggacagcgtaacgatgttgaggctctactactcggtagatctcgccgtggcggcagatgcagtgtccggagcattttccgaggccttggccgagcttgcccaagacaacccttccatgagaactgacgttcctttctacaacgttgtgcccgtagccggagctggccgctctgcgtgtgccaacgacataatggcgtgcgagttactggcatccaacgtctccagtgcgaagtccataccagccgaaccgttcgctgtgacgcctgcttgaatgcagctttccttcggaaattggaggtgggcgcacgttggaatttctgccagaggagccggtggccagtcaactgccagttggacgacgacggttgaccagcttctctagggctggcggcggtagcttcgtttctgtgctggcggtcgattaaaaaaaaagaccgtacggtgatcatcacagatgcacccatactgtattattctgtttcagcgtcctatacaaagtatacattgggtctgaattctgattagcctgtgctgatgcttgcaatgacattggttcttctgtgtacagactacggacagagtcccggtcagtaacgtgtgtgtacttgttcttcctctgtgttgacattcttgctcgatggtggaacctgtcgcagttggcggaggtgaagccgcgtagctcacttaggtctgccaaacacttcacttcttagattgtttctgtggaaatcgcttctgatgaatgcaaaatcaattaagtcgtccggttttgatgggaggaatcctacgcttcttaaactctaaattgcacatatttctttatttttctccgcatacaaatttgatgttgaatgcaaaatttatcaagtcgtcgtgtcttgatgagaggaacccgacgtttcttaaatcctaaattgcacagatttctttatctttttccacatgcaacattgttgacatctagattctcgttacagctagatcttt

SEQ ID NO: 37055 - DNA, 2046 bp, Zea Mays
tgaattcttgatccactatttcgaggagaaagagggagagagatgactagctgtagttgaagccttgcaggtccaccgtcacctcgcgccgcccggcgagtcgcaggcatttgtttaagggaagggattctcttccgccgcggctgcctctgcctggctggctgcgtcgccacaccccgcgcacatcgcgctgcccagctctgctgctgctgccgctgcgtgcgcatcactggaaagatgggcctgtggggacgggctccttctttccttcaccgcgccatgaatgatgcgccttttctctgctgctttgcttccatctggctcagctctgtgcctctgtcgcccttctccttcctctcggtgtcccctctgtcggtccatgctcgtctgctggctcctgcttgttgcttaggcgttcttggtcaggtgagcagcactggcggcgatggcgaaggagacggagtactacgacgttctcggcgtctgccccgccgcatccgacgaagagatccgcaaggcctactacatcaaggcgagacaggtgcatcctgacaagaatcccaacgacccacacgcggccgagaacttccaggctcttggagaggcttaccaggtgctgagtgaccctctgcagaggaaggcctatgacggctatggcaagaacagcgtatctagggagaacatactggatggtactgtggtgtttacccttcttttcgggagcgagctgttcgaggactacattggccatcttgcaatggcaacaatggcttcctccgagttgacaagcgataacgacacccccgaaaagcttcaggataggctcaagaatgtacaaagggaaagagaagaaaagctagctagattcctcaaggaattcctctctcagtatgttcgtggagacaaagaaggatttgctaatcgtgccgaagctgaggcaaagaagctctcatgcacttcatctgggttggatattcttcgcaccattggatatgtctattctcgacaggcagcaaaggagcttggcaagaaggccatgtacctaggagtgccattcgtagccgagtgggtcaggaacaagggtcatctgtggaagtcacagatcaccgcagcgaaaggagaaatgcaggggccttgcagctgttgcagttgcaagaggaggcctgccggcagagtagcaaggatggcaatgccaccgagcaggatgtcgacttgcagatgaggatgaacaaggacctgatgatgagctcactgtggaagctgaatgttgtggatattgaaatgactctgttgcatgtttgtgaaatggtgctgtctgaaaacaatgtcaagaaagatgatctgaaggcccgagcaacggccttgaaatttcttgggaaaatatttatgagggaaaaggaggcattgccagggccagcaccagcgccaggtccatcaggaccgtcgaaacgaacggttcttgacgacgacagcagctcagatgacagttcagatgatgacctgactcggacagcgccataccggactcctgcatttacccagggaatcggcaggctgttccgatgcttatgcaatccggcttatgatgttgatgatgattttgagccccacaaatgagtcctaaagaggaaggtaccaataccaatggattttccaaaggttggtgacttttgtcaagcgtatgattcagaacagtgtgaattcggatcatacgttgtgatcctttgcttgccttgaggatacacgtgtagatgctatttcatctctggtgaccagaccaacagctcagagatcctcatttttttcctcccatgaacagtagacctcctctccgctttttttaataaatagatccaactgaatcttgttgagcttatgtaatcgcttgctattgttgttgtcaaaaacacaaagaagtgaaagaacaagtgcctgtaaaaatccatttctgatcctgaatcgggaattcagtgtgatgaacatcaactttttgatcctgttgccggcgtattgcctgcattctgtctgcaaatagtttgcaagttc

SEQ ID NO: 37056 - DNA, 1235 bp, Zea Mays
aggatcctaagaaacgatagtaatgcagagagaagcaagagaaggcataaataggtagtgtagaccaggcgcttttagtagaagagagcattaagcatgcaaaagaagctattatgctggatattagagatggcaattcttggtataatatgggcaatgcttatctcactagcttctttgtgggaggagcctgggatcacactaagcttcatcattcagtgaaagcatatcaaaatgctgagaaggataaaactatgaatttaaatccagacctctactataattgggccacaggacaattacgatccaaaagattagcatcatttgtgtcatccttgagtggagtcaaattgaaatcatcgcacaagaaagccaccataagcactctatcagtgggtttgaacaaagccgttgctgttttgggaaaagtaattctgttcataagacatgacaatgttgctccgctgtattatttaatatgtgacttggaacggtcatattttatactgtcagtgtatgggctacataatgatgcagagtacgcaggggagagacaagtggatgagaggaacaggagagagatcgcaaggcgtagggggaagggcaatcatcgtcaccggcctagctgtgatgatcagccaggacgatcgaagattaaagacggtgatcaagtggtattatttgaaccatactaccgaatccttgatgcatcatgtaaagacaagcactatcagttcaaatcaatacgagtggactttccagaacaaattctagttaacgagagagttccagcacctcatcatgttgcacgggcatcaatccatgcacacaacaaatcttgaccggtgaaaatttggtattgtgatttagttggtagccagtacttattttgtttttgatgtttattagacttattacaggaaaaccattctgcaagtttttatcagggtactgtgtggcgtcaataccgtgagcaactgccagctgggcatatcatgtgtactcgcgtaaatgtgtagtgacatgttaccctatggctcaaaatgtgtaaggaagacttgggaacatattaaccatctcatttctccaattttcgttagttgttttcatcaaccttagaccatgatgacacctcaagccgtaagaatcacaagtagtttgcgtgcgtccatgcacgtgtgaagtttttacaattccacataataattgattccagacaaaaaaatgtagagctc

SEQ ID NO: 37057 - DNA, 1675 bp, Zea Mays
cttaaccttgatttgtgatttctgttgatttcaactctatcctaccccaacttgtttgggactaaaaggctttgttgttgttgatcaaatgccactgggtgtcttttaattttttactcgaatgtccatttagctcctgaagacattttctgtgacatcatggtgtgtttttcaacttccattattctacttgagcattaatgttttaagcagaaacacattataatcctcagtttactcccaaagttgtgccaatatttgacatgtttactcggtgtattttcacaggtacaatattaggtgtctagtggagagcttctccatacatggcatgcacactatcgtgctgttaggtgcctcgggctgtatgactatttgcttgtctcagggtcagaggatgggactatcaaagtttgggatctcatcacggtgcttgatgagcaatcaaggctggaggtccagacaccatatttgtatagtttcagtcagcatgcactgcctgtaactgatattgcttgttttcttggagcaatcgctatatcttcttctgaggatcgaacctgcaaaatttggagtttatctgagggtaggatgctgagaagcatttcatttcctactagcattgattctatagcactagacccaagaagtcatattttctatgctggtggtagagatggaaaaatatatgttactgctatgggtgttgatctcagttttcatggtagggatgagtcatctattctgggtgcattggatgaccacagcaaggcagtaacaagcttagcatcaagcagagatggacttctacttgtctctggatctgaggatggtaatgttcgggtgtgggataccagatgtcagcaagttacccgaaaattcaaacactcccaaggtccagtaaccaatgttcttattgtaacgccacaacgagtaaatctgccaccgctacaaccattacgcaaagttcggtctgcaaatggggaggctgaacggcaggcagtacttcttcatcggcctgaaaatgatgtcccaattcctggaaataagaccttcatttttatggagcgctacttggatgagcttcaggttatttgattttgggccgaatgctcagaatggcactccaaaccaacagggaacagaatggagagatagatacttggagttgcaggatctctttgtacatgaggtcctccatcagatgccatcctcgaggaacccatgatgcacatgctttggatatcgtaggatcatttgtggtgtcgaaacagtgatggttgccattcgggctacaaacgatgtagatgagttctttggagtaattcaactgatggtgctttcggctgcgaggaacttatcagattctgaactaaaaccactagaatcggtgccagcagtcacttggaactggttctcgtttgtgtactagtctagagaaacgctaaaaatcaggtttctcttgattctagttctaattttaaggatacagtgagcttgctacataaagttattttgatttcatagagaaaatgttttgttctcaggggaatctgaattttgaaagttttctactagaatctaagatttgatacgttcagggttaaccataccaattaaggactaaaaagtgctagttagcggtatcggattttcgctggaaaaccgctgtttt

SEQ ID NO: 37058 - DNA, 261 bp, Zea Mays
atacagctcgctaccagcgtcagtaactccaaactttccaacaagagcatcccacagctctttccccgtgggaaggatgatatagcttttctggaattttgtgtcaagtgcgctaatcactgcacctcgaaagaggttgtcttcagccttaaacttagcctcatcctcaggaggtaagttggcaggcttgccctcagcggcatgaaaacaaggcattgcagttagccacaattccatcttagctttccatatcaagaagtt

SEQ ID NO: 37059 - DNA, 343 bp, Zea Mays
cgagcctcttaaacttttttgacaacctctccaaagggcaggactgcaagtttgaaaccaatatttcatcagaattcccatttgaatttctagaaacacatgacactttgtatacttgcagcgagcaacatcatgaaagtactgaaacaaatggatggatcgttgagcaacgaagtatgaatgcatgattatagaagctctgcaatgttgtcttttctccagctgaaaaggggagcacatctatgaccatctaagaagggaacatatcaaatgcaaaccacgttttagtgcaaacttcgtgcaaacatactaaaaaaggtttcaaaatttttttttaaaaaat

SEQ ID NO: 37060 - DNA, 2560 bp, Zea Mays
tagtccttaaaaccaaatagggtaatgactaaatttaatccctgtgctagagtaaccggcccatagcgacgagcgttcttgtgttctgatgacatcttccactcttcctttctgcggcgcacccttctttctccatccacttgtgtactttcgacgtcgtcttcctcagtagcgcccccttctttctccacccgccgtcgacgcagctgccttccagccatctccatatccgtttcgccgtccccttcctcctcatcaggtaaacctaattcccttcctctctccccatcaattcgcccctaacctaattcgtgctgatgatctcccccgaggacccgcgcaagtggctcgtcaagcgcgtcgtcgggatgcatgggggctccgtcacctaccttgtcgaccccggcaacaacgactcctcctccagaaccgtcgtggtgagttggtcactactgggctgggcttttgggttcctactgcttgttaggtgctgcctccgtgatccgatttgtgctcaactgattgatgctgagcattgttggtcttaatggagtttcagtagttgtttttagcgacgggcttagggggtgtttgggaacacagttttttacagtattggaacaatactgtggtatttgagaataccatggtataatatacagaaaggtgtttggaaatgtaggtaaaatctctgtatttaaaactaaagtattatcaatactgcagctgtttcaaagtattgtaaactttgctctccaccaaagttttcttctgtaaacaagcttgtgagcgtgcggtaccggcgatggcgtgggaccgagctgggttctgcggacacaatgccgaaaaggctgtcactggtgtacctatcgctcgttccaaacttccaatgctgcacggggctgtatgagtatgacagcttgggtgtacgtacgtgtacccaatggttcagctttcatatgattttagctttattagttgcaataaccaactaccgctagctttagattgtatgatatttgttatctagaaggaagacttcaatttatggaataactcaaccatgcggctgttactaaccttagggaatttagaagataattccaataggggaacagagagcctcacatggtatatactttgttcccaaacacctccatgtattcaaaattgtggtattctaaaactgtggtattgaaaactgagatcatgtcatggcatttgtatactgtggtatttgaaataccatggttttgaaaaactgtgtttccaaacacccccttagtacttgtcagtacattttacatgcttcgaattgagatgcataggaattaggagacgtgcgttttttagtaattggtacctacttgcgcctgagactctagtctaggcaccaaagtcagggaggtgtttctctgagctctgcttcaaaactgtattatctgatgtttgtctgagccacaagtcatgaattttgcctgtagtcaaggatggtgaaggtccaatcatgtgcatatcattggtttcctcttgttatgatgaccaaacttgtatctaatatattgatttgaatatgatgacctctatattgtaagtttctgaatttttgcaacacaggtcatgcatttttcctgtagtcaaggatggtgaaggtccaatcatgtgcatatcattggtttcctcttgttatgatgaagagatctggattcaatacttgatttttcatttgtttttaaatatttgttaactgttatggtgtatgtcaatggaatttgggcattggttgctttgactgtttcttggaatgcagataaactacgcctatgctcgagacaatgaaacactatttgatattattagtgtgaagatgaacctctcaattgacaagcgatgcaggataaataatttgtccacaagcatgattgcattatcctagttctttcgttgcggagatggcagcggcggcggggccgtacaaagagatgctggaagtggtgaacgcgtgcgcgacccggatccggtggcgcctcagtccagcttccaagcgccgcctcctcaacggttgtgctgtggttgttgatgaacaaacccagttgttgccaaatatcctgtttctctgcactaggttgcgtcctgtggtactggtcgactatggtggcacaatgcctcagctacaagaaaatctttgtggcctgctatatcttgcccgacagttcaagctctacaaggttaggtctgttcagtttggctagaaaggcatcccctacctgaacacctacgacgaccgcaccatccgctaccccgaccctctcatcaaggccaacgacaccatcaagatcgatctggagaccaacaagatcatggacttcatcaagttgtatttgccctttcatggacttcatcaagttatatacttagttaggctcaatgttagcacaaacagttgatgagcaagtttaaatttagagtacacttatgtatgagttatttgacaatgcttatttatgagatattgaatattatttatctatattatattaattatagtgttattaaatat

SEQ ID NO: 37061 - DNA, 1450 bp, Zea Mays
aatatgggctgggctgcggggttatgcagttgacagagcgtgcctgcccagcgtgctggcggctggcccgcgcgacttgcaagtctagacgtgggccagctcggtgctaaagagaagattaccgttgcgacaatgccaccccttccctgcctactctactcccggtaccggagctatccaattcccttcccacccagaccgcgatccctaaccctacccaatgtcctcgccgccgccggcttcgcccatggccgccgagaacgaggcctgcgactgggcggagatgccgtcggacgcgctcgcggccgtgttcgcgaagctggacgtggccgagatcctgtccggcgccgggctggtctgccgctcgtggcgccgtctcgcggcctcggaccctacgctgtggcgccgcgtcgacatgtgctaccagggggaccagctgcagaccgaggaggtcgaggccatggcgcgcgccgcggtcgaccgctccgcgggcaccatggaggcgttctgtgccgagaccttcgtcaacgacgacctgctccgctacatctctcagagggccccctcattgaagagcctccatctctgcctgtgccattacgtcactaatcaaggttttgcagaggcagttaattgcttccctcagctcgaggagctagacattacattctgctcattgtatggcatcgtgtgtgagactgctgggagagcctgcccgcagcttaaatgcttcaggttgaatgagcgctggtctattcttcaaagcgagtttgcaccctacgagggcatggatgatgacacggaagcattagggatcgctagcaccatgcctgggctccaagaacttcagttgatcgatggacgacgcgctgagatcgaaatgcgctaggatacgatatctgaagcttcctcacgactccatctccgacttcaagtatcgggcttacatcgtcagcagcatagccaactcgggctctgattttgaggttgatatgtatgatgatctgctggatgtggtcactgaagatgatgatgctgatttcgatgacatggatgatttcgatgatacagtctcagatggaggcatgtacgatgatgacttggatatctgaaattaggaatcggttcaaacagcttttccgtggaccatgtaagtgctgttagctggaatggtttcccatcccttttctttgagattcgggtagctatgatggaatctccctgatgttcatacttctgcgcctctccatttgttaagaagctggagtagctgaactggttttaatcgatgtacaactgttgtttttttattctgaacctttgttaattggtattttaataataacctagggcaaaaaatgtgtatatatacctcctggccatgttagggatgtgtctagatgtttctatgcattatgcatgtgacaaatttcaatttttttgacttcct

SEQ ID NO: 37062 - DNA, 2309 bp, Zea Mays
ctcatcaaatcacgattcacataaaaaaggtgtgggagcccgatccgatcgccagatccgccggcctgtgcgccgactcgggcgtccttccacagatcctcttccttctatcgtaggctcgccctcgccgctcgctggagcggaggtctctccctgcagcccatactccttgattcattctattgcctcgccgccggctctatggataagcaggagccagtagccaatggtgaacaaacgataggtcttgctgagaagccgaaggagctgcctgttgccagtaaggatgagaaagcaactgtgcccccgattttagttgattcaaatgctttcaatctaccaagtgaaggccaaacccaagctggcacatctaacatggatgggggccataatggtgcacacaacttttatgcttctcaggcacaaccattctattaccaaggctccggttctgaaaaccctacacaagcatgggatacatatcctccctacatgagtgttgaaggattggaagtgggtccaccagttgtatacaatgaggacccctcattgatgttccatggtggctatggttacgacccatattattctcctattgcaacacctgtaccaaatgctgttagtggagggtgatacaataatgccgattgacccaacacaaggagcttttatcgctgataccctgagtccaaacagcttcctgtttggcccaagacctgaatggttcagatcttcagaaggaactgggtcatttccatcacctgcagcttcacctcaaccttctaggggtgttccagggtcctatgaccaaaacaactttccaatggcttcaagaatggccagtaattatgggggatccgtcaccagctttggccttaatggtagaagtttgatctcaaccgagaaagggcgcaggaggggaaggggcaatgcacttatttgcagctgcaatggtcctcttgactttcttaatgagcaaagtcggggtccacgtgcaactaagcctaagaagcaaccagaggttgacagtaaggatgaggtgcctactacaggagttggtcgtgagttatacaacaagcctgactttgttatggagtacacgaatgcgaggtttttcatcataaaatcgtacagcgaagataatgtgcacaagagtgtcaaatatggtgtttgggctagcaccacaaatggaaacaagaaactggactcagcctatcgcgaagctaaggagaaaggagagcactgtcccattttcctgttattttcggtgaatgccagtgcacaattctgtggtgttgctgagatgattggaccagtggactttgagaaaagtgtggattactggcagcaagataagtggactggtcaattccctgtgaagtggcacatagtgaaggatgttcccaataatcttttccgacatataattcttgaaaacaacgacaataaacctgtaacaaacagcagagatacacaggaggtgaaactagagcaaggaatggagatgctgaagatctttaagaaccatgatgatgatgcatcaatccttgacgactttgagttttacgaggagcgtgagaaagcgctgcaggaaaataaggcacgcctgcatcagcaacatctacccagttctattgttattgagcccaagaaacccttgactgcacccagtgacctcgtgggccatatcaccaagagttttgctgaggctgtgcggcttggtgaggccaagactgtaagccatttgactgagaaggtttctgggggtgatccgtctattcctgtgaagcatgttgaagttaagcagagtggtttatcttaggaactcttgatcgatgtgaatgaactgtaccaaaaattcacccatacgcttcctgatcaaaatgtcgggaatgcatatgcagatggatgatgatgaaacccaagacatcggcaaaagcatgcatgcacactagggtaggtctttgccaaccttggaagcatagtttcttgaatagtttctctctttttttcttctttcttcctagtattttctccccttctcttcgcatcatatgatgattccttagtgtctagcctcaaggagagttgctgtttttgtgtaagcctctgtaagtttcctgttccatcacatatgagtaaggcctttttgtttctttttatttaagtaaaagatccatcttttatgtactgtcgtggcagttttattatactatgtctgaacaaggcctattcactatgtaagcaaaacataaacgctatccaggtgacctggttgtgatgactacagtaataagtaactgaataat

SEQ ID NO: 37063 - DNA, 1148 bp, Zea Mays
ttttagactaattgtataccataaagaaaatgtgaacgttttcgtgactgcgcatgggccattcatcactaccaaacctacatctcgtgagatgcgtgtccttgtcgatatatagcgtggtagtgagcaccactagcgtcttcgaccacttgccactaccccttcgcgctacctttcgcatcgcatccttgtcgactaaaggagtggtgcgttcaagatttagagaagctttcctaaatttaaatcctctctatggaagaatgagccgacggatcttgagatcgacgaaatcactaaaccacgcggaggaggaggacgattatatatatggacataaattgggtctccttgctgcgtaaatgcttcaagagagtatgcctacactctccatgtcactgaaaagagtgacatatatagctttggtgtggtgatccttgagctcgttaccggaaagaagccgctggcagcagagattggcgagatggacctggtggcgtgggtgactgccaaagttgagcagtacgggctagagtctgtgcttgaccagaacctcgacgagcagttcaaggacgagatgtgcatggttctgaaaatcgggctgctctgtgtctcaaaccttccaaccaaacgcccgtcaatgaggtccgtggtgatgctgctgctggaggtcaaggaagagaacaagccaaagctgaaggcggtggcaactctgcccatctgacctggaggaggcgaccccatctgatcaataataacaaataaaagtagtgtctgttcttcttgggatagtgtactaaaaaaactatttgcattatatctgatcttgagaagttcattcagggcagcagctagctagctaggtctgagaacattttcagcatagtgtttgctaaagcttatgactgtggtatccttttgctctaaatgagaaagtgctggttgctgtcaattttatccctggcaatctttttgttcatgattggctggccccatcaagggtgagtctacttccattcttttttgtgcctatttctgatcctgaaaggtgtagtttccaatcatgtacaccttgtggacctgataatgcgcctaatgatttacattaggaatttgcacgacagatcttctgtttcggtaactagtagagc

SEQ ID NO: 37064 - DNA, 3966 bp, Zea Mays
cctgcattgtcaatggaagacattatcagagcttcaaagtgttagtggattcaagaaggtaataaattacacgaaaagagttgctgaggaacagaggtacaagagggcactatcacgtgaagaggttgaggtgcatgatgtgggcaaggagatggagctggatcttattaaacaatatagtcaggttgaacggatatttgctgatagggtcagcaaagctgatggagatgatctggttcctgaatatttagtcaaatggcaaggacttccttatgcagaatctacctgggaaaaagatacagatatcgattttgctcaagatgcaattgatgaatataaggctcgtgaagctgccacatctatacttgggaaaacagtagatttccaacgaaagaaaagcaaagctagtttgaggaggcttgatgatcagccagaatggctaaaagctggtaagcttcgtgattatcagctggaaggactaaactttctcgtgaatgggtggagaaatgatactaatgttatacttgctgatgaaatgggtctggggaaaactatccaatctgtttccatgcttggcttccttcataatgctcaagaaatcaatggtccatttcttgtagttgtgccactgtcaacattgtcgaactgggcaaaagaatttcggaagtggctgcccaacatgaatgttgtcatttatgttggcaaccgtgccagcagagagatgtgccagaagcatgagtttttttcagacaagaagggtgggcgtcatgtaaaattccatacgttgataactacatatgaggtgattctcaaggacaaagcggttctttccaagatcaaatggaactatcttatggttgatgaagcccaccggttgaaaaattgtgaagcatcactatatactacccttttggaattcagcactaagaataagctgcttatcactggaacacctttgcagaacagtgtggaagagctttgggcattacttcatttccttgatccagttaaattcaacagcaaggatagttttgttgaaagatacaaaaatttgagttccttcaatgaaaccgagcttgcgaatctgcataaggaattgaggcctcatattctaaggcgggttataaaagatgtcgagaagtctttacctcctaaaattgaacggattctacgtgtcgagatgtcaccccttcagaaacaatactacaagtggattttagagcggaatttccagaatctaaataaaggagtccgtgggaatcaggtatcacttttgaacattgttgttgaattgaagaaatgctgcaaccatccatttttgtttgaaagtgccgatcacggttatggtggagatagcattggcgatcggaataaagttgaacggattgttatgagtagtggtaaacttgtcttgttggacaaactattggtgagactacgggagactaaccatcgtgtgcttatattctcacagatggttaagatgttggacatccttgcagaatatctctcccttcggggatttcagtttcagaggcttgatggtagtacaagagcagatcttcgtcatcaagccatggaacattttaatgctcctggaagtgatgacttctgttttcttttatccacacgtgccggaggacttggtattaatcttgcaactgcagatacagtgataatttttgattcagattggaatccacaaaatgatctgcaggttcttcctctcattctcttcctcctgcaagttcttgatcacttggttattcagaagctaaatgctgagggcaggcttgagaagaaagaatccaaaaagggtggctccatatttgacaagaatgaactttcggctatcttgaggtttggagcagaggaattgttcaaagaagacaagactgatgaagaggccaagagaaaccttgaaagtttggacattgatgaaattcttgagagagcagagaaagtcgagacaaagggtggtgaaggggaggaaggaaatgagcttcttagtgctttcaaggtcgcaaacttttccagtggcgaggatgatgcaacattctggagtaggctaatacagccagatcctgcagatattattcaggaaactttggcgcctcgtgctgcacgtaataaaaagagttatgttgaagatccccagtttgacaaaaataataacaggaaaagacgtgcagttgaagcacaagaaaagccaaggaggcgttctggcagaacagtggaaacagttaattcagtaccattggttgatggagcagtagctcaagtacgagagtggtcttttggtaatattccaaagaaggatgcttctcgttttgtacgagcgggcacagttttggattttttcggtgtagctgtgaaggcctatgaattgctagctcgtgttgaagagcttcagttgttgtcaaagcgcattgcacgatacaaagatccaatcaagcaataccgcatccaactaccttataaaaagcctcagtggtcagcaagctgtggatggactgaaactgatgatgctagattgatggttggaattcattggtatggctacgggaattgggagaaaatacgtttggatccaaagcttggcctgacaacaaaaattgcaccagcaacacttggtgagagagagacatttttaccacgtgctccaaacttggataaccgtgctagcgctctcctgcaaaaggaatatgctaagtttagcggtaatagctcaaaagtcaaaggaaatgcccgccagacagtcaataacgacagtaatagtggagctcgatcaatgagaggccgacaaaaggatgcaccagataaagaggataataagccgaacaaagatgacattcagaagcgcaaggtaatgatggaagctgaagcaagagaagaaggtgaaatttctgaatcagaggcagagacaaagtatcgtctggacaaagaggagaagtggctcgaatggtgctctgaagttttaaatgaggaacaggaaactttgaagcgcctggacaggctgcagaatacaagtgtaaacctcccaaaggaaaaggttctttcaagaatccgcaagtatctcctgataattggggacaaaattggtgaagttgtccggcaacacagtgaatcttataggcaatcccgtaagtgtagccgcacctcccgcatgaccatgaggttatggaattatgttgccaccttttcaaacatgtctggggagcaattgcatgatctctatttgaaacttagtcaagaccaactggaaggtggagttggcccatctcatggtgccaatttcacatccattccttccagcaagggaggtaactcaaatcaacttcatcctacaagaaaccataggccaaccaggtctctccagtacaattctgagtctttgcacaataatgagagctctggaagttctgaagcctggaagcgtcgacggagagcagaccctgataatcagtttgacacccagcctttgtatcaacctccaattatgacaaatggaaataggttgcaggaatctagtagttctgcaggaattcttggttggggtccagttgaaatgagacggtatggtaatgaaaggccaaagcgtggtgttcatcctagtcattttcctactgggcatggacctttgttgtagctgaaggaattagatgactcgaacaaccttgtccactttggcataactgttcccagtgaatttcagcttccatatagttacaaatggtggaactctgtcggaattgaaattcttttttccataacaagaaggaataaaaagcaagacctgacctggagcgcagtttgaatactgtccctcaaaggttagctaggtgatcaaagccattctacaagtcatttcgcaaaagcaaacaatttaggagttgcatgaggcctactttaccctggatgcctcacttttgttatttagatgcagtgaggatgtttctagctctg

SEQ ID NO: 37065 - DNA, 2286 bp, Zea Mays
ccttcgcctgctctgggacatatccatacctcaacatcgatgccggaaccatgtctccgctcgagcatggcgaagtgtttgttttggacgacggcggtgaggtggacttggaccttggaaactacgaacgatttctggacatcaagctgactcgtgacaacaacataaccacggggaagatctaccagtctgttattgacaaggaacgtagaggggattacctaggaaaaactgttcaggttgtgccgcacatcacagatgaaatacaagagtggattgaacgtgtggcaatgaatccagttgatggcacagaagagccagctgatgtttgtgtcatagaacttggtggcactataggggacattgaatcaatgcctttcattgaagcattaggtcaattttcataccgtgtagggcctggaaacttctgcttggtgcatgtcagtcttgtaccagttttaaatgtggttggtgagcagaaaacaaagcccacccaacatagtgttcgcggacttagaggacttggactcatgcctgatattttggcatgccgtagtacacagccacttgaagaacatgtgaaagtgaagctcgcacaattttgtcatgttccgatatcaaatatcattaatctccgtgatgtaacgaacatttggcacatccctttgttgctcagagaccagaaggcccatgaagctattttgaaagtgttagacattcagtgtgtgggtaaagttgctcgagaaccccagttgtctgaatggactgaaagagccagcagatgtgacagattgaaatctccggttggttaggattgctatggttggaaagtatactggcctgtcagattcctacctatctgttatcaaggctcttttgcatgcgtcggttgctttggacaggaaacttgtggtagactgggttccttcctgtgatcttgaagattctgcagcagaagagaatcttgatgcctacgaaaaagcatgggaattgttaaagggtgcagatggtgtgttggtgccagggggttttggagacagaggagttcaagggaaaattctggctgcaaaatatgcgcgagaaaacaacattccatatcttggcatttgcttgggcatgcaaattgcagtgattgagtttgcacgttctatcatgaagttgcacggtgcaaacagcacagagttcgatccaaccacaaaaaccccatgtgttattttcatgccagaggggtcaaaaacccatatgggggcaacaatgcgccttggatcaaggaggacctttttccaggtcactaactgcaaatctgctaaactgtatgggaatgctagctacgttgatgaacggcaccgccacagatacgaggtgaatcctgatatggtcccagaatttgagaaggcagggctttctttcgttggcagggatgaaagtggtaaacgcatggagattatcgaactgccaactcataggtttttcgtcggtgcacaatttcatcctgaattcaagtcaaggcccggcaagccatctccgcttttcttaggattggtagcagcgtcatcaggtcagcttgatcacctgctccaacctggtcttatcagttcgactggcagacacacctgcagcaaaggaggagcgcaaaaattaaaggctgggcacgtcatgaagccactgaatggcctggtgaacgcacactattcagcaaccggcaatggcgccattcccatctagcagcgcagagctgcgacgcgtcgcgtgcttgtttgggatttctcttctaccgttactgcttgttctttttttttccctttccttcgagggtgttcttccgtacgttctgccaggccaactgagaagaagagaagggctgtttgctctagcgacacgggcagccgcgtttccgatgttttaacgtggaagcatttggcatggaagctgtcgcatgcatcaagaggcaaatctagcaggttagctagagtttgattagtagtggtaatccgatatatatgctggttgatttgttcgtttgtttgctaagattacaagggccggtgatgtgcagctagctggtagtgtagcctgccgtctcgcctcatttgtacattgtaaaacaactgctactctccattgactgactgaatggacgagtataaacgtattggaccaacatgctgcgtgtgtgtttagtttatcactggtagaaaagctactatcgaatgccagttttatatacaggcgaggccgatacagaagggattttcagtctaaatttgaattgcattttatttaaat

SEQ ID NO: 37066 - DNA, 2273 bp, Zea Mays
acaaatccaaagcagttcccacctcatcgccttcctccttccaccgttccctgcccgccaaccaggacgtacacgccggacacacgtcacagccttgaagcctccctcccacacaaccccaagccccaacacaaacacacacacacgatcggtctcgtcgcagcgcagcgccgcgccgcgggtttgatcgtcacgagtggcgacttccttcccctccctctttcgccgatgaccacctcgtcctccgggagcatcgaagcaccggcgaactccagacccggctcgttctcgttcgcgagcacgagcacgagcttcacgaacatgctggggggatctgcggacgcggccggcggggcgtcgaggtacaaggccatgaccccaccgtccctgcccctgtcgccgtcgtccttcttcagtaacatccccgacggcctcaaccccgccgacttcctcgactcgccggcactcctgagctccagtatcttcccctcgccgacgacgaacgcattcgcctcgcagcagttcagctggctggtgacgccaggcgcggagcaaggcggcaaggacgagcagaggcagtcgtacccagacttctcgttccagaccgcgccgacggccgaagatgccgtgcggacgacgaccttccagccaccggttccagcggccccaccggttgaagaggcgtacagaggtcagcagcagccatgggcctaccagcagcagcaagctgcaggcatggacgccggatccagccaggctgcctacggcgggccgttccaccaggcagcctcgtcggacgccgccgcgatggcgccgcacgtgccggcgagcggcgggtacagccaccaggcgcagcagtcgcagaggcggtcgtcggacgacgggtacaactggcgcaagtacgggcagaagcaggtgaaggggagcgagaacccgcgcagctactacaagtgcaccttcccgagctgccccaccaagaagaaggtggagcggtcgctggacggccagatcaccgagatcgtgtacaagggcacgcacaaccacgccaagccgcagaacacgcgcaggaactccagcagcgcggctgcggcgcagctgctgcagggcggcgacgcgtccgagcactcgttcggcgggatgtcgggcacgcccgccgcgacgcccgagaactcctccgcgtccttcggggatgacgaggtcggcgtgggctcgccgcgggccgggaacgccggcggcgacgagttcgacgaggacgagccggattccaagagatggaaagacggcggtgacggcgagggtatctccatggccggcaaccgaacggtgcgtgagccgagggtcgttgtccagaccatgagcgatatcgacatcctcgacgacggctaccggtggaggaagtacgggcagaaggtggtgaagggaaatccaaacccaaggagctactacaagtgcacgacggtcgggtgccccgtgcgcaagcacgtggagcgcgcgtcccacgacctgcgcgccgtgatcaccacgtacgagggcaagcacaaccacgacgtgcccgccgcgcggggcagcgccgcgctctaccggcccgcgccgccgcccgcggacaccgccggccaccactacctcgccgcggcgcggccgggcgtggcctaccagacggggcagcagtacgggttcggtgaccagctgggctcgttcggcctcagcggcgcgccggcgcagagcggcggcggcggcttcgcgttctcttccggcttcgacaacccgatgggctcgtacatgagccagcaccagcagcagcagaggcagaacgacgccatgcacgcgtcgagggccaaggaggagccccgggaggacatgtttttcccgacgtcgttgctgtacactgactgaaggacaaggacggcaggacatggcgtggtgtggtgtccataaactgttcctttggcacacggattgttgttgttgttgttgttgttgtatctaggataggttgaacagatttctttatttgtttggaggcctccatgttggcagtggcagatgcttgccgtgccgcaggggtgtctcccttaacacgtgaaaggggggaaagaaagggatttaggatactagagtctaggacacgtggcaattacacagaaggggtaaagaagttttgttcctcaaagacaaattcacacatgagacttgttgtagtcaggattggacataatttcatgtcacagaacatttgttaagattcaaattgattgttctctggtacattgagg

SEQ ID NO: 37067 - DNA, 1863 bp, Zea Mays
cgcccgcatcccgccccgcatcccgcgaccttcttcctctgctgcctcctgcccgcatcctgccggcggacgcaccccgccccgcatcccgcgaccttcttcctctgttgcctccacgggagccttctcacctccacgcgtcgttgcgtcagatccgtctgtcgctagagaaaaccctacccaatgaccacatgcattcttactgggacgacgccactattggcgcagaggagcagatatggcgcatcgcatgtactccgtcgctgtcctcctcgaatccgcctctaatttctccaacgccataggcaaggagatgcctgcccaccgccccggcaccccccgccctcgccgcgcacaccccaagccccgcggatcacagtcgcctctaccctagcgggagccgcgcccgcacccacattacccgcacgatggcaagaggcagcggcacaaggccacggcgactcctcgagcagaggaacccgaccgagcgcagcaacgcaaatcttcaatctcaaatccgtgctgcgagaaaagtttcactcctctggctgctccttgtgtgtgtgtgtccactaatgcgttcagcattgcaactgctgctgccaaatgctgaggcagcagtatacataactggttcaatttgtgcagcattcgttgccaacatagatggtcactctgataaaactgtcaccttcaatgggaggatgctcaggttttgagaccgaacctatatgtaccaccaaaacaatatcctaattgcaagaagcatgatatggttactttctcttactgctacagaactgcagtgacaaatggtagtgccattaagcatgatggctcatatgaatcagatcctgcagttgagattgttcgagttgaactccaaggtgctgctgcatttcttttattctcgtctggttccacgcctatatatattggagaacatggatgggaaatgcttctggtagtaaaaaaggcaacacaagaggctggttcaaaatttgaactgctaggttttgcatctgtgcataacttctatcattatcctgagagtattcgcttacgaatcagccagatacttgtgttgccaccttatcagggtgaaggccatggtcttggtcttcttgaagcaatcaattatattgcacagtctgagaacatttacgatgttacaatagaaagcccttctgattacctgcagtatgtgagatcatccattgactgcctctgtttgctcatgtttgatccgatcaaacctgcacttggtgctattgtctcgtctctgaaggagaccaacctgtcaaaaagggcccaaagtttgagaatggttccaccggttgacctgatggagactcagccagaggatctcaggacgcaggagcaacagctcaatgagctcgtggacatccaaatcgaggagattgatggggtcgccaagaacgtcacttcacgtggcaaggataagatggcagagctggcggttcaatgaatctgggtgaggttcctacttcaaacgatgttaaaatgttgtcgtagcttatctggtgaggtctcttttacgagttggcttcttggtagaaagggaatgtcacggcataggcactgagtagattgtcacgacagattattatatacttcaattctggaatatttgatggaaatgctattttagattgcttggtaagtgggaaccgcctcaaatcacagaagtagaagcagcttccgattcagccggaaccatttcttcaaaaatgttctattatagaataaacaaggcttaggagatagaaaacattatttacaatataaatatgtaatattattataaatgtaccgactcaaataaaatgaactggtattgaa

SEQ ID NO: 37068 - DNA, 265 bp, Zea Mays
cctcacgccctgcctagctccagtccacgtcttcggccttcttgtctcctagaccgaggtaccggtggcggcgccttcgcactacggcctccagtctatgcctccacctccatgctccactccatggatccgacaactgtgacctccctgcggtcagcggtctacgccctccatggattcacaccacatcgttcgccccttgacagctcgtgatcgttgatggctactgttctataagtgcaggtacaaggaaccgttgtatgaa

SEQ ID NO: 37069 - DNA, 352 bp, Zea Mays
aacgatagtctaaaactattcagattggtcacaaaacacctccaaactgagtacccaacactgcaatttcaggtttccgttctgaataaaaattcagtccaactaacctgacagtccaagtttgcagtgggtgcatgaaactgctcgaggaagacataagttggctggtcgacgacgaaactaaacacggcgacgatttgcggtggcgtgactacattctggccactgtgaggtgaaggagccggtggctgtggtaactaaaagcagggagatagcgcgctatgcacaagggctgaccgagttggtggctgaggagacatgagcactagcgtgaccactgaaattccaacac

SEQ ID NO: 37070 - DNA, 2350 bp, Zea Mays
acttttgcccttcgaactaaaagcgcctgcatctcaaacccgacggcgctctcttctctatcctctgtgtcccctccaccaaaaccgacgacgacgtcgctctcctccaccggtgctcggcgctctccctccaccagcggtggtccacagacgctcggcgagctccaccggcgggcgctggcggctggtcagatccgctcggcagtcatccatctggcacatcggccgaagctcccagcgtcctcctgcaggccgagctgaaggttcagcgcgccggtggagttagacgacgaaactccgtcacgtcatacctctccgcctcccgtcttccagacgtctctaatcggggtcccagcgtctcggagaagaggagcagcacggcacggcagctgtggcgaggaaggctcctgtcccatcccaacccagttagcagccgcccaaggaggaggagatccaatcggcgtgcgggcgtccgcggtccatccatcgatccaattccaatctgcagaaaaagttatcggtccgcccttggttactgaaactggtcaggtgtatgtaattttgaagtaacaaaggatttggaacccagccctctgttctccaccaccgcttcgaagatgccgcaggtaatggtggtggcacggaacttcatggatatggtggctgctcttcctgcgggcaagcttgatatgctctatgactcagcctttatctgtgaggcagtactcaggtcacttcccccactggcaaagaagtatgcactgcagatgttgtatgtgctggcaccagtgaccgctgcagcaatggaagagtgggtgcttgatgaatatgctgccaagcataaggttgccattgataagcttctacagctcagggtctttgttgaagtgcgcgacagacgacgggacgtgagctacaagatgaatcagaagttccagggaaacatgcagaagtatttggttgatggtggaagtttaccaagggaacctttaccattaagtgtcactggtcgattgcccacaccagcagatctggaagcctatgctcttgatcaatgggagtgcttcttgttgcaattgatcaattcatctcaagtcgaaaaagggtcaagttttagctcctccatgatgaagacgtttcagcgtggtcttctgagttcaagggatggtgaagcttcaaagttgactgaaaatggcttccaatttcttctgatggaaacaaatgcacaactttggtacataatgagagaatacatttcatctgctgaggaacgtggagtggaccctacggagctgatatcatttctcttggaacttagctttcataaattgggagcggcttatagcttgaacactctgactgatgtccagaggattgccatcagggatcttgcagaattaggactagtcaaacagcagcagggtcgaaaggatagctggttcattcctacccaattggctactaatctttcagcaagcttgtcagattcgtcatctaacaaagagggatttgtggttgtggagacaaactttcgaatgtatgcatactctacttccaagttgcactgtgaaattctacgcctttttgcaagggtggagtatcaacttccaaacctcatcgtaggagctgttacaaaagaaagtatctatggtgcttttgaaaatgggataactgctgagcagataatttcatttcttaggcaaaatgctcaccctcgtgttgctgacaagatacccgctgtcccggagaatgtcacagatcagattaggttgtgggaaactgacctcaacagggttgagatgattccatcgcatttgtacgaagattttcctagcaaggaatggtttgaacaatgctgtgattatgcaagggataatgggtacttgctgtgggaggaccccaagagaatgagactaattgtacgaggggagttccaccccgaaatgagggagttccttcgcaggcaaagatgaggaacgaccttgtacttgacggaccatgctatgcttctttgtagtgcatagaaacactgtatcgggtaatagttctcctttaaatatcaggaaagggtctagaaaagggctcagtttttgaattattttggtgacctgtgagctgtggaagcatatgaataatgtggtgttcaatggagcaaggcccaacatccttgatctgcttctaaatgttactagtgactgtaccctatgctggtgtatggctggtggccaggtcctgttggaactcttaggtaggtagtatggtgggatggagttggtatgctcttaatttgttgttatttggattgattctatataggacggagtgattttaaaaatgaaaaaaactcaaa

SEQ ID NO: 37071 - DNA, 1393 bp, Zea Mays
atctgtttggagatattatgctgagcttcgaaatttggtatgggctacgtccaagcatgacatctacctagtatcacattactcaattcgtcattggtcagcattgagtggtgtcgatactgaacttatcaacgtccaaggacacgtggcaccaagggagaagcatgcaggaagtttatcagagggtttttatcagactcaagttagtaccttggcagtcaaggacaatttactggtagctggtgggtttcaaggagagctgatctgtaaacaccttgatcgggaaggtattagtttttgctgtcgaacaacttatgatgataatgctattacaaatgcggttgagatatttaatacctctagtggcgctgttcacttcatcgcatcaaataacgattctggtgtgagatactatgacatggagagattccagctattcaagcatttgcagtttgaatggccagtgaatcatgcttctttgagtcctgacagaaaggtcgttgttattgtcggtgatgatcctgatggtctacttattgatgccaactctggaaagacactccattccataaaaggacatcgggactactcatttgcatcggcttggagccctgatgggcgaacatttgctactggcaaccaagacaagacatgccgaatctgggacgcgaggaatctctcaaaatccgtccatgtgttgaggggtaaccttggagccatccggtccatccgcttcacctcggatggccagttcatgtccatggctgaacctgctgactttgtgcacgtctacgacgtgaagagtgactacaacaaaaggcaggagctggacttctttggcgagatatccggcacatcgttcagcccagacactgacgcgcttttcgttggcgtgtgggataggatgtatggcagcctgcttcagtttggccgcctgtacaactactcgtatcttgactccgtgttttgatgtggaaccaaacggatgttggactgttgggtttggtgtgccgcggttctctgaatgttgtcagcatgattaggcggttatccttatatcaggattttaagttgacaaagataattgaattaataaatgttgtaccgtgcccgatgtgtatatataaaagaaatgtatacatatgcctattcagataccgagttgagatgtgacttggtctactccatgtgtgattgatgaattggttgtcgaagaggtttaaagctttcgacgcttgaagttgaacacagtgcgtgtagttccatgtaggttgtaagccacatgtagtatatgtttttgtcatgggactagtggtgataggaggtctattggctcattgtttgtgacatgataggaatgtaaggagaaagtcttttgtctcatggtatgtga

SEQ ID NO: 37072 - DNA, 1841 bp, Zea Mays
gcggaaaccaaataccccgaacgtccacagcgagcgagaggccgcaaactcccgagaccgtacgaaccagacgattcaccaatcaccatggcggcgccggcgcggcgcaggtcctgcatctcctccggtggagccggagcgcctccttccgctgctgcttcgcctcttctccgccctccgccgcccgctgcgaggccggtccaaggccatgctcaaggggatggactactgactactccgaacccgagataaggacatgatttaagacatgtgtgtgtttcaagtagttcgttgattgggtgcaggcgcaggggtttcggccaggccaggccttgatgctgtggaaatgcctgtacgggaacaacgtttgggctcatttttacgacgagctggctggtttaaacaaggatttcaggaagatgataactgagcatgctgatctcaaggcattaattgtgaaggacattcatcggatagaacccgtaaggatgttacagatactggtttctattgaagatggttcagtgatttaaacagttatcattccttgcactaggggcaggacaactgtctgtgtttcaaatgaagttggttgggccatgaaatgtcagttttgcttcactagaagggcatgggtcaaccatttcacaatatcgacaatgtaataaaagcctcagcaataatggttcatgagcaaggccattttagccctcgcaaggttactgtctccacaagtggttttgtccctcagttaggaacccaattgcttgctgccgccagtcttaatgcaaggacagatgaggttagaaactggataatgactataaacagaaaggagaaccttaacttgcttcttggcactttaagaggtgaacttaacctcagaaaaaaaaacaaatagtgctatctgaatatgccatgctttctggagtgaacggcagtggatgatgccaaaagtcttttgtagagctactccaagggatcccatgcaagcaagataaacctcatctctttgagttccctcgacggttcccaatccaagcccacatcagacgataaaatgattgagttcggcaaacttttaattcaaggtgggctcactgtctttgttcggtcagcagaggggatgatcagatcagatggctgcctgcgggcagctcagagagcctggagactaccagctgcctctgcaccgtgcacctgagaaaattttgaggtcgtcttgtgatgctagacagtgcattacagtaaactggtcctgaggcctgagaaaattttgaggtcgttttgtgatgctagacagtgcattacagtaaactttagcgtcgtcgagaccgaagtgggctgaaaagcgctgcatcgtgcagccgcgtgacagtgggcgtctttcgcatggttggttcgtcgctgcggtctgagtcgccaaagctgaattctgttgtcatcggggagtgattcgaaaagtttggaacgaacctatcggtggtcaggaatgaggtaagaatctgaaggactacaaggttggcttgcctgagcgagataccttaaccattaaggtgtgcatggcacttggcacctagtcaccagaccagatcaccctaaatggtggaaagaaaaaagcgaaagatctagcgcaagccccacccggatcaaagtttctctctctctcttttccccccaaaagcaagtccatcacgctgcacattatgggcgtctttagcactgatctgaacacgtaagcacgatatacggttgcgccttgcttgtagcgtttggttgaagagccaagtagaacggaaccgttctgtcccagttttgttgttgtttggttacaaagtaac

SEQ ID NO: 37073 - DNA, 1627 bp, Zea Mays
agcaggacagctaggtgtgttggggacgcccttaggaaatcgagtcacactagatgctgacaacagaacagctctacgattaattgaataacttcgataagatgggtcgtggtattagcagtgggggtggtcagagttccttgggctatctctttggcagtgacgaagctccaaaatcatttgagaagcctgcaccagttcaaaagccaactcctccatcctctgcagagagactaaaagatatcgctgctggtattcaaagtagtaaatcaaacaattacaaaagatctgaaggccagaactgtggaaatttccttacggtcagtatccaatgacacctgtgaacattttgattatgctattttggagcaccagttgagtgctgtgcaggtggagcaagaaaaagtttatacttgctctcattcatagtttgttcttagcctatgatctagaagtacttgtttaggttttgctgcaagaagcacccttcataatatgattacggtgctgtgttctgtatttacattaatatgacatggaacatggttatgatgacaagttctctctactgatctcaccttgttgtacttctatggtttgcccttcttctctgtggtagatgaagtcatactaaatcatttgcagttataagagcctggtatttgacattatgacaataaatacttgtagcattttatcggaatcatggttgttaatcctatagtatgtcattagtgccagccagaataatctctgttgtctgttggtatgtgttgagctttggtaatttaacaagagttctacttgtgggtttacaatttacttgtgctttacagtaatccaaacttccaaacttgtgcttcacatgctgatgcaatttgcgttaaatatacctgcttgcttgtctgtccttagaatattctgatggatagtcccttcgattgtttcaattctttgcttttgcacttctactcatagtgaatagtttgccaaataccttttacatgacaacggaatctttgtggccatttatccaaacagcctgtttgttaatgttcttagattgcggctgaaaatgcacaaaggcaaaatctctaccttgaaatatttgtacatttgcggatattagctgttgtgggatgctgcaggaccgtccgtcgaccaaggtgcaagcagctccaggtggcgactcttcactcggttatctttttagtggcagcaaagatggcaagtgatgtacacctgctgttagtgttcgccatgatcatgggagaaggtttctgcttaacaaaggaaaaagggaaaagaatcttgtattcccatgagtaaatatcaaactgctcatggtatctatgttgttgggattgcttgtatgtgtgtacatgttcgtgtgtgtcgtgtgttgatccacagctactggtagcaagagcttctatccctgctgatggaattgtgcgcaatgccaatgttgacattatcgtgggtgatgctattatgttgtggtgtattattggatatgtttgctgtttaatacacattgttgtagaaaaaaacatccacagttctgttcaatttcagagtgtcctgttcaattttcaccgaaggggtggtatgcgccgaatagttg

SEQ ID NO: 37074 - DNA, 225 bp, Zea Mays
caagcctcctcctctgtgcaccgtcccagctccgctcggagctctctgctcgagctcctctagttcgcgcactcctcctttctccttccctgctcggcatcctccacagctcagatctcgcccatggcggatccctccactcgaccgtccatctccctcccagcgccgtgctcctttctcccagctcgcgagcacgctccttccttgctgagctcggttccatgg

SEQ ID NO: 37075 - DNA, 980 bp, Zea Mays
gacgcccactctatggagacgtttttggtgttcttcagcaggacgaacctagctacgatgatgaacctgttgatcgcagcaaacactggggagatttggaggaagaggaggaagaagaggaagaggaggaagaggaagaaccaatggaagacgaggaaatggaagacggaattcagtccgtcgataccatttcaagtactccgactggtgttgaaacacctgatgttatcgaccttcggaagctgcagaggaaggagactgacaagcaggcagaacggccgttgtatcaggttcttgaacagaaggacaaaaggatcgcccctgggacactatatgggtcaagccatacgtacgtgctgggagcacaagataaatcatcagctccgaaaagagtggatctgcttaagaatcaaaagtcagacaaggtggacgtcaccatccaacccgatgccatggatgatgttgtggcagccaagtacgaagaagcgcgagaggaagagaagcttcggaaccaaaaggaggacttcagcgacatggtggcggagaatgctcacaagaggaagcggaagcaagagaaggaaggcaagtctaagaagaaggaattcaagttttaaggaccggcgggagatataggccgcctaatgtaaatttaacatttgttttgttccttggctcgactggatttgcttgcatgaagcaccatgtaggaagctgttattttggttgtgttgtggtcacgccttgtcctcttatggatataaggctattcacaaagttggttttatggtggtttcatgcacatttaatagtgtcattagatttttttatgacatagcatatcatttaaggtgattaagttttataggatgaaagtagtttcatggagattgagttttatgagatgaaattagttttatggggatgaaaccgtgccaagtcgtttttaagttcttgtaaactatgtgaaacatttattaaga

SEQ ID NO: 37076 - DNA, 1266 bp, Zea Mays
caggtttcttttcaatttcactccgtactttgtgaagtagagcatagcccaggcccttgaccagatgtgtatgctccaaatcaccttaaaaatatttgcttttctcaattgaaatcttgtgggcatccgccaacctgtgacacaaacattgcagagattaggattccagaaaacatagaaaaatacatgccagatcaatgaacatgtgatccattacctcaaatcactcccaggaggtgccactgcatgaaacgaaccaagttctgtaggttcataatcagggttttgatcttcacgccgctccttagcacgatcacgatacctgggtgtctctggttcttcttttttcttctcctcgctgaatggagaacaagagaaattggagctcacccaatcacttacagtgagtaacatgatcacgggccctgatacatacacatcctaaaaggctgaaaacgtgtgtggattcagtccaagaccagagtcgctgattgtggggtcctgaacattatcatagctcccttgcagtatgtgacatgtatgaaaaatagaattttgcagagatggatagtagtatattgcagagacaaacataatggtggttattcgggcttttgcgaaggagtacaggtaacagcgaatcaccaccagagggtgaaagtaaatccaagtaatgtagcagatggactagatgactagaaggctaagctacaacagcagtcatggttgcatttcaagttccagccattcgcgtaactgtcacaacaacagtaagaaattaacggtaccatcaagagctgtggtttcattcatgatttttttccctgcataataattttcagaaaaaaacagctataagcctataattggtggacgattcgacaagactaactacagtaggctccttccaaagggaggcagctctgattttactgtccaaaccccaagcataagacgcgatctctctctctctctctctctctctctctctctctctctctctctctctctccatagaatcattcgaggtgaaattagaacgacgcaaaaactaaaggcgcggctcacgggatcgtacaggagattcggtcttaatgtaccttgcttacaatagctatggcagcggaagatgggaaggagcgaggcaacagcggtggcgtcgacggcgccgcggcagggagcggagggaagccgggacggaggcgccggtcggggatttggaggaggcgggggactggcggtgccggagtgactttttcggtttgg

SEQ ID NO: 37077 - DNA, 6270 bp, Zea Mays
aaatcgttaaaagttattcgatatacattttcacagttccatctaaaagtcactaaaaacaggtctagtggtgctttcaattttgcactgcgagaaagtcagttttttgaaaaaagctgctttcttgatccagtcctttgatttagcttttgacttttaggggataaaagtcaaaaccaaaagtcaaaccaaacacactcttaatctttgtgagtacgaatgatctatatctatatgatataggtacgctcaggagtgacagacgagagactattttttttggtgtgtgtatgatatgcgatatagccggtggcggtggggttgccatctctatctcggcgtgcagtcagtcagtcacagactccagcgagcgagggaccaaaaccctagctgaaccctcccggcccgcgcagcaactgcgtccatggaggtggacccctcgccgtcgtcgcgctcgcccaggccgccgcctccgccgctggcggcgatgccgagctacttcgacccggagtcgtccggccgtcgggaggagtaccgccgctacaggaagaggttgtcttcttcaaatgtctctcctctgctgggaagatcactctccaagacctctggaccaaggctgttatatgatggagaaagcatcccaagacagcctaatgccggtttactccttgaagacataaagcaggaagctgccgattattccaacgtagaaagcttggatggattgagactgttcggttcgccgaaaaggacatctctcgatggcggttctgcatcaggcgcagcttacagttcgggcaggcaagcagtgaggcagacgctgaagccagtcaaactggaggacgatatgtatgtgccacatgaaggagaaacgccttctacaatgtttgcaactctccttgattctgggatccaaggtttgatgcacttccctgatgtaattcaacaatttgagaggacatgtcgaaatgcttcggagtcaatcagatctgctgcaactggaaagcttcgtgtggtggaagagaaacttatgcagcaaaatgctcaacttttactggacgaagctgcttcctggtcacttctttggcacatatatggcaaagaacatgaggagctttctggagagctgttggtgccgccaattacatctcatcaggaggcttgccgctttgttgcagcagacattacagcacaactgtgtctgcggatcatactttggcttgaaggtcttgcttctgaagctcttgatttggagaagaaggtgagaggacctcatgttggttcgtacctaccaagttctggtgtttggcaccgtacacagaggtacctaaaaaggaacaatgctgattctactatagtgaagcatgtggattttgatgctccaactcgtgaaggggcccaacttcttcctgatgacaagaagcaagatgaattgcttctagaagatatatggactcttttaagagcaggaagattagaagaggcatctgacttgtgccgttctgctggccaggcatggagagttgccactctttgtccttttggcggcataaatatgttcccttccctgaatgcattgcacaaaaatggaaagtacagaacactacaagccatggaattagaaagtggtgttgggcggcagtggcgtctttggaaatgggcatcatattgtgcttcagagaaaatcgctgagcaagatggaggccgttatgagatggctgtatatgctttacaatgcagtaacttaaagcgtgtcttgccaatctgtactgactgggagtcagcttgttgggcaatggcaagatcctggctagatgttcaagtggatctagaattatctcagtaccaaacaagtagaccagaaaagcaacttgatgacgacatgaatggagcccaaagttcagttggtccagaaagttggccataccatgttcttgatcagcaacctcatgatttaactgctcttctgcagaaactccactcaagtgaccttgttcatgaaactgtctctcgagcatgccgagagcagcatcgacaaattcagatgaatctcatgagtggaaatatatctcatcttcttgaccttctatggtcatggttatcacctgctgaagagaaccataataatactgcaaggccccttgatgaccctgagatgatacggttcggggcgcatattgttcttgtgctgaggcaccttttcagtgatgggatggatgatgagttagatgaaaaactggttactgtcggtgatctcatcatcaacatgtacgtgaggtatttgttctcagaggatcaagaggagttggttggaatatatgcctcacagcttcaacatgacctttgcattactttgtttgtagaaatgatggaactaaggttaaatagcagtttgcatactatgtacaagctcttcctttctgctgtggagtatctgccattctcatctgataatgtatccaaggcttgttttgaagagatcatcgagagggtgctttcaagatctcggcaaacaaaacccactaagtatgatggggatttctctgatgttgcgcatcaacatcacctgcaatcacttcaaaaggctatggttattcagtggctttgcttcacaccaccatcctcgattccagactttcaaatgatcagttggaagcttctgatacgggcattgacacatagcaatacactgttcagggagttttctctgatatcaatgaggagagtccctgagctaccagcagggccacacaagttgcttgccattttagctgaaccgttaaagcaaaaagaaaatttaatttcacgggaagatccggaggtatctgataacttgccggagtttgaagattggcatgaatattactcccttgacgcgacttaccgcagttggcttaaaattgagatgatgaatgccgctgtttctcctgagatgctttcggcagaggaaaagggtcaagctgttgctgcagctaaagaaacactgaacttggcatgttcgttactacgcagggatggaagaccatggctgtatgctgtcgagagcagtccatttgaatcccccgatgttattttccttgagctgcatgcttctgcaatgctctgcctaccttctggagaatgtatgttaccagatgcaacatcatgcacagctttgacaagtgcactatattcaactgtcagtgaagatgatgtgctgcatcgcctgttgaaggtggatgtccaggtctcttctagagacccctgctgtattgaagtcgctcttcgctgcttagcagcagaaggtgatggatatgggcttcatgaagccaacgatggaggtcttcttgctgcagtcatggctgctggctttaaaggtgaactcagtcggttccaacctggagtttcgatggcaatttcacggcttgatgcttggtattctgaccggagtggttccgtggagagcaccgctgcttacataattcgagggctgtgtcggaggtgctgccttcctgaaacaattctaagatctatgcaggcatgtatcgcactctccgcggctggtgatgatctagattactctctagataaatgtgacgaacttgttgagttagttggttcagccgagtctggaatgatgcatttgttcagccagcagcagttgcaggagttcctgattttcgagagggaatatctcatatgtacaatggagtttgaggaggaccggttgccttgtgatggctaagctttttccccacttgctgactaatccatgagacatgaccggcatgtgcattttgtggcgccgtgacccaagaacctgctgtgatgtatcgctacaccatttcaaagcgaaaagatggaatttagtgcgtaacgtggttctgcccgtttgtgcacgagaattggcccgttttggagagtcaatataagattattcaagtcgaaatccaagatttttgttcatgataaaaacaatgttcggcaagcctttttgtcccgcccgtgctacgcgcactccgcctcggctgcttttgcatcgatccgatctgccgtccctggacacgctgcagctgacaagggtcaccggcagttccatcccaaaggctgcgaaggcgcacacaagccaagttctactcaacatcgttccctaatcatggtagtaagcacactctgcagccgcttgccacttctacccaacatcatcgtcctcctcttgttcacaaccatttccgactccacgaacagcaacagcgatctcaatgcactcttgtcattcaaatccctcataacaaaggacccaatgggtgcactgtcatcttgggatggggacgcttctaacaggagcgctcctcatttctgccggtggaacggcgtgacgtgcagcagcgaccagcacggcagccatgtcactgccttgcgcctgcgagccttcggtctggaaggcaacatctcccagtcgcttgggaatcttagccacctccaaaccctggatctgtcgaacaacaacctagagggcgagataccttccagtatcggtaacttgtttgctctccattttctcaacctaagtgttaaccacctgtccgggaacgttcctcagtccatcggccgtctttccgaactcgaaattctgaatttccgcgacaatgacatcgtaggaagcatcccttcttcagtgctgaaccttacaggactcacaatgcttagtgccaccgaaaactacatgacagggaggattccagattggttggggaacttgacagatctgacagatttgaacttggcatggaataacttcagtggacagatcccacaagctttaggtaagctacctaaccttgctagattgactatgcaaggtaatcaattggaaggtttaatctctcctacactgtttaacatttcatctcttgagaatttaaatctcggctataacaagctttcaggttctctacctccagatattggatttacacttccaaatattgtagcatttagtgtatgctataacaaatttgagggtccagttccatcctccctgtccaatatttctgtgctccaacagctcatcctccacgggaacagatttcatggccgaattccacctaatattggtgtccacggcagcttaactaatcttgaattaggcaacaatcagcttcaagtcgtggatactaaagattgggattttctaacccctttggtcaattgcagtcatctgaaatatcttaatcttgagctaaataacatttctggcattttgccaaatgctgtttctaatctctcctatgagctggaagcgttactgatgggtggaaaccaaataaccgggaccgtaccttcggggataggtaggcttcaaaagctccaaatactagatctgtcagataacctgtttacaggcgccgtaccttcgagtataggtaaactctccagcctagacagccttgtgctattcagtaataaatttgacggggagatcccttcatcacttggaaatcttacaaaactaaccgagctagttttacattccaatgacctgcatgggagcatgcctccaagccttggtaatatgacaatcttagaatccatcgatctttcatataaccgcctcagtggccaaattccccaagagatcttaagcatgtattcccttacaaaatttctaaatctctccaacaattttttcagcggacccatttcccaacagatcaggctcttgatcagtcttggtacaatggatctctcaagcaataatttatctggtttgatgcacttccctgatgtaattcaacaatttgagaggacatgtcgaaatgcttcggagtcaatcagatctgctgcaactggaaagcttcgtgtggtggaagagaaacttatgcagcaaaatgctcaacttttactggacgaagctgcttcctggtcactttggcacatatatggcaaagaacatgaggagctttctggagagctgttggtgccgccaattacatctcatcaggaggcttgccgctttgttgcagcagacattacagcacaactgtgtctgcggatcatactttggcttgaaggtcttgcttctgaagctcttgatttggagaagaaggtgagaggacctcatgttggttcgtacctaccaagttctggtgtttggcaccgtacacagaggtacctaaaaaggaacaatgctgattctactatagtgaagcatgtggattttgatgctccaactcgtgaaggggcccaacttcttcctgatgacaagttggttccatttgacctttcttg

SEQ ID NO: 37078 - DNA, 3501 bp, Zea Mays
cgcccgcgccaggtcacctcatgtccgcaacggctacccccctcaatttgaataccccagccggccacctcctcgcgacctcgcctccccgaccaacagcctccacctcctcctctcccaccgcaccatggccgccgcctctccccccacctcctcatctccccctcctcccagagcagccgacggtgacggggacggggttgggtgcggtgccgcccgctgctcctcgcccacgcccgcgcaacgcaggaggacctcccccaaccacagcggcgggagctcccagttcaggatcaagagattttgcaggaggttcacttttgaaatatgtgaataaatcaacattgcacttcaagaaatctaagaatcgaagaagtggttcccctgtcaactggacccctcggaagaagactgaatcatacatgaagagaaaaataaagcatcttcaggaaactgatggaatgaccgcatccctccatgagactctaggaaatgcaaatcctcactatactaggatggcaagggagaagatagcagcgagagaggcagctagaaaggcaacagatgctcgcaaagctgctatggttgaagcttcatggtgccgaattcttcgagcagccaggatccaaaataaaaatgccgaagaagttatggagaaggcagtgctacaagcaactgaagcattcgaggaagctcgggcattgggtgtgatgatgtatgacagacctgactgtccacataagcagtatgaggtggaatcatcgttgcatacaggagcacaatcaacccataaagttatcgcatcgtttcagacagcttttcaggttgatatggaggtttctgctgcagtaaaaaaagcatttgttcaactcgcaaactctccggattcagcaaagagagaagagtttaaggaactattatggaaaatcagccaaaatcctgatttggcagaacatgaagataaacaacaactggttgactgtagcaatgaagatgcaattgtgttgaaactcaataaagaacacctcagcggcagctgtgttgcttctgatttcaataccacaaaagttcaagaatccatagatgttgttagcattatgcttgaacggctaaaagctctccatgaagaagaacttgcctccttagcagtcattgtagctacatctggccttaatgctgaactacaaaatgaaagaagcaaatatcatgaaacaggcgctgtgaataacactagtgctgggtcactcagatcacaagcaaggaggtattccactgcagcgagttttattggtgtccaaggaccaaagaaagaagtcacttctgagttaccgagtctggataagttcttggtgaagcatctttcaaaacttgaaagagaagttcaggaagcaagagaagcaagcagaaaatccacattagtaaagtctgtcacacaaggtgcccacatccaatttacaggcagcaatgcaaagacaccagaatcaacttcagacctcagcagcattctggtgaagcatgtgtctaagcttgagaaggaaatcctggaagcaaagaagatcaaccaaagaattcaccaggtggaaggaaattgtgaggatgtcaaatcaaatgtgcagtcaagaaacaaagaactggaatttaacaagattcagccagaagttgaaagtaactgtgattcaaagggaagctgtgagtccaaggaatcctgtatagacaacaatgacataaaagataatgatgattgtgtacaagaagacaaagagaacaaaaactgctattcacatcagttaccaccatctggtgcaaagggcaaacatggtggcaagaggttaactcgacttgaagctgctaggctggaagcacttaaatccttttgtactatagatggcaatgcattggatgctggcctggataagatcttcgtcaagccaatccatagattggagaaggaaaagagggaagcacgtgaaggacaaatcaatgtgcagaaacatccccagaagcttggtcaaagcgcaactgtgacagagggcttagatgatatcttagtgaagcatgtatcaaggctggaaagagaaaagattgattaccaaaagaggaatgaactgggagtgggagaaagatggagcaatgtgccacatgatcagcggagtaatggtaacaatgtaaaatcatctgatagtttagatcaagttttagtgaagcgtattagtcgactggaaagggagaagttggaatatgaaaagaggaatgcactagaaggaggttccgatgtggaaccaaagagggaaccacactgtaacaatgctgcagcttctgatagtttagatcaaaacttaattaaacatgtctccagacttgacaaggagaagatagagcatgagaagaacggtggtatgataattgtaaagaagggtcagacgcaatgtacaaatggagccgaaggaggcctggctgacgtctttgtgaagcgtccaacgaagctcgagcaggcgaaactggcttctgctgccgaggagaaaccagctagtggctttaaccctgtcgaagagcgtagaagagcaagacagaaggagcttctcgatgcgtggggaggaatgggtttggggaactcgatgaagccccatgtatcaaggattgagagggataaggtcgcttggaggatagccgaggatgaacagaagcagatggctgctgcaagggaggcgtgacttcactgaaacctggacaaattatctgatgcgttgcgctccagcttggaggaaaatgcatcctctgaagtctgatcctccttccttttgacaaccgacagttgttttgggggaggatcagatgtccagggcgtcatgccatgtaccagtgccgcaaacaaagcgtgaaactgtcgacaggttacttggttcgaatcctccttttgtatttgttgttgcctctggtacattctcctttggttgttccttccatgtaattacgtatcgttgtccaattgtctagcatataattgcgagcaagttcaagtgaaattaactcctttggagatgacgaatgaaaaggcccagtgcagtttcctagatgccagttactaactgctggagtgctgtggcttatatagatactgttattttggcttatacagaatcacagatactgagatactgttatttttctttgtcaaaggccggcgtggattctgcgcgcacatgaaacatttctagatgctcataacggatattttcccgaaattggtgcacctgatttaacccaagttgtccttttggtcttctgaggcagctttgtaattcaaagttctgaagatgttctcgattacctccaacgtttggtacccccccaaaacaaaaaacaaaaaaagtgtagcttctttgaaactttgaattgcagctgttacctttccttgagttgacatttttgcatgcatgctctgctctttgcttcttctgtgaaagttaggtgaaaagttggatcatcagaacgagaagcagg

SEQ ID NO: 37079 - DNA, 1143 bp, Zea Mays
cttccatgtttctagcaggctcttctgttgaatacaaaatgtctatctcagatgttgtggtggcacctccatttatctatattgatcaggttaagaattcactaactggtcgcattgaggtttctgctcagaatgtgtggattggaaaaggaggagcctacaccggagagatcagtgccgaacaactggtggacatcggctgtcaatgggttattcttggacactctgagcgtagacatattattggtgaaaatgatgagtttattggaaagaaggctgcatatgcattgagccaaaatgttaaggttattgcctgcataggagagctgctggaagagagggaagcaggcaaaacttttgatgtatgttttaggcagatgaaggcttttgcagtatttcaaactgggcagatgttgtaattgcatacgagcctgtttgggctattggaaccggaaaagttgctactcctgaacaagcccaggaagttcatgctgctgtacgcaattggctgaagaccaacatatcacccgatgttgcctctagcactcgaataatctatggaggttctgtgaatgcagccaactgtgcggagctagcaaagaaagaagatattgatggttttcttgttggtggtgcctctttgaagggccctgatttcgccaccattatcaactcggtgaccgctaagaaagttgcagcctgatgagccctgtctgttagaaataagtggtcatctgtgtttcaacctcacctgccacgccgtaaagcctgtaggaggtgatccgtgtgatggtgtgccgtcaccttcctgcctttgctgatttgcagcaccacggaaacagaaaataacgcaagatgtcacaattttttttttgttctcgtagtccgtagaccttgtgtacgttacgggagttcagttgcacgttggcgatgtacgtttagaatattcttttgctctgtccttttgtaaggggaaaataatttgttgacagacgaggagaaatgataagtgctttttttatgcctcggtacttgaactacaagttgtagtagaaatggtaagtgccttttttaagcataataaatttattttgtaatgatatacatgtaagttctaaaattgtacatataatcttaaagatc

SEQ ID NO: 37080 - DNA, 1215 bp, Zea Mays
ctcacctccaccaaacacgcatccacccgccagcactactgctgcgtggcaaaaatccctggatcagcattgtccaactccgacacgtctctctccctagcttcaatcttcagccaccgctttatataggatattttcctcatcgtgttcaacaggtgcttggaatcagcctcaggtttcttcctcccagtccgtaggagccacgtagctctctgcgtcttccatggtcacttctccggcgttactccagctcgccccgacccttgcgccttagtgtttatccatgctccatgccatggcttctcctaggtcgctctcttcgcgggccgtgatgcccctctgctcctgcctcgcctagcccttcggcgtccatcgcgtcctgctccttccattcgtatgctctggtgatcgtccaccccggcgtccagcgctgcccttgtctcttcgggttttgtctccccaacaccagtcggacgctccttccattcatatgctctggtggtcgtccaccccagcgtccagtgctgctctcgtctcgtcgggctttgtctccccaacatcagtcgctgcttcaactcatgttcgtggatgccgtatctacgactccgacactccctacacataatctgtgttttgtgttcatcgccgaataaaaatccctggcgttttggagaaaggaagatgaagtctgctcttcgatccctaggtgttcagtgttatgcgcgaaccagaaatcgttgccgatatcacggtcttcaagttgagtttattttattggtacgttaagtgatcacgtgatgtggaggaccagagctgagtcgaccacaagatgttgttaagcgtgggcttcttcgcaaggtgatgctgatggacgaacctaaggatggatgacctgatcaagaaccatgatgaagatgatcgtcaagtgaacgtcgtctaacaaacactaacgtagtgtttattccaggtactagatttgtgctactgtggatggtgttaagcgccaattggcacgaccttcttataagtctaagtacctctcctataattcttattgaggattgtcattgagctagcatatatttcaaaattataaataatttataacatttcaaagtttaattctttgaatcacttttgcaatcactccgataaacataatgtaaatttgttgtaacttgtaacttttgtaataaagaaattccgctgcaaaaa

SEQ ID NO: 37081 - DNA, 1329 bp, Zea Mays
cttcacgattcagccttgtgaactacccactttccaattcgacatcttcgccctcgaatcgagcttccctccaccgaatcgagttcctccatccaaatcgagctcattgccgccggatcgaggtctgcgtggatcgagctcgagctttggagaaggagaggaaacgggggacgggcacggggggagcaaggcaaccaaacgggtggagggaaacacgccaaacaggctcctcgatcgttccgggctcgggctgccacccgccattcggtgtcccctccttgacaggtgcccgagccgcgccgagctccagcctcatttccacggtccgcgccggcactcttccctctcccgatcgtcctcctcgtcgcctgccgcctcttccttcttcccactccactagcttcaggttggactgcacaacgtggagcggagatctatccgaacacgggattgattcatctggtggtgttacaacatagggtttttgatatagcaatgggattactcatgtataaatgaacaaagtttggagacagttggacctgacaattgccactttttacatgttttaactcattttttttctgggaaacaagtaattctgaagttaccttggaagtcctttgcgcttttgactggtcgggttgcataggccattgttgagaggtgatttggcctaagaatgggggctccaaaacaaaggtggacttctgaggaagaggctgctcttagagctggaatagcaaggcatggagttggaaaatggcgcacaatattgaaagatccagaatttagttccaccttatgctaccgctcaaatgttgatctcaaggacaagtggcgaaacatgaatgtgattgtcagtacatcgagttctcgtgacaaggcgaagtctgcattgaagagaatacgaactattcccaagaataatgagcacaccatggcaattaccagagttacttctgatattgatgatgagattgttgacgaaaagcctatagtatcattgcctagtgaagcaaagaacacatcaagttcgaagaaatctcacaggctagataatattataatggaggctataaagaacttaaatgagcctacgggatcacacagaactactattgctaattacatagaggagcaatattggccacctagtgattttgatcacttactatctgcaaaactgaaggacttgtccaccagtggcaaattgataaaggagctctggctttgaattaagacgaaaacaaagtttgatgtacaagaaaggcgttaacccatgcacgcgaaatggtaaatcacagaactaccatgagccatcgttgc

SEQ ID NO: 37082 - DNA, 455 bp, Zea Mays
ctggatttcctgtattttcgcatttgtattcaaatttgtgagacaagtttattttggaaaatagaacttgaaaatggaaagaaaggattaaaaacaacaaaaaggggaccttcaatactcgtcatgggccgaattcttccctggctcggcccagctcgggtcttcctcggcccatgtggccgcgcgcgctcacccactggcgtcgtgacccacgccgtcagccactcctctcctttctctcagtgtgcacaccgacggatgggccagtcgctcagatcatcttcctcctaaccacctgcgcaacaaccgcgcgcctgctgtggggtcgggcgctgggaaactcggacttggcctcgcgcttactcaaacttgagctaaccccgatctgtagggtccgcctcgctaggcgtatcctcttctccatccataacagccatggccaaactccatggccg

SEQ ID NO: 37083 - DNA, 504 bp, Zea Mays
gtcttggtgcccctgaaatccgggtgtgacacatacactcctgctccccattcaggcggagacccgatgctgccacgtggcatactatgcacggcataagccaacgggcgaacctagcatgacgcctctgggctatgcgcgccttcacattcattacggataagatgtgcgcctatccattccactaacagatcgcgtgctcagtccacgatacgtgggccgtgctattactcaccattactcgcacatttcgactatcaatgcaacatggactacgatcatcatgactcccgctgattactcatgcattactaaggcggaggatctttgtgtgctgttagtatttactattcacataatgtattcctaccattatgctcctgggcccgcatgtcggggctcagcatccttgtatgtgcctcccttaaactataaaagggaaggcacaccgcgttacaagggacaggtttagatacacaagctctcaagctcacagactctcag

SEQ ID NO: 37084 - DNA, 2244 bp, Zea Mays
atggcagcgaggagcaaggacgcgaagaaggtggtgcagtaccgggagtgccagcgcaaccacgcggcgtccatcggcgggcacgccgtggacgggtgccgcgagttcatggcgtcgggcgccgagggcacggcgtgcgcggcctgcgggtgccaccgcagcttccacaggcgcgagccgtcagcccaacaaacgaaaaggcgcatacgattcaggaaacgtgggccggagccaatgaacgtgcacatgcagcagcagcaccacctccgtcagctccgagccgtcctcctccgccgcggccaccccgtccccccaccgccggcgacccacccggaccctgaccgggccttcctcgccgccatccgtgccgccgcctcctctgccccacgcctcgtgctcgccgcctgcgcctgcctccgccgcgccggcctgcccgcaccggggccccgagcgcttccggccctgctccgctccgctgcgcgctgcgagggtgctggcgcgtacgtcgcggccacgcacgcgctggccgtcaggacaggggcactggacgatgggtttgtcggaaccgcgctggccggggcgtacgcggcgtgcgggtgcgtgagggacacgcggaaagtgtttgacggaatggccgtgagggacgtcgtctcctggggcgtcatgcttgatagttattgtcagactcggaactataaagaagctttgcttctgtttgctaagatgaagaattctggagttgttccagaccaattgatccttgctactgttctaccagcttgtggtcatataaggcatttgagaatcgggaaagccattcactcgtacatgttggtgtcggacatgattatcggcgctcacattagtagtgctctcatcagtttgtatgctagttgtgcgaacatggagatggcagaaaagctatataacgaaatgccaaggaaggacttggtctcatcaactgccatggtttctgggtacgccaggaatagaaaagtcgagattgctcgctctatatttgatgggatgccagagaaggatgttgtatcttggagtgccatgatatcaggatatgttgatagtaaccagcctaacgaagcactgagtctgttcaatggtatgcaagagtgtggtatcaggtctgatgaaattaccatgttaagtgtcatatctgcatgtgctaatttaggttccctcgataaagccaagtggatccatgccttcattaagaacagtgggttgaataaggtactgcacatttgcaatgctcttattgatatgttcgccaaatgtgggggtattaaccttgcattgaatgtcttcaatgaaatgcctctaaagaatgttatcacctggacaagtatgattagtgcctttgctatgcacggtgatgggaaatcttccttacgtctgtttgagcagatgaaagatgaaggcgctgaacccaatgaagtgacatttcttagtttactttatgcttgctgtcatgctggtctagttcatgaaggccgtttattgtttagctcgatggttcagcaatacgggattgaacccaagcatgagcactatggttgtatggtggatcttctaggaagggctaaacttatgcaagaagcagttagtctcatagagtcaatgcatttagagcccaatgtgcctatctggggatctcttttagcagcatgctggatgcatggtgatctcaagctcggcgcttttgctgccaagaaaattttgcagttggatcctaatcatgatggagcatctgtgcttttattgaagatatacatgaaatctgataacttgaacaatgctcaggaggtgaggggagtaatgaaactccacagggtctcaaaagaaacaggcttgagttggatggaactgaatgagccttttcatgagtttgcagctggaggtgaaaaacatccagaaagtggcaagatcttccttcaaaaagttgtgaattaaagatgcatggatgttgaggatatgagagaatatgttttgctgcatagtgggaaacttgttttttttcctgccaagtgatttaagtacatcgattggtaatatctcttgcatgggcagagactgtggaaggcaatggttatttttcaaatctgatgagcgagtcattcagcccactgcttgaccttgaactgaataccaattctcaagatcaactgtcacagaatatggtagcagcaccaaccgagagaccaaatcagagaagatcaaagaatttca

SEQ ID NO: 37085 - DNA, 2425 bp, Zea Mays
gctaccccgcgcaccagcaccagtagactccactactcccgccgccgccccagccacacactggctggcactggcagcaggtgcagccgtgcgagcgctcctactccaacaatccccttctcctctcgcggcccgggccggcacgggtcgcattccttcccgtccgaccgagcaagcaggcgcaggcgcaggcctcccaattcccctccccacccccaccagccaccaaaaaaagcgagcagcgcaccactagctcgccgagcaccgtacgagtacgatacgagtgcgcagcgaggaagcacgcgcgggaccggccgcgatgtcgacgtcgccgccgccggccacttccccgcccggcgcgccgcccaacggtacggcctcgcccactgccgcgccgccgccgccgctgccgccagcaccgtccaactcctcctccccgacgcccgcgacgccgacaggcgctccccccaccgctcccgcgccgccctccaccgactctccggcgccgccagggacgccgcccgccccagtgtccccgaacgcggccgcgctccccgcgcccggaagggcgacgccggcctcggcctcgccgccgacgccctcctcctctgggtcggggcttaccacgtccgtcgttgtggggatcgcggtcggcggcttcgccgtgctgctcctcggctgcctgttctgcctctgcctcttcaggagcaacaagaggagccggaggcggcaccgccaccacccgccaccgccgccgccgccccacctcttgcactactacggccacccgccgccgccgccgccgcctccgcacaaaggggatcagcaccaaagctggcagcataacgcccctccaccaccccctgatcatgttatcaagatcaattcacatcctacccttccgccgcctccgcataacgtacatagcagtggttccgcttcgaaccactcgggtggtgagagccgccctgcgctgtcgcctggcactgcccttagcttttcaaggagcacattcacttacgagcagctgatgacagcaacgaatgggttttctgacgctaatctgctggggcaaggaggttttgggtttgttcacaaaggagtgctaccagatggcacagaggttgccgttaagcagttaagagatggcagtggccagggagagcgcgagttccaggctgaagttgagattatcagcagagtacatcacaagcatcttgtatccttggttggctattgcatttctggagcccacaggttgctcgtctacgagtttgttccaaacaatacattggaattccacttacatggaagaggcagaccaaccttggattggccaacaagactaaaaattgctttgggttctgcgaagggattggcatatcttcatgaagattgtcatcctaagattattcatcgtgacataaaggcctcaaatattcttctcgatctaagatttgaagctaaggtggcagattttggacttgcaaaattcacttctgatgcaaacacccacgtttcaaccagagtgatgggcacatttgggtatctagcacctgagtatgctgcttctggcaagctcactgagaaatcagatgtcttctcttttggagtaatgcttcttgagctaataactgggcggcgccctgtaaattcaagacaagcggacgacaacctggttgactgggcctctgatgataaaagcatttgaggatggtaatcatgatgctctagtggacccccggctgggaagtgagtacaatgataatgagatggcgaggatgatagcctgcgcagctgcatgcgtccggcattcttcacggcggcggccacggatgggtcaggtcgtccgggcgctggaaggcgacgtatctctggacgacctgaacgagggcgtgcggcccgggcacagccggttcgtggggtcgtacggcagttcgacgtccgactacgacaccagccagtacaaggaggacctgaagaagttccggaagatggcgctgggcggcagcgggctccagagcagcagcgcgcagacgccgacgagcgagcacggggagaacccgtcggtgtcggtgtcgagcagcgacggcgacggcggcggaggaaccggcgaggagcgtgaagacagacggcaggcagcgtcgtgaggcgtgaggcgtgcccagcctacggcccccgcgcatgcatctgtagatcctagtcctctcgacatcgctacgtacatgtctaattgatagctgacctgtggccgggaggcgggactactgagagattcatgattgctttcttttcttttgtgtgtgtgattctcttggtgggtacactggtctcatgcatgcgatctctgtataaattcaccgactctttaggaactgattactattggctattcgtatattatgagtatactcagtgttgcacg

SEQ ID NO: 37086 - DNA, 1614 bp, Zea Mays
gtcctcgtggaggtacaggatcatcaacggcatcgctcggggcctgcagtacctccacgaggactcccggctcagggtggtgcaccgcgatctcaaggccagcaacgtcctccttgacaagaacatgaaccccaagatctcggacttcggcctggccaggatctttggccgagaccagacgcaggccgtcaccagccgcgtcgtgggcacctatgggtacatggcaccggagtacatgatgcgggggaactactccgtgaagtcggacgcgtttagcttcggcgtcatggtgctggagatcgtaacgggtcggaagaacagcaacgatggctgcgatctcttgaccacggtatggatgcactgggaggccgggacggtggcggagctggtcgaaccgacgagcatgggcggcagtttcccggagggcgacgtgctgaggtgcatccacatcggcctcttgtgcgtccagccagaccctgcggcccgaccagtgatgtcgtcggtcgtcacgatgctcggcagcgacacggtcaccctccaggctccgtccaagccgggattcttcgccaggaacaacagcgcctacacaaccgtgtcgacagtgccggtggatgcttagcctggccataggactgagagaccgtatccagtgcacatggtttgatggtgcacaaaatacacatattaaatcctgctctttcatgtaacatccaatggctcacacgtatctcacctctctctcactgctttttgctaaaatcccctcccatctctctcgtacctgctctctattagtttgctaaaaccccctctgctccatcctcgatggttcttcctggagaccaaacaaactgcaccgtcagtcagcttcccttgctatcacggttggccgacatcttctccaatgttgttgtgctttcaaggaagtgcataatatcagcttctgcaagtgtcacaacatgtcgctgggagagcagagagagctgttgagtgggggaagcagacagagctgctaagtggggggaaatagagagagtgtctgagtgcagggttcaattaaaacatgtcaaatttaacagtatccatggcacaatcaaaacatggcaatctgaaatctgcaccaccaaataagctaaccatacataacatgaactatatttaggtgccattcttggcaattttgctcttccgtggctttggtaattctttggctctcttgattcttttactccttcccttcgaaagaacattggttggtggatggatttcaatctcttgtggaattgtgcaaccaataaaggactcatattcttgttgacgagtttgtactgtggtaggcacaatttgaccaaacgaagtctctatgctcttcacacttgaaagcaagaaatccatgccttcttttgaactcttcgctctttgaatcaaatcttcaaccttgttccgcaccgctgatatatttttcctcctttccacctcattaggatcttcgggcttttcctccaataaatttccttcgtcgtcaaacacaatctctctaaagtcacatgttaaaaaaatggtcaggtaggatgtactattgtaatgattcaaagaagaaatacaaaacatgtt

SEQ ID NO: 37087 - DNA, 2719 bp, Zea Mays
ttttcctgaaaatgcacgcgccttctttgccagaaaatctagggggacagagagagagagagaaacgaaaaggatggatggaggttgctaggcatgcgcgcccgtggcaggtcgggccggtccgggggaaaagcgcttggccgtttgcagcggcgtggagtgggtgggcatcagcggcgtcagcggccgcggcagcggcaggagcagcagcatggtgctggactggactgataggtgggggggagtggcaggggccggcacagcctgctgcccctgcatccctgctcgttggcgtttccctcgatccctcccccctgccgctgccctgccccaacactggctggctgcccaccatccttcctctgcggagctcgcgtgactcccctcgctctcgctttcgcgctgcgtccgcggcggcatcattgggtgtccgtgtctggactggagaccgggtccgtcctccgtcggatagagaggggggcggggccttcgtctttcttggctgctggtttctcgaccactgccgccgcgtcttcctccctcgctgctgctgctgctgctgctgctgctgcggcggtattgcgcgttggagctggccactggtgttcgctcctcttccccccggcttgtttgctgaattcaatctgcggggttgcggccgcgggtgtcgatggggtggtggtggtggtgcctgccggtcgctgctctgctcgccgcgatcctgccgtcgtccgacgccacgctctcccctgccggcatcaactacgaagtggtggccctgatggccatcaagacggagctggaggacccctacaacgtgctcgacaactgggacattaactccgtcgacccctgcagctggaggatggtcacctgctcctccgacggctacgtctccgccttagggctgcctagccagaccttgtccgggaagctatcacccggcatcggcaacctcaccaggctgcaatctgtgctgttgcagaacaatgggatttccggccctattcccggtacgataggaaggctggggatgctgaagactcttgacatgtcagataaccagctcacggggactatcccaagttcgcttggaaagctcaagaacctcaattatttgaagttgaacaataatagcttgtctggagttctgcctgattcacttgccagcattgatggttttgctctcgtagatctttcgtttaacaatctcagcggtccattacccaagatttctgcaagaacctttatatcaatatgatccagaagtttgtttgggccatctgaagcagtatgctttcaaggagctccgtgcagctactaataattttaactcaaagaacatcttaggtgaaggtggatatggcatagtatacaagggttatttacgtgatggctccgttgttgctgtcaaaaggctcaaggattataatgccgtcggtggggaaattcaattccaaactgaagttgaagtcataagcttggctgttcatcggaatctcctacgtcttattggattctgcactacagagagtgagaggttacttgtttatccatacatgccaaatggaagtgttgcttctcaattgcgggaacatatcaatgccaagccggctctagactggtcaaggaggaagagggtagcgctaggcacagcgaggggtctgctctaccttcacgagcaatgcgacccgaagataatccaccgagacgtgaaggcctccaacgtactcctcgacgagtacttcgaagcgatcgtgggagacttcggactggcgaagctcctggaccacagggagtcccatgtcacgaccgcggtgcgcgggaccgtcgggcatatagcgccggagtacctgtcgaccgggcagtcgtcggagaagaccgacgtgtttgggttcggggttctgctagtcgagctggtcaccggacagaaggcgctggatttcggaagagtcgcgaaccagaagggcggagtgctggactgggtcaagaagctccatcaagagaagcagctaggcgtgatggtggacaaggacctgggcagcagctacgacggggtcgagctggaggaaatggtccagctggctctgctatgcacgcagtaccacccgtcccaccggcccagaatgtccgaggtgatcaggatgctggaaggcgagcccgggctcgcggagagatgggaagcgtcgcagagcaacgtggacacgccgaagtccgtctcgtcggagctcctgcctcccaagtacgtggatttcgccgccgcggacgagtcctcgcttggcctggaagccatggagctgtccgggccaaggtgaccgaccatctggttgccaaggtcggtcatcgcacaggacaggacgcataggaaaacctatggttgtattgcattggagtcggttaggtgtagagagcccccccgacacaagggaaggcgtcaaattttctggtgggttgtaagggtgtgatctttctgtatatagctgtggtggcattcatcgtagtattgtacatacagcagcgctgtgtgaggtgagtcccatccttgttgcggcgcatctacttggtggcaaagagatgagatgaatgagtatatagaaattaaagttctcagtgcagtgcggttggtgcctgtctgagtttttgcttgctgaaggcgtgcgcagcgtagttggcatgcgtcagtttgtttgacgcataagctcatcaaactgtaacaggg

SEQ ID NO: 37088 - DNA, 2755 bp, Zea Mays
tcgttatccacccctacatggggacagtaagagattgtattgagggtgaaacaaggagataatccaacatttggattcttgatgcctgatcatcatctccacatctacttccgctaccttgttgatcatcctcaactgctgaaagatgacgctgatgctgttggcacaaataaaggtagtactgagagggagcatgcttcatctggtggggctttatcattgcttgggaccacatatgactcaggagatgaggatgaaggcacactcccacgtagttcggaaagcatgaatcctagaaatagcatgacatctgaggccctgatgtgcagggccatgtaaaacctgcatcaattatgcctgacaaagaagaactaggcaaagatcagactgctcctcttcatgcagttaagagtaaaacaatattgatgaagaagaatctgattcttactggccacatcattgttgttcagcgtgaaaaggttaatgacacaattacaacataaattacttccaaatcacataccaattcaggcttaactgaaacaaaagaaatgatccttgaaccaccatctttcatgaaatgcacgatgtagaaaataattgagtttattctgacaaacgggaaggagtttgaagaaaaactgattgagcaagacagaacaactgggaggtttccatttcttatgtcttctaatccatgtcactcgtattatctaaagtttctccaggaaaccgaagagtccaagtcacatggtagaagtcctaaccacaaggacaaaagagattcttgtgaccggaggaacagaagaaatcctgagagtgacgacagaagctctcttgagtgcgctgacaacggttctcgtgagtgtgccgactgaagatgatcaatggagcgcaaaaacagcagttatggcatggtatccaatatccattgcttctgatagaagctcagctgggccatcagagaagcagctgtatgacaagcaagggaacagtagattccatctggttgtggggttaaaactatctccagcagcttatctatccccatacatatatttaaactctattttgcgaacagtgcaaaacaatgtttttgggtaaactataaatagactgctgcaaacggtctaagaaggaacctattcggaaagtcaatgtaaatgaagcggctgctatagtaatggtaatggtggctacttgtggactgggtgctgcaaatgactcacttaacaccatgaaaggaaccaaggacaatgttcgcacccattttagtcatgatccttcttccagctttggatatttctcatcttaacaggatcaagatgcactgtccgaacgcatttcaaatggtgaggctgatgcttcacttacaggtagtggacacaaccccaaagggaacgttttggaattataaattattgatgatgattggattgcaaacactattgcaaaagctgctgctgcagtagcctccaaagaggcagattcttcagaagcttccatgacaaaggagcagaagctgaaagctgagaggcttcgccgtgcaaagatgtttgctgcaatcattaagagtggagacaagaagatgaatgatttagctgtgtttgctgcaatcattaagagtggagacaagaagatgaatgatttagctgcatcatcggatccaactagtgaagctgccaaggcaattcctgatatgaatgtgtctggacttgatcagcaatctgtggctaaggaacgtgaaggtagttctgatccgtttgaacatgagggaccaaacttgacaaatcataataaagactctgatgatgaaccaaacagagtgcggaagtatagaaagaaacatcgagaatcccatgaggaaaaagatgaatcggaggatatctataagcactcgaggaagaggcatcacccagagcattcaagaggccctagcaaggatgttcacaaacataagcacaagagcctcaaggtcgcacagaagtgtccgcgtctggatcaggtgccaagtttgaatcagacaagctgctcgatgacattgcacaatcaactcaggtaacaactgaagtgccgagtgaactgagagcaaaaatcagagcgatgttgctcgagagactgtagtattcaacgttatgtccttaggcctctgatctgtagccaactgctctgtcgatttctgtatttgcttcgaacgctccaactgtgcccattttacttgaaatcagtgacctgcacgccaagttcgttggcctgctccacatgttgaagtttctgctgcacgcataggtttgaacgtcttgaactcttgatgaatcagtggtccgcctgcaggctgcagcgtcatatttctacgggatatttctagcggatttctgcactgatggaataattaatgtggtcttcatgtggaggacagcatctctgttttgtggtgttgaggacagcagcatcaacagtcttttgactgttgtaggacagcaggcagcagcagtctttttgactgtactttagcatctagagtacaacacatgtgtgctgcagtagcatctaaaggataacatatttgtgctgcagtgtgtagtgtggtatgtagtgtagtccctagagctataaataacccttctaaaggtatgttattttgagtagtgtgtgagtaataaatcaaaaattgcttcaactcgtagtgtcatccgagtaagaattccattgcttacaaagacaactattttgttctattatagtgattttagtg

SEQ ID NO: 37089 - DNA, 1652 bp, Zea Mays
ctggaggcttcctgcgtcgcgtggaggcagacagagctcagggagggagggaggggaagaacgaagcagcagcaacagcgccatccgctcgcttccttccccttctctccctcctcccccaccgccggcgtcgcctctacgcgcgcgcgccccgccgggggctgccgtcgctgcacccgtggcccgtgggcggcggccgcgtacctgtacctacgtgctgccgggggggggggggggggggggagctacgcgtctcctctcgccatggacgccggtgtagagaagtgcggcgacgcggcggcggagggcggcggcgacctctacgctgtcctcgggctcaagaaggagtgctccgacgccgacctcaaggtcgcttaccggaagctcgccaagtactctccgacgccaataaacggctcctctacgatgtgggagtatatgatgacgaggacgacgaggatagcatgcaggggatgggggacttcattggtgagatgacccagatgatgagccaggtgcggccgatggcttaaaaaagacggaattgttatgaaagctccttatcctccatggttttttgtggatactaaaagctgaacttttagaggcaggaaagctttgaggagctgcagcagctttttgtcgacatgttccagtctgatattgattcaggattctgcaatgggactgctaagggccatcaggttcaggggcaagccaaaagtagaacatgctcaccacggtcccctcctactactatagtaaaggaggcagaggtgtcatcatgtaatggcttcaataagcggggttcatcagcaatggactcaggaaagcctccaaggcctgttgaatgtggtgcaggtcagagccaggctggattttgttttggggtgagcgacacgccaaagccgcgaggtccgaacgccaaccggaagaggaacggccggaaacagaagctgttccccaagcactacgttacatccgaagatgatacggccggttcctagcatcagcagcacggtagcagtttgaccgttggctttggtgatgtcagcagtagggagggcacatcatgtcgcctctgccagctgctgtgatctgaagaggcgtttagctcatcatatgcctttagtcttttgagaggtctttagggttgaaaggtacttcgaaaaccgaaccagcgtctacaggcctaagagggatttccattgaaactcgtcgatgatactacagttttctttccccatctgtgccggttgtgttgtactaccactaccagtgacagtgagtgacttctaagctattcatttttttaactggagaagttgataccatgataattaaaaaaaattgggtgtgtattgaactattaccaagaaaatagtacttggattgtgatgttctgaacattatgttttgtaggcaatcgtgacttgaaagcggtcgaggtatatcttgttattttgtttccctccgatttttcaatatccgattgattttgttttgaagcaaatagagagcatgtccgtgagaatagtcatgaagcaaatagagaacatgtccgtgagaattgtcggttaatataatttttagtttttaatttgtacatgccactcttgagaaagatctctctcaagcttgtccatgtgcgt

SEQ ID NO: 37090 - DNA, 732 bp, Zea Mays
ccataaatattctagacatctaaaaattaatctgaacaacattgtaactttgtaagcgacatggcacggaggatagtagattgattatgacttctaggagtgcaaggtacatgcatatataggcaaggatgtggagggtttagtttgtacaataacctataaataacgctgaaggaggaaccatgcaaattatatgtatatatcatgtgcagcctggcatggtcacaacagatcttcttatgtctggtgcaactacaaaacaagcaaaaattttcatcaatatattagctgaacctcctgatgtggttgcagactaccttgttccaaacgtcagagaaatccctaccaagcaatccatgaagccaacctacattcgtttcctcacaggcttgaaggcctactcaagaattttttctagacttgcttttggtgctaggagaaacaagtatgttactgaagattagttatgctgccagcttccaactgaagagattaggaacaattcttttcattaagcgtcacttacttttctcataagatgggatgtattacagatgtcatctcatgagaacagtgatatactcttctgtacagtagtagcaatttttttagtaaatgcataggaaaactgtgcatcaatatatcaagaagaatatagaaataaggtctaaaatagaccacaacatgataaccacctcacctcacgaatatacaaaagagtccatctaaaaa

SEQ ID NO: 37091 - DNA, 2205 bp, Zea Mays
ggaaacggactaccagcgctgagccgttccgtttcttttcaatcttggcgttttgtctccattcaatagggaaagggatgtttcgcttgaggctttcctttgtgcctgtgtcttctctgtagctttcaagagaataaaaatttggagcttctctcgcaccagcgtcctttccttcttccttggtttcatgctgacaactagggctgatcttcaggacggcctgttcttggttcggttcctgagagcgattgatagcgccagacggagtttcttctttaggagtcgtgcactatgggtaattgctggtttaaggggaatccatactttaacagggtttcttccaatgcaaccaaagcagaatctcccaaaattcagagcccctcggagagaactgaaaaggaggattgccagctaccatccaacccgaaagaggtggaggcgctgagaaaggatacagctcgcaatcctttgatagcgttcacatttgaggagctcaagagaatgacaaaaaatttcaggcaagattcgttactaggcggtggtggatttggcagagtctacaaaggttttatcaccaaggatctccgcgaagggttagagatagaagagcccacaagagttgccgttaaggtccatgatggtgacaatagcttccagggccatagggagtggctggctgaggttatatttcttggacagctctctcacccgaatttagtgaagttgatcggctattgttgtgaagatgaccacagggtccttgtttacgagttcatgcctctaggaagtgtggagtctcatttgttttcaagtaattcttatcctattcttgacagattgttgattggttttatatagtttcttgtcattttgtcataacactgactatggtatatccacacatggcattcatgcaaattctcatactcataactgaaaagaatcgattgaaaacgagcataaacctgtccctcactcctatcctgaaccagtataatttaacttgcttcgagtggcagcattataaatttctgcatgacctatgtggtcagttctgcattattatttgtccatttgagatccaccagtgtatattatcagatcagtggagtatttgttttcataatgcaggggttatggtgccacttacgtggtcgatcagaatgaaaattgcgctcggtgctgcgaaaggacttgcttttctgcatgaagctgagaagcccgtcatctatcgggacttcaagacatcaaatatattactagatgaggaatataatgcaaaactatctgactttgggcttgcaaaagatggaccagttggcgataagtcccatgtttcaactcgtattatgggtacctacggttatgctgcaccagagtacattatgacagggcatctaacggcgatgagtgatgtctacagctatggtgttgtactactggagctcctcacgggccggaagtcactggacaagtcccggccagtcagggagcagatgctggcagactgggcactcccattgttggcacagaagaagaaggtgcttggcatagtagacccaaggcttgccgaggactacccagtgaaggcagtgcagaagacggcgatgctggcgtaccattgcctcagccgcaacccaaaggctaggccgctgatgcgcgacatcgtcgcgactttggagcctcttcaacagctggaggagacccctggagacagcgtggcagtgacacttgaagggacttgaagcagtgttccattcacagctcacatcacagtcacacacagctctggaaaactcgggtgccacgtacttaactatgcatgataatagtagctagctagtgttcttgatatgcaggatgatttcttgattgtttaattaatccatggagacagtagctttgttcagcagaaagttagtgtgtatctcagtaggacggttcatgtgtgtgtatccaggtgttcagtcctggcgtagcgaactccctggcatttcggatgcgggcaagtctgtgcaatctgtatttgcaatgcttgttgcccgcagaggaagcttgcttaccagtgtttgtaacctagtattgtgcagttcatgatctatgcatgttgaataatgtgtgtgtatatatatatataacaggtataacgggagcactgagcttccaatagttaaagaaagcctaagccgaccaaccctgcaacct

SEQ ID NO: 37092 - DNA, 1532 bp, Zea Mays
gcaactctctgtgtttccagagaaaaaagcaaaacctttgtcaaagtcaggtatatatatgtacatggattcatatttattaccaagtcatatacttcacacatgcagatagacatcgttgctattgaacttggttacatacactgtgtcagaaattaaaagcacacaatagaagcgtaaaggtcacagacgcgggtttgccgcatctcccatagcgcccacatatctcactatgatgaccgcaatcacaactctcttataattgatgtttagtttacaaggtatggcataacctatggacacttaaccacatatataggaactgaaaactattgtacatgaagattagaattactcatagctaaccttataagtacaacaccactgtgctcccgcaatcagctgatcagcagaactgcagaatacgtacagcagaaagagaatggcttttcgtacagcgaggagttgatcatgaacaagctattgtatttgcataccttgtgctcctgaggtacatgttgtcactgtacagatccagctccttacatgccatgcacggtcaacaagagcaaactagcaaactggccggcagcgaaaagaagtaaagaacttgtatgcagggaaatggtaaattcctaacgccccgtttagatccttggaatcgaattccgttaatttagacaaacattaattaagctaacggggcgtttggatcccttcattttagaggaattggaattcactcaataaagtaacttatttagtttggattttgacattccaccactttccaaagttcagatataagcatatctcaaattcatggggtagagggtgagaaatgattttatgcattagtagaatttgtttctactctgtaacttgcatgacactcttcgtttcactcctctatagtaaaaatgtagcacataaatatctccgacatcttgctaataatagttgtcggggaccataattaggggtaccctcaagacgcctaattctcagctggtaacccccatcagcataaagctgcagaggcctgatgggtgcgattaagtcagggatcagtccatacgagtgactcgatcacgcttcacccgagcctagcctcggactcgggcagccgccctcgagggacttccgtctcgcccgaggccccccttttaacggcggacacatctccggctcgcccgaggccttggcttcgctaagaagcaaccctgactaaatcgccgcaccgactgaccaagttgcaggagcatttaacgcaaaggtggcctgacacctctatcctgacgcgtgccccccggcagagccgaagtgaccgccgtcactccgccgctccactgaccggtcagacagaaggacagcgccgcctgcgccactccgactgcagtgccactcggcagagtgggtctgacaggcagtcagacctcgccaggggcgccatagggaactccgctccgcccgaccccacggctcggactcgggctaagacccggaagacggcgaactccgctccgcccgac

SEQ ID NO: 37093 - DNA, 1832 bp, Zea Mays
ctcagatctaatgggccaaataaactgaaaagcccattcctcaactaaaactccgaaagcagaaatcattcacgcatcggtccaccgagccacaccacaccaccgtctcgcggagaaactcctccaaaacccccaaaccctttcaatcggcggcaatggcggcgccggtggccgacgatgcctcggcatccccaggctacgtcctccgctccacacttgaggggcaccgccgcgccgtatcaacagttaagttctccccggatggccgccttctcgcctccgcctccgccgacaagcttcttcgcgtgtggtcttcctccgatctcacccccgttgcggagctcgagggccatggagagggtgtctcagacctctctttctcccccgacggccgcctccttgcctccgcctccgatgatcgcaccgtccgcatctgggacctcgccgtcggcggaggggcccgcctcgtcaagacgctcacgggccacaccaactacgccttctgcgtctccttcagcccccatggcaacgtcctcgcctccgggtcctttgacgagacggtgcgcgtgtgggaggtcaggtccggtaagtgcctccgcgtgctgccggcccattctgaacccgtcaccgccgtggacttcgatcgcgagggcgacatgattgtgtcagggagctacgacgggctctgccgcgtctgggactcggccaccggtcactgcgtcaaaaccctcatcgacgacgagagcccaccagtgtcctttgccaagttctcccccaatggcaagtttatcctcgcggcaacgcttgacagcaccttgaggctttggaatttctcagctggaaagtttctgaagacatataccggacatgttaacacaaagtactgcatcccagcggcgttttctatcacgaatagcaagtatattgtcagtggctccgaggacaaatgtgtctacctatgggacctccagtcaagaagaatagtgcagaaactggaaggccatactgatactgtcattgcggtctcatgtcatcccaaggaaaacatgatcgcatccggggcgcttgacaatgacaagaccgtgaaagtttgggtccaaaaggaagaagattgatgagcggcctggttacgctcttatctacattggctgtcatgtggactgactaatggtaagcaaaatatgcagcttcccaagcaactaaagtttgctgcagtggagaatgtgatgctcctggcatgtgtaactgagtgagtgctatattgtctattcagcagctcggcgatgatattagtgaactcaagtgttctgtagagctattcctgggaggctgggatcatttgtgcatcgcgttggattgtcccacataaaccctgcctaacctgcgcagcccggcccggccaagattaggcagcagattgggtcgccccgatctggccgcttgggagtcactagaatgaactgcatcggccatgcaagcaacaagctagagtcatcaaagccaaatattggtcacagtctaaacgctttcgttgcatccagtcaatggcctaactatgctgccgcgggtccggatggagtaaacggtatacccgggattatggcttatggatctacttgtgaaagaaaatgagaaatatctttgcatgttgagtaggctgtgttgggcttatctgcttacagatgaatgggctacttttctttcttttaattgtatggtaacggcccattttcttgtaacacttgacgtcttgacatatataaactgcaacgcgtgagtccgggtaatctgactacccgttttactcagtacttcttttgtttacaatcttc

SEQ ID NO: 37094 - DNA, 2250 bp, Zea Mays
aaaggttacatctaaatatggaataatgccgtacaatagcaatacctagctacaaacacggcgccttgggtgatgcgtgcatgcatgccgctggcgctgaggcccgcttgactcgcagcggcaggggcggacgacgcgcgcacgacggcttggctcccgcctccccgcgcgcggcaagccggcaccgcaatggcgctccggaccttccctccccgcgtcctcctcctctccgtcgtcctcctcgctgcccccgccgccggcgccggcactggttcggagttcgacgacggcacctcgcccaagttccccggatgcgacaacacgctgcagaaggtgaaagtgacgtactgggtggacggcgacgagcggagcagccttacggggatcagcgcgaggttcggcgcggtcctgccggacgcggcgcccgacgacgagaagcagcgggccgccgtgcccagccccgagagcggctgcgccaagtcgtcgacgccgctcgcgggctccgtcgccgtggctgtgcgcggggagtgcacgttcatcgagaaggccaaggcggccgaggccggcggcgccgtggcgttgctcctcgtcaacgacgaggacgacctgcagaggatggtctgctccgacaaggactcgccgcccaacatcggcatccccgtcgtcatggtgtccaagtccgccggcgacaaggtgcagtcggccatcggggacgggtccaaggtcgacattctcatgtacgcgccgctgaagccgtccttcgatggcgccatacctttcctctggatgatggccgtcggcacggtggcctgcgcttccgtgtggactgtcgtcgtcgtcggagaagagcctaccaagcagggcgacgtctccctgggtggggaggagaaccccgacgccgaggtcgtggagctgcaagccaatacggcgctcgtgttcatcgtcacgtcctcgctcgtccttctcttcctcttcttcttcaactccaactggtccgcctggctcctggtttgcctcttctgcctcgggagtctccaggtgatgcgtacccaagaatccgaatgctgcttcagctgattgatgcacactatctctgacttctcgtctgcttgggcccagggtatggaattcgtggtatcttctctcgttgtcaggtgtgtgcacctacgtactgcatgataactgcctgtttgctctgcaattcttgggcctagccagttcttgcgtcgtctgcctgcgtgttgcagactatgccagcggtgtcgcgaggccaaagtgaagcttcctgctctaggaaacgtgaaggtggtcacgctagtggtcctgccgctggccttcatcttcgccgtcacctgggctgcacaccaggactcgccggttgcttgggttggtcagaacctcatgggcatctgcatgatgattctagtactgcaagtggtgcacatgccaaatataaaagttgcgtcggcgctccttgtctcggcctttttctacgacattttctgggtcttcatatcacccctcatattcaagaaaagcgtcatgatcacagttgctcgtggcagcgatgacgggccgagcctccccatggtactgaagatgccgaaggagttcgattcgtggaatgggtacgacatgattgggttcggggacattctcttccccggactgcttgttgctttcagtttcaggattgtcatgcacatacgttggcttgtacctgatgaacagcgggcagccagctctgctctaccttgttccttcaacactaggagttatcgtcctgcttggagcgaggaggggggagctcggtcagctctggaacgccaaggtgtagcctgcctgggaggcccgtgcatatagctgatacgatgacactggttgcaggcttcaaatgggctttggtttagctagacatgcatctgatggttttttggtgaaattatgccaagcatcagcatgatccatggttaggaaatttctttgttattagagtacacaacacacaccacacatacgaaggctggttggtttgttactagcctgctgctgtagggcacactgcacgtcaaaatccctagcgtgatgcaaatttcagcaaaatttatagacagatatgcatcaataatacctactatatcaaagtagtttttattgagcctatcagaaaatatatgtttagttgtgtgtttatttggttagtaagagcctctagctagatcgggtggtttgagtagcacttctaggttg

SEQ ID NO: 37095 - DNA, 10473 bp, Zea Mays
tctttccagaagaactccggagtccggatctctcccctcgcactcctcgatctgactgttcaagaaaaaaaaccccttgatcggaagaaaaccgaccgggaacattttatcctgtcctgttgcaattcccctcacgcgatctcgccgtgtccacttctatcactacctggccacctggggatcgggttgggctggattggatttccgaaccgaatcctgcgggctcgcctcgcgtcgccgtcctcttcgccgcggaggtgatgcgctgttgccgccgccgccgccgctagcgccggatcgggggcgatgaacatcgtcaagggcgtcgccgatctcctccgcaagtcgacgcccgcctcgccgggggccggcgccggcgggggcggcggaggcggagaccgaggaggcgtcgggtccccatccgccgacaggctcgccgccccgccatccccaagggtccgcttcagtgacaatggtgaggaaggagtccttaatgcgctttggcacaagtatgagagtggcattgacaaggctgagaagaagaagactctgcaaacatttgtcatgcattttgtaaaagcatttaaagattgggagccaggctatattgagcaatcaatcgatcatgaatcgttatcagatgatacaattttaggatgctctactggtcatccttctgaggtcatccttattctcattcaagagatttctcaaataacttcatctatcactgagagcagcagctgtccagaatcctctgctaacatttcggagttattgggtgacctgggattaaacgcagaaggtttgacaattttagagtgcttgacaattctcacgcgctcagtgcataactgtaaagtgtttagttattatggaggtgtgcagaaggtcactgcacttttgaaagccgcagttgtaaagctgaagaccttgaccagcttgcttgccgcagatgaacaactgtcaaataaaactgtagagaacatgaggacgatgcaaaaggttcttgtgtacattgttacaataatttcaaacttcatggatctggaaccaaatacaacaaggatttcacagtttatactaaacagctccaggcataccctatcgagcaactatttggccacagttgctccaaatacttccaaaagcatggtttttgatagaaattggcagaaaaaggccattgtttcagttatggaagctggtggtgtcaattggttagtagaacttctaagggttattcgaagattgaatttgaaagagcagtggactgacttgtcactccactttataactttgtactctctgaggtcaactatatctgaaaatgttcgtgcacaaaatcatttcagaagtatagggggactggaggttctattagatggactgggactgccatcaagcaaattttcagtctcgaagcagtcttttgttcccagtgatgaaaggagtggcattctccagctccagatactatatttggaaattctgagggaagcagtgtatcctgtcccattatttttaagtgcttatcatcagcaaaaaattcttaatgctcaggccatcctgaaagctgataaagaaagcactgggccttcaccaacattggaatctttctcaaatcctgtagatattcttgatacatcagaatggaacgagtattctgtaaaattaagcataacactttgctcatttctccttcctcccaaggagatcaaatactgccctgctccaactgatgttacccaaatttcactatccatctcattggcttactgggagcaatgtgcaaggtggattataaaggttctttcaacagttttcccgtgcatgaaagcttgtgctagtgaaactgatttgcctaaccatataaggattttagcaaataccatgcagcattacatgctttgcacgtttaggaaggttcttatttcagcaccagctctacttaaatcttttcgagaggagggtctctgggatctgatattttcagagaaatttttctactttggatcatctttggactacattcaacagaatgatcaacttattgatgctcccaaatcaatcgattccaaaagtttcagtgaaaccgatgtcaacgttcttcaagcagaagctatttccttcttggagtttgctgcaacactcaatgaaaactcaaataacttgccagaatgcttagcattggtaggtgcacttgaacattgtacctatgatcctggattggccggtggtattgttaagagctttcacgtgatcctacaacttgcaactgaacaaactctagcttctttcaagtcaattgatgtgctcactagagtcctgaaggttgcatgccttcaagcacaagaaataaggaagctgtcccaagatgacttaaatcaaaatggttctcaatccagaaatgctcagacgacttattcagatgagagaattaagaacacttgtgcatttgtgaaactggctttcaaccttttcaaggagtatgccacaatatctgacattggaaggattacagttttatgcaatgctaattgcatcgagtgtttatttgatttgttccaagaagaatacctcaggaaacacatattggagcaagtacttgccttatttaggttaccttcgtcatcagcacaacaccacgcagcaaagatgctactatgctccaaatatcttgagactttcactcgtgcaaaagaaaaggaaaaggcttttgcagaattgtcaattgatctattagtcaatatgagagaggtcataatgatagaccgtgtgtattatcaaaatctgtttcgcaatggggagtgcttcttgcatatagtctctttgctgaatggaacttttgatgaagcagttggggagcaattggttcttaatgtccttcggacactgactgctctacttgctgaaaatgatgagtcaaaggctgccttcagattgctggtcggtgcaggttatcaaacactgcaaagcttgctattggacttctgtaagtggattccaagtcctaaactcctggatgccctacttgacatgcttgtcgatgggacatttgacataaatgaaaaagcaacaataaagaatgaagatgtgattatgctattaataaatgttctgcaaaagagcagcacttcactccagcattatgggcttatggtcttgcaacagttgctcaaggggtccattacaaatagaacttcttgtttcagagcagggttgcttagtttccttcttgattggtttaaagttgagaaagggaatgacattgtaatgaaaatcgcagaaataattcagatcattggtggacacagtatttgtggaaaggatattcgaaaattttttgccctccttcgtgacgaggagattattgcaaagcagcagcacagttcattgcttttgacaagtgttagtcacatgctcaaggaaaagggtcctgaagctttctttgagtttagtggtcatgactctggcattgaaattaaatcatcagttcaatggccttacaataaaggtttatctttctgttgctggctaagggtggaaagtttccctgagaagggtttgatgggtctttactctttcttcactgaaaatggaaaaggatgtttagctatgattgggaataatactctaatctatgagtctgtcaatccaaagcatcagtgtgttttgttatctctaagcctccctatcaagcaatggaaattcctttgtgttactcatacaattgggagaaccttctctggagggagtcagctgagatgctatgtagatggcgatctagtatcaagtgaaaagtgcaggtacacaaaagtaaatgaactaatgactcgctgtagtgttggtacagaattgatgcccatcggtgaagaaccttcttctcttggctttgagaacactcttgcttttactggtcaaatgggccctgtttatgcattttccgatgctctctcccctgaacaaataaggggcatttataacctaggaccaagttacatgtactctttccttggtgatcagaatttgcttacaaatgatgactcacggtacaagggaatacttgatgcaaaggatggcatttcatcgaaaatgatttttggcttgaatgcacaggctagtaacaatcggactttgtttaatgtatcatctgcactggatggtcttgacaagagtaagtttgaggcaaccaccatgggtgggacaaaattatgctcccggcgcctgctgcaagaaataatctattgtgttggtggcgtttctgtatttttccctcttctgatccactttgatgatgctgtggttcagaatggagagtttgccaccagagatcaattggctggtcaagttattgagcttgttgcatctgttctagatggaaatatagcaaatcagcaacagatgcatcttctttctggattttctattttagggttcctgttccagtctgtttcaccgcagctgctaaatatcaagactctttcagcatcgaaatacatgtttactattttgaagacctctagcatgtcagatattctattgagagatgctctttcacagttttacttgaatccacatatctgggcatatgcaacctatcaagtacagagagaactttttttgtttctgatacaatattttgaagctgatgggaaatttttaccagtattatgtgcgctccctaggatcattgatgtcataaaacagttctactcggaaaagctagatccaaggttttctaagcctttgctggtaagcaaaaaggtgactggggagagaccaagcatggaagaaattcgcaagatccgacttctcctgttgagtctggcagaaatgagcttaaagctaaaggtttctcaacatgatatcagagctcttgtttcctttcttgaacgaagtcaagatgttgcatgtgttgaggatatactccatatgattatccgcgccctttcacagaactcgcttgtaccatctttcttggagcaagtaaattcacttggtggttgttacattttcatcaatcttcttaagagggaatttgagccaatccgcctattgggccttcagcttcttggaaagcttttggttggggttccatctgagaaaagagggccaaaaatttttggcctccctgtaggacgacctagatccattgctgaagatataaggaaaggggcaacagcagcacctcaactgtttttttattcaatatctgatagacttttcaaatttccactttcagatcatttatgtgctagtctttttgatgttcttcttggtggagccagtcctaagcaggttttacagaaacgttcccaatctgatgctttaaaagataggagcatggctcctttttttgtccctcagattctggtttgcatttttaaatatattcaatcttgtcgagatgcttcagtgcgtacaaagattttaagtgatcttcttgatttgctggattcaaatcctgtgaatgttgaatcccttatggagtatggttggagctcttggcttgaaacatctgcgaagcttgatgtacttaggaactacaaatcgaattctgtagccaaggctgacggtttggagaccaatgagctgattcttgtgaggaacatgtattcgttggttctctcctattgcatattctctgtgaaaggtggctggcatcaactggaagatacaacaaatttccttctactgaaaattgagcaggggcagttaccaaattcctccatgctccgagacatttttgaagatctcattggaagccttcttgagacatcttctgaagaaagtgttttcaattctcagccatgccgtgataatatcttgtatcttttaaatcttagtcatgaactctttgttgaccaaattggaattaaactcttgtttccttcacctgacatgtctgcacatttgtcatctgatgacatcaactcggcagttctagaaattatgaatactgagggcaatggtctgcttacaagtcttccttggagtaatatattatttaatgatggagaaaagttgactgatgattggtggagcttttttgacaagatatggacgcttctgtgctatttgaatggcaaaggccaaaccagattaacaccaaagggtttaaatacagctggaccatctattgggcaacgggcccgcggattagtagagtccctcaatatcccagctgcagaaatggctgctgtagttgtaacaggaggcatcagtagcgcattaggtggaaagactaacaaagttgctgacaaagctatgatgctaagaggggagagatttccaagaattatcttccatctcatcattatgtatctctgcaaagctggcttagaaaacgcatccaaatgtgttcagcaatttatatcactgctccctaatattatctctgaagatgatcagtgcaaaaatagactgcatttcttgatttggtccttactaagggtaagatcccagtatgggcaacttgatgatggtgcacgtttccatgtcatgtcacacttgattcttgaaactgtgatctatggaaagtctatgcttacaactaatatagtaggcagagatgattctactgaagcaaataacagtaaggaggctgggttcattcttaatcttgtacagaaggaccgggttctcactgcggctactgatgaggcaaagtacatgaaggatgcaattgctgatcgcatgaagctggtccaggaactccattctaaacttgatgaacgctcaattcaagacgttgaacaactgcaaagttttgaggatgatgtacagtttgccaagactgctgctatagctgcggacgacagtagaaaagcagctttccagctagcatttgacgaggatcagcaaattgttgcagacaagtggattcatattctccgtgctctgagtgatgagagggggccatggtctgctgctccttttccaaataatattgtgacatactggaaacttgacaaaactgaagataaatggcggcgccgactgaagctcaagcggaactataagtttgatgagtgcctttgtcatccatcatccatcaaatctagtaacgataatgctgccccaactgttgacccatctgctaatgccaagataacagaaaaaatgaagcacttacttttgaaaggagtgcgtggaattacaggggatatcagttctgaatcatgtgaggatagcaacgacatgattgatcctccccagaatgtcccgccagagaaccacactgttagtgatacttctgattctgcagattcctcagattatcctgctattgttcaaaatagaaaagaaagttcatcaaccagtagtgataatgattatatcgaggtgctatcatcagttcactgtgttcttgtaacccccaaaagaaaactagctgggcaattgactatcacacgaaatgccctacatttttcttttgaatttctagttgaagggactgggggatcatctgttttcgacagatttcatgataaaaaagattcagactccaagaatgagatgggaggtgtggaaaaactgaagggcaatcttgatggaggacgaggcaatgctgctgaatctagcgacactcaaattaaaaatcaatctggtaaaatcaaacaccatagaaggtggaaaataactaggataaaagcagttcattggacacggtacctactacaatatactgccacagagatattctttgatgatgcaaacgcaccagtatttcttaacttttcatcccaaaatgatgctaaaagtgttgggtctcttttagtttccctgaggaatgatgctttgttccccaaaggaacaaccagagacaagaatagtttaatttcctttgttgacagaaaggttgcccttgaaatgtctgagagtgctagggaaagttggagaagaagagaaataagcaactttgagtaccttatgattctcaacactcttgctggacgatcttacaacgatttaactcaatatcctatatttccttggatattggctgactactcttcagaaaagcttgattttaacaaatcatctacattcagggacctttcaaaaccagtaggtgccttggatgcaaagcgctttaaggcttttgaagatagatatcttaattttgttgatccggatataccaagtttttactatggatcccactactctagcatgggaattgttctttattaccttctaaggcttgagccttttactgcgctgcaccgcaatcttcagggtggtaagtttgaccatgcagatcgtctatttcagagcattgaaagcacatacagcaactgcctatcaaatacaagtgatgtcaaagagcttatacctgaattcttttacatgcctgagtttcttgagaattcaaattcatatcaccttggcataaagcaggatggtgaaccattaggtgatgttggtctccctccatgggcaaagggttccccagaagaatttattcatatcagtcgagaagcccttgaaagtgaatatgtaagctctaatctacatcattggattgatctcatatttggttacaagcagcgaggcaagcctgcagttgaggcagcaaacatattttattatctgacatatgagggtgccgttgatttggagaacatggatgatatgttacaaaagtccgctattgaggaccaaattgcaaattttggacaaacaccaattcaaatttttcggaagaaacacccaaggagaggtcctcctataccaattgtgcatccactatattttgcgccacaatcgataacagtgacttctgttgtcccgaccatagtcacccctttatctgtattattcattggtttgttggactcaaacgttgtcatgatgaatgaggggctcatactctctgtaaagctttggctaacaacacagttgcagtctggtggaaacttcacattttctggatcactggaacctttcttcggaattggttctgatgttatttctccgaggaaaattggcacttctttggctgaaaatgttgagtttggaagacaatgcttagcaactgttcaaattcgtggtgacaattacttaattttgtgtggtaattgggagaatagtttccagatcatatctctaagtgatggaaaaattgtgcagagcatccggcagcataaagatgtagttagttgtgtggcagtttcatctgacggaagtgtgattgcaacgggaagctatgacacaactgttatgatctggtatgcatttcaagggagatcaaatgacaaaagatataggaatgcaaattacgatctatcaactaaggatcatgtcatcattgaaagcccttgccatatcttatgtggccatgatgatattatcacatgcttatttgtcagcacggaattagacattgttatcagtgggtcaaaggacgggacttgtatgttccatacactgcgtgaggggacatatgttcgatcgattcgacatccgtcaggtgctggtttgtcaaaaatggtaacatcacagcatggcagttgctgtggagagtttatggtatgtgctggtgatcatggtcaaattgttctccgctccatgcattctcttgatgttgtttggaggtacgagggagctgggaaaacaataacttccttagttgtgactcctgaggagtgcttcttggcgggaaccaaggatggtagcttgattgttttttcaatagaaaaccctttgcttcgtaaaaacgccatgcaacggcacaaggcaaaaccttccattggtggttagaggtgtagatcaaaacagtaccagaacttcttgctgcatttcaaataaaggttatcaatccgcaataattataacagagaagattctataactcctgtataaatgtacatacgtcatcagatcgagtttaccattctgaagagtgcatgtgccgatcacaatcaagaggataattcttctaactgcaaaacacatactatggtaactaaagtagattgatgtttcatgttcaagacaagagcaaggggataggaccttcaatatgatactcttgatatttgtagggtggtagctagttagtaatgggggtgcatttgagtgtaatataaacttattttgtgggggcattcttgctagataagagcgagccacagttttcctagatagaatttttaggtaaataggttgccactgacctgtaactattaatctgaacattgtaaatggaactgatgcgggttcataatagaaggcttgcaactttggaaaagatataattaaatcttatgagccgtctgaatttgtcactgaaaagctactaatgtgttgtatgagtgcacaacttgatgttgatttatcgttcgaacatggtagcgtcaatttcacaagcctaccaatatttcgagataacagttacaaaccgatactaatttttccctatttcccatctcgtcctactatgagctacttctgttcaaaaaaaaa

SEQ ID NO: 37096 - DNA, 3877 bp, Zea Mays
cgtgcttgatatttctacgcgcagcttctactaaaccgtgaacgccacgcttggttttcttcctcccagtcgcgcctccctgagctccatggtgcgcgctccctacccagccggcgtgcgctcatctctctgagcacctgcacgccgtggcttccctctcccatctcccacggtcggctccctccctgcttttctctccctatctctatccatggcgcgcggcttcgatttcaccacgtccagctctgccatggccgcgccggcttggagcttccatgaccgccgccctgccctgccttccatggttgtgcgcttgctctgctcggaatccctcccatggcgagctcgccggtcatccctgccccagctcggatcccctccctctgctcagcccaccgagtcaactcgcgccggcgctcctccttcagccacgccagccgccgagctccctccactcgtcttccctctgttctgagcgtcgtcgccttgctgctcgcccctgcgccctcctgctgctcggtgcccagccattcctctcttctccctcaagctcgcccttgctcgaacgtgttcccctgcgtcctcccctgcatcgcgcgctccttgctccaagctcgtcacgcacgcctaggcgctgcccatggtggccgcctgctctccctgcgtcgcgccaagtttctccctcgccatggccggtcgagttcttcccagccgtgaaactccctgcgcgctctgtttctctgcgcgcgcgtgctcgccggctgtgcagctcgtccatggcgcccatctctctgttcgcctctgtgcgcagctccccaagctcccatggctggcgcttggtcccaactcgccgcgctctgccccctgcgcgcagctgcgagctccacttggtcgctctccctgctcgcccaggttggatggggatccacctggtggcgtttgtggcagcgagggcttcctgcaggtgtttcatgtgtcggcactgctgattggggccgttgcccgtcggtccagtcagtcgtcgtcgatagggttcccctgcgtgtttccccaaaaaaccgccgcgtgtgctggtcaccttgtgtgttcggccgtgggcgccgtcaagccgtcgaatcccgcccaccctctgccagccgctgttctctcgtccgtgtggcagtcgacgtcgtggagttttgtttggtcggctcgtcgttgacctcgtcggtgtcgtcaaaccgtcgaaccctttcctcagtcgcgtcaggtcttcatgtctgttgtcgatcagctaccgaagcaagtggccggcaggctggaaatcggaatggttttacgtcaaagttgacgatgacaaggagaaactggtacagagcccgcttgaactgatcttcggagagaccagaccccaatgcagtatgacaccagaaggtccaacgcaaatcgcgttggctgaattcaggattattgcagagcacattggcactagagatttagtgcaggaattttttgctttcaaaatatttccaactatgaaggaatgggctatgccgaagcttgaaagagagaagaaagagggggaacttgtccgactgccctaccactataagttcaagaaatattttaaagcaccctgccaagaatgactcgaaacaatcgaagtgatgagtactgaaattcttgggaattattctaaaaaagaggatcagttgatgacagcagcctttggcacccggccgaaacgaaggctaaacagagtgcttgatgctataggctttgaatatcctgattatgggcggctcgataagggtgccgaagggctgaaaaggaaaagagtagcaggcactttgattaaagacgacgaagatcaaccaaaaaagaagaaagaaaagtttgaaccgaaggtagctgcttcaagaaaaagaaaagctgtatctccaaagcctgtatctccagaaccagagagattggtccgagatgaggaagttcctgcgacaccttctgctgccgaagtagaagaaattctaaaggtaatgactgaatctttgcctgtcaagctaagtccgctggcaccggaactgacaaagttttttcagaaggacaaagaagcttcggcagcagaaagtcctgcaaagccaaaaaacgcagaattatccaagtgacagatgtgattcatcaaacgccgccaccggtatcggcgtcaaaaattgttattgccgagaccgccgaagccgaagccgccgcagccgaagctaccagggctgaaaccactgaaattgcaactgccagagccgaagctaccggagctgaagccgccgaaactaccggagccgaagctaccggagtcgaagccggggctaccgaagattcaaacctgtaaaccacactggaagttattgacaatattcttctgaaaatggctgaagaagaagctgctgtggctgcggtgaacacggctactaaaaagggaaaagagcaggttgaagacattttggaggaagaaaaatttaactttcaagatttacttagacaagatttaactagtgctgaaaaagaagagctgaagaaatatgccatatcctgcggatataaaccagggtctatgctatttgttggggtcaacgaagggaaactaagatgccttcggaatcgcaccgaagccaaagttgttagaaccttctccaaaagcgttggcatgccgaagatagaagcagacctttgcagctatcagcgacaacatatcgccggtagcctgctctatgctaattttaaggtaaaaaatattattattattttattattattattattattatgtcgttttctgacgaaggttgttttggcagagtatactattaagtaaagtgctaaaaatgcaacaagatcttgaagaagagaagaataaagctatcatcaaggatttagaagaaaaaattgaaaattacgaagctgttctgaagaagaaggacttcaccattcaagaccttgaaatcatagctaaagaacacgaaggtgccctagaaaagaatgactttgttattcagtctatggaaggctccttggctgaggtccaagccgaaaatgacagtttaaagaatgaattactcaaaaagtcagaaaaatatgagcaagaaaaggagaagcttgaagcaagtctcaagactgaggtcgagaaaaattcaaatttgcaaaaatcatttaaggatctccaagagaaatgcctaaatttcggcagccgatgcgtgcaacggctgaaggacgtatttcactctatcggagccagttctgaaaaatttttaccttcagccgaaaacctgcccagcaccttggaacatattgaaggcgagattgatgctcttgacgaagttattggtgggcatgccgacttctgtgccctggtagcttctcgaggcacagctaccgcttttctaaaggctggctgtacgcacggaaagattgtgaataggccaaacttcagcttgtcagcagcagatttggttgatatcccaagcttagcccgaagcatcggaaatagatttatgacccaaatttgggtaaatggtgggcaaaaaatggctggtgacgaagctcgaagccaccttaagccagtgagaaacttatatttgttacttttaccttctccttgaaatttgcacctttcttattctgttctttaatatgtgcaggatgacgaagctgaagtatgacgaagttgaagtatgacggcctgaagcttaatagttgttataatagactttcctgcaaaaaattctgaagagatccttgtaatataattatggaaaaaacttatgtaaatttgtacataccttgtaatatatcttgtctcctttatccgtgtacaatatgctttgctgtgaacgaaactacacttttg

SEQ ID NO: 37097 - DNA, 4739 bp, Zea Mays
cggacctattcctctgaaccaatgatttttcagcttgcgtttctcctgctccctatccgacgtagtgaatcccttcccaggcaccactcgccgacggaacgcctcccttcctaggcaccactcgccggagcgcatcccttcccagccactgatggccctgacccgccagcgcgcttccctccccaccgttgacggccccgacccgccggtggactgcgctcctcatcgaccagcgtggccatattttgcatttgttcctgtttcagcttgtgagcaactgatactactgtcccggcccatcgttactggaccaagaactttgagatgtggggaactctatttacaggaggctggaaactagtctgtacaagaacgaagcagttaatctattcttctctgataccagcgcttggggtacgagcaaggaagggacttcaagaaatacgggtgggatggaagttgccttggtatcaactgtattgaaggttttggggacgaagttagctcctcttgcactcaaagagttgagctctaaagcaggtgtggccaaagatcttcaggaactccaggacctagttgaggagatcaacaattggttgcaaacagttggtgataaagaccgatcatctaaatggctcaaaaaattgaaagaagttgcttatgatgctgaagatttagtccatgagttccacatcgaggctgaaaaacaagacagagaaattactggtggcaagaataccttggtcaaatacttcatcacaaaacctaaagcaactgtgactgaatttaagatagctcacaagatcaagaaaataaaaaacagatttgatgcaattgtgaaaggaaggagtgactatagcacaatagcaaatagcatgccagtggattatcctgttgagcatacaagaaagacaattggagaggtgccattgtatactattgtggatgagacatcaatatttggcagggatcaagcaaagaatcagataatatctaagctgatagagactgatagccaacaaagaataaagatagtttcagtaattgggctaggtggctctggtaaaactactctcgcgaaacaagtatttaatgatggtaacattataaagcattttgaagttatattgtgggttcatgtgtcaagagaatttgctgttgaaaagcttgtggcgaagttgtttgaagccattgctggtgacatgtctgaccacctcctattgcagcatgtgagcagaactatctcagacaagttagttggaaagaggttcctagctgtcttggatgacgtttggacagaggatcgtgttgagtgggagcgattcatggtacatttaaagtgcggtgcacctggaagtagtattttactcactactcgtagtagaaaagttgcagaagcagtggattctagttatgcatacgacctaccactcttgtctatggaagatagctggaaagtgttccaacaatgttttggaattgccatgaaagctctagaccctgaattcctacagtccgggatagagattgtggagaaatgcggaggtgtgccccttgcaattaaagttattgcaggcatcctccatggaatgaaaggaattgaagaatggcagtccatatgcaatagtaatttattagatgtccaggatgacgaacatagagtatttgcatgcttgtggttgagttttgttcatttaccggaccatctaaagccttgttttctacactgctctatatttccaagaggctatgtaatcaacaggtgtcatttgatttctcaatggatagctcatggcttcgtcccgacaaaccaagctcgacaagcagaagatgttggaattggctactttgattcccttcttaaagtggggttccttcaagaccatgatcgagaccaaatttggtccacaaggggtgaagtaacatgcaaaatgcatgacctggttcatgatctcgctagacaaattctacgggatgaatttgagtctgagatagaaacaaacaagcaaataaagagatgcagatacctatctttgacttcatgcactgggaagcttgataacaaattatgtggcaaggtccgtgcactctatgtttgtggccgtgcactcgaatttgacaagacaatgagcaagcagtgttgtgtccgtaccattatattgaagtatataactgctgactcattgcctctgtttgtgtcaaaatttgaatacctggggtatcttgaaatatccgatgttaactgtgaagcactaccagaagctctctcgcgttgttggaacttgcaggcccttcatatattaaattgctcaagacttgcagttgtacctgaaagtatcggcaagcttaagaagcttagaactctggaactgaatggtgtttctagtatcaagagtttaccacagtctattggcgattgtgataatcttcgaagattatacctagaaggttgtcatagattcgaagatataccaaattccttgggaaaattggaaaatttaaggatacttagtattgttcattgctttagttttgaaaaactttcgccatcagcatcatttgggaagcttttgaacttacaaactatcacctttaactgttgcttcaatctccgaaacctacctcagtgcatgacttctttgagtcatctagagatggtggatcttggatattgttacgagcttgttgaattgcctgaaggcatagggaatttaagaaaccttaaagttttgaatctgaagcaatgcacacaattgcgtggactaccagctggttgtgggcagctaactcgtttacaacagttgagcttgtttgttattggagacagtgccaaacacgcaaggatctctgagcttggtaatcttgataagttggatggtgagctgcagattaaaaacattagatatgtgaaagatccaagtgacacagacaaagttcgtttgaagaaaaagattggcatccggaaattgtcgttggattggtattcaagattggaggttcagcctgatgatgtggaagaagagttatcattaaatatggagaaggaattgcatttgctcgacagtcttgaaccaccatcaaaaattgagaagctgagaattcgtggctaccggggttcacaattgccacgttggatggcaaagcaaagtgactcttgtggtccagcggatgatacacacatagtaatgcaaagaaatccatctgaattctcccatctgactgaattagtactggacaacttaccaaacttggagcaccttggggaacttgtggaactgccactggtaaagatccttaagctcaaaagactgccaaagttggtagagctgcttacgaccacaacgggggaggaaggagtggaagtgctatgtcgtttccatcacgtttccactctagtaataattgattgccggaaacttgttgtgaagccgtactttcctccgtccttgcagagattgacactagaaggaaacaatatgcagttggtttcttcaggatgcttcttccatccacgtcatcatcatgcatctcatgctcatggtgacgagtcttcatcttcctcctattttgcggatgagacgggtactcacctcgagagacttgaacttcgtcggttgacaggatcatcatctggttgggaggtgctgcagcatctcactgggcttcataccctagaaatatacatgtgcacagaccttacacatttacctgagagcatccactgccccaccactctctgtagactgatgataagaagttgtgataatcttcgtgtgctgcctgactggcttgtggaactgaaatctctacagagtctggacatagactcatgtgatgctctccagcagcttcctgaacaaataggagaactctgctcactccagcacctccaaataatttctatgcctttcctgacttgccttcccgagagcatgcagcacctcacctcgcttcgaattctcaacttgtgtgaatgtaacgcgctgacccatcttccggagtggctaggcgaactctctgcgcttaaaaaactcttgatccagagctgccgtggccttacatctttgccccgctccatacaatgccttactgctctcgaggaattatatataagcggcaaccccaaactgcttcagatcagtgcatcatattctaaggaagacaaggatggccaggctccgacgacattcagatcacatggcttgacaggtcgacatacaaatccccgttccatgtagtatttctgcagggacaagagtcttctctcttgaactctacagctgcaaccgttccgatgttgcaggcctgacgaccagcattgcagtgaggcccaagagttcgatctggtccggaacatgctcatcgtcgcagtagaagaacgctacaaggatgctggtaaacgtctaagaaaacaccatgtaaatatggaggccttttttttgctgaagcgcatgaagcttcggcaaacatctaaagaacaccatgcaaatggctgtggtgtcctgcgattggtctacgcgatgtacatgtgcgcaagctgctttgaagagaatttaaccaccttgaattttaggtacccatacagttcgctcatgtattgatctggcgcaagcttcgatgaacattttttggtttcatgtggttgatatgttgcttgagccttgtcagcttgacgattttttggtttaatgtggttgatatactgctagctacatcaccgctgtttgtcttcaaatcgg

SEQ ID NO: 37098 - DNA, 2192 bp, Zea Mays
cgctactcctgcacggctgcactcgccatccgtccgtccgccgacaacacgagacgtcgcgacactcacccgtccggccgtccgccgaccgccgtccaggccatcctgctgttcgccgaccgccgtccaggttgtcctgctgttcgccgaccgccgtcgaggccgtcctgctatcgccaacactgctgtccaggcgtccaggcgtcgttctccagccgtcgaagccgtcccgtcggtccagccgtccaggcgtcgaagacacggccgtcgaagtcgtcggtccagccgtccaggcgtcgttctccagcctccaggctccatctgccgtctgccgagccgagtgccgaagacacggccagtaccgcagccgcagtacgtacgtagtggcgtattggcatttgattgtttgcagtagttgagactcgatatgtctcactctggaacaggacccggaggaggaggagcacgccattcagactcaatgcctgcggagtcagagactgggaacaacaacctaggtttggaaagcatattgccactgcctccacagccgcagcgaccaccactacctccttctgtgagaggcagcagcagcagctctgtttcagcaggaaacaagagaaaaacaagtggaagctctatgggtgcaccaattgttcagtcgtcatcttcagcacaagcagctgaaaataaagatgcaaataaattggttgtcgcagacacaagtaatactggtactagagctgtagcttctgttgatatagcgggccttgatgatgatgaggaggacataccagaggatatgactggaacaggaaagagacaaaagaggcgcacatctattgtatggaagtattttaccaaagaaactgtggaagtggaggtgaatggcaagaagtttgagcagctttgggcctactgtaactttccaaaatgtaagcagagatatagagctgagtctaatcatggaacaaatgcattccgcaaccatctgaggtcacatcatagtattgtcaaaggacagctagaactaaaggcagaaaaggataatggaaaagatgtcaccactattcagccttttaggtatgatccggatgctagtcttagaaaattctatttagcagtaatcatgcatgagtacccattcaacattgttgagcatgattattttgttgatttcatcaagtcgttgaggcctaattttgccttcaagtctagagtgactgctaggaaagatatacttgacatatactttgaagaaaaagaaaaattgtatgcccaattgaaaaatgtaacatgtcgctttagtgcaacaatggatatttggacatcatgccagaacaaatcatacatgtgtgtgacattgcactggatagatgattcttggcatattcagaagagaattgtggggttttttcatgtagaaggaaggcatactggtattaagttggcacagtgctttactgaagtgatggtaaaatggtttgctgagaagaaattgttttcattgaccttggataatgcatcaaataatttagtggcagtcaaagacattattcaagatcttagagtgaatgcttcttcttgtttgatttgtgatggaatattctttcatattagatgtgcatgccacatactcaacttggttgctagagatgggcttgctgttatttcaaaagcactggaaaagataaaagatttggtactaactgtgaagggctctcccttgcaatgggaggaacttatgaagcgtgctactgagtgtggattggatacatcaaagggaattcaactagatgtttccacaaggtggaattcaacttacatgatgctaagggatgcattgcactatgtgtgtttgatgtccgagatagtgattcccaattcatgaatgaagatggcgagctgtgaagaaatcttgcaaatgtgtgtttgatgtcatggactcatgaagacattgaagaacttatattgtgtccatatgtgtgtgtccgtgtgtgactgagactattattttgttaactattattgtgtctggactgaatttatgtaagtttacttgttggatttggatttgtgctatgtgctcatgtactattgtggacttattttcttgttgttcaatggctatgtcggtggacttattttcctgttgttcaattgctatgtggttaacttgtcatgtaatcatg

SEQ ID NO: 37099 - DNA, 2812 bp, Zea Mays
ctctgcttccctttttttttttgaaatcctccgcttccttccttctgcttctcctcgagggtcgaggctctgccgctctgctatgctgctgccgccactcgctcggaaaaagcttcgtccttttctctcgctccctcccctcacattcgttcctcgcacccttccactttccgcgtctgcgctcggccgcccatgagcgcctgcgggggcaccatccccgcgtcgcgcttcctgcgccgccgcgccgccgtgcgggacctgggcggggacgcggccgccggcgacaccgacgccttctgggccgccccgccccgcctctacgacttctcccagcagcagcagcagcagcacacggcccaggccgcgcggcgatcgccctcgccggcgccgaccagcccgtgcctcctcgcccggaagcggcaccagcagtccccgtcgcctcctccatccccgcggcgctcgccttcgtcgcccgggacctgcctgctctccgccctgcaccgcacctgcgtgggctggggcgtcaccaggcgcgccgagtaccccagacggcaccgcccggtttctcccgcggcttgtgggcaggttacggggatgcacacgcacgggcgggcggcggctcggtgcgtggacgaggacgaggagagcaccagcaagaacagcaagtgcctgttggccgtgggcaagaacgagctggaggaggaggtgggtcaagaccacgagagctgcctgcaccgccgccgccgcgccaagaaggccccgtgggccgtcaaggaggagcaggagacgtcaggtgaggcggcggaggagggcgccaagcgcgccaagaggaccccactgaagcatgaggcggcggcggcggcggagagcaagcccgccggcgccgccaccgccaccgccactcccgactccggctcgccacgcggcaacggcaaggtcgaccggtgggcggcgtggcggtacgcggcgggcgaggcggcgctggccaacatcctgcgcgagcgcggcgccaccgccggcaatcccacgccgcgggccgtcctgcgggcgcaggcgcgccgcttcatcagcgacaccggcctgctcgacaacctcctccgccacgtcgccgacaaggtccccgccggcaccgctgaccgcgtccgccgccggtataacccggccggaggcatggagtactggatcgagccggccgggctggcggccgcgcggcgggaggccggcgtcgaggacacgtactgggtgccgccgcccgggtggaagcccggagaccccgtgtcgccggaggcccgcacgctcgaggtgcagaagcaggtggaggtgctcgccggggagcttgccgtcgtaaagaggcaaatggagcagctcgactccaatctggtgcaaatgagcaaggaagcctacatctcatggaaggggtatgactgtatggtcaaggccaatggcaagctggaaaaagaggtgctgtccttggaggagaagtatgagactgcggcacaggtgaatggggagctgaaagagctgctgctgctactgaaggataagtatgatactgtgcttgagaagaatgagaaactggagggccagatggttgctctgtccacttctttccagtccatgaaggaagagttgctcctgcagagaatggaagaacaccctctgctgatgctagcgcaagagccttgggaaggtgacaagcgagaagccggtggtgcgaacaaggctttggtggtgtgtgcaggcgaccagctggccggcgctgatgccttcgatggcagcttcagcagcaaccacagtgcctatggtgacgagaagatggtgctgaggaaacgtatctgcgtgcgggagggagcatgccagtggcctaggtctgctacttccagtggcgctacggctggcagccctggggacctgccggagccgctgacaccgggtgcggatctgatcgtcactgacttcgacaccatgatcgatagcctcgcgctaccgtccatggaggagtacctacaggtcgatggtctccccacgccgacgtctgcctcgtccaccaccgcatctcccaagctccagctcctcccctcaccagcctcgccgagccaggtccagcctctgccgtcaacaaccatggtcgtgggcgacttcaacatgcagctccggcacatggacacgtcgtcgtcgtcgtcatcaggaccgtgcggtgccaaggcgctgaagctcgacgccggagctggaggtggcgaggttggcactgagctggtcctggcgacccccacctactgacgagttcttataaatggacagatgaccactgaagttttgcctcacctcacctcaccgccattaacccatcgtcgcctcacatctgagaacatagcacacatgacaggatagctgcagattacctacccttttacctttgctttaattgtcagtcagtagccgtcactagtctcagttggaacttacttgcaggtgggtttacttacagctgagcaccatgttgctgctgcttaatccctacagtagtttgtacttttggttggagacatttgtctgccactctgttgaagccaaatgctcatcaggagctggcatctgtagtgccgccgccaccttttgtcttgcctttgtttgcttgatggtttcttgacccagctatgactgtatgcttgattttgccatcctcatattcctcaacctcaacctttcattctgaagccttctccactttcggtgcttctcgtagatcagcgatagcgataattacgttctgaccaaaggttgtatctgctcgcttcagacagatcaaaac

SEQ ID NO: 37100 - DNA, 1107 bp, Zea Mays
gagaccctgctgagctagctggacaccgagagagagagacagagagagagagagatgggcaggagggcgtgctgcgccaaggaaggggtgaagagaggggcgtggacggccaaggaagacgataccttggccgcctacgtcaaggcccacggcgaaggcaaatggagggaggtgccccagaaagccggtttgcgtcggtgcggcaagagctgccggctgcggtggctgaactacctccggcccaacatcaagcgcggcaacatctcctacgacgaggaggatctcatcgtccggctccacaagctcctcggcaacaggttacatgagctgacgacgagcagccatctgctacgaattcatcagttccggtgttggccgtggtcgctgattgcaggcaggctgccgggccgaacagacaatgaaatcaagaactactggaacagcacgctgggccggagggccggcgccggcgccggtgccggcggcagcagggtcgtcttcgcgccggacaccggctcgcacgccaccccggcggcggcggggagccgcgagatgaccggcggccagaagggcgccgctcctcgcgcggacctcggctcgccgggctccgcagcagtagtgtgggcgcccaaggcggcgcggtgcacgggcgggctcttcttccaccggcgggacacgcacacgccgcacgcgggcgggacggagacgccgacgccaatgatggccggtggtgcaggaggagaagcacggtcgtcggacgactgcagctcggcggcgtcggtatctgtatctcccctcgtaggaagcagccagcacgacccgtgcttctccggcgacggcaacggcgactggatggacgacgtgagggccctggcgtcgtttctcgagtccgacgaggagtggctccgctgtcacacggccgagcagcttgtgtagacaacaagtacacgtacggagtacaattatatatagccatgcgtatgtatacttttttcccttctccaatccaaacagaaatacgtatgcgtatgaaatagtatcggtttcctgctgcatacgtaaaaaaaataatctgatttaaatgatttgtttcgtttataaaaataa

SEQ ID NO: 37101 - DNA, 253 bp, Zea Mays
gcgtgcttccctgttggttgtcgttgtgcaagctcctcttttaggctcgccaaccactgttgtcctatccacgtcagcacgcgaccggggtcgtgttcatcgagttcgccaacgctctgttgccgatttgaccgtcgtcgctgttgcgtgcctcgttgcgtgttcgccgagtgtcgtttgttgtaccccagcgctcgtgcctactcctggctcgcgttggcgctcgcgtgcctgctcgtcgtctctgcggtgc

SEQ ID NO: 37102 - DNA, 2373 bp, Zea Mays
tccatgactgttctggaagctccaagcgttggcgaaaaaagtaagatatttctgcgaggcaaggaatccctcccccgcttctactctttcggttcgccggttcgccgtctcgcacacccacttcctacaccgccaccgagcactcgctcagtttcatacccatcctcgaagtcgcctctgtctagttcctgctcttccaccaccgcctgtgatgtatccccgaggcccggatgggggacgagatgcctcgtctcgccctatgcttgccactcccgccggcaacgacacgcgcgaggaggatgagatcaccaccgcggaggctcatgtggagaaagacgccgcgcggatggacgctgccctcctcatgcggactacgcccaagatggacgagtttcacaccgggggcgatctggactcaagtggaagtggaagcggcatctcggggccaagcgcctccaaaagacagctacaaagaaggggatcgtggcggcaacgagtcagcaggtccagcatccatgcttatccttttcctttgtgtttctatttgatctgtttttttgcccgcgccagcaacagagaagaatgtggtcgtggctgtaatgggtcagcaggtacaccatccacgctcatcatttcctttgtgtttctgtttgatctatttttttaaaatttctttatcagtttgattagcatccacttgcatccgctcatagtttgattcgtgttcgttggatgggcctcaaaattaccagttgcttcgactacactctctgaatttcgcagatcaagataaaacccgacacaaaggaatgaatagcacacaaaaaatcacagtattatttagtcatattggacacgaataagttaaatttcttaaattttagatccacatttttgtattttggtctagactatcaaaaaaatcctagaaatgtccctctgcctctcgcgcgtgaattctcctctgccgaagggaagacactcaaaggcgagctactgatcttcaactgcttttctggattctctttgcaatatgctttgttggggctagatctgaaatcaatgtttttaataatctagcacaaataggaaatgttgcatgtgttgccgacagaaccatctcactctctctttagtttctgcaattttttggacgaccgagaggtgctgccgtttatgagtaactttccagtgggaaaacagtatgccacaacatcatggtcagagtttggacattgcatgaagcacttgctggacaattgagaagaactcatgcctacttgcaggcatcatctcaaccatacaatgggattcattgaaatatcaggagggttgttgtacacgtgagtggaggtcgaacccttcttgtagggctcttaatgtatgaagtacgccatgctagctattgaatcaagttcaatgggattcgttaaaatataaggagggttgttgtacaagtgagacaaggtcagcccttcttgcagggctcttaatataaggtgtgcctaaacataatacttgatttatttaaggcatcctgcctttcccatcaattcctatttatattaccatatttgattttggtcggctagctcagcctgtactacacgttcatccacgtcgagctcgtcggctcccaacgcaaccccttcttctctcacgagatcagtggtgaggacgacactggggatagagacctagggttctccaagtgggcctagaaactccatggcaacgtctcaggaaaaatgggcgcattgaagtcttgaaggactttcaggaatactaattttgagaattcgtggaaataaaaatagggttggctttatcaaactgcacaaaaaaatcagcagcacttctctttatcatgcaaggaaaatcaaacttaggagcatcttccaatttcgtcagcagctgagccgattgtgatctctgatcactatacaaccatggaaataaataatgcagctttgctctgcaaattttatacaatagttcttgaatcgatattgactactactatattcacaacgtcatccacaaacatcattctaagaaaactaacaacatatgatggtatgtaaagcatgtttagtgtcaaaaaatgatatgatatatgttaagtacattctataagtttttttttcttggaccatctcgcagtcacacgctaagatactacatatgactatctgcacaaatccttcaccacagttcaaactggccagatgtactccgcatggacatatgtttaggacaacgcattactgtttttctgtcattcaatgctattggccctctctactaacagtgcttcctgaatctcttctgttcgcagtgctgttcagtgttcttcagtacctgcaatagtcc

SEQ ID NO: 37103 - DNA, 1547 bp, Zea Mays
cttgccgaacttccctccaaagttgccgcgcgcctttccggaagaggccgggagagcttctttcttcttcctcgccctcgatcttctccttcctctcctataaatacgtggcgttacgcatgcatgcaggagcaaagcagcaacggggcgtggcgtggcgtggccaagaattcgaattcctcggcgggcggcagggaggaagaagcccgaggaggagctggtgtccatgaacctgggcctgggcgcgagcctggtgctcctgctgtccaagagcgccgtggagctgaacaagatggtggagctgcgcgcgcagatggaggccctggtgtcggagatcaggcaagcgtcgcggtacagggaggaggaggagaagcaggcggcgagccaccctacttctgctgctgctgctgccgtcgctggtcccgccacgtcgcaggaatccgacggcggcagtagcgccaccaccaccgccgtgaaggacccgatcgcgttccccgcggccgacgccgacgccgacgccgcgtccaactgctcccgcacggcggtggtgatggacctcatggaggcggagctccaggccgagctgagccgcatgcagcagcagcgtgggcgcggcggtacggtggtgcacggccacggcggcgacagccggatcgccccgacgcgaggactcgaggtgaagacgaagggcgacgcccccgacagcgcgtcgcgcagctgcgtggactacgacggcggtggctgcgacaagcacgacgataatgatgaagtggacggcgagggcgaagaggacgacgacggcgatgaggaggaggaggaggatgacgtggagtacggcgaggacaggatgagtcccccgcacggcggcgtgtcggcgcgcgcgctggagcggcggctccacgagctgctgcagaagcggcagcaggaccggatcgtggagctggagtcggcgctggacagcgcgcagcggcggctccacgagaaggagcgcgaggtggtgtggtggcgcgacgccgccaagctcgtctcccaccgccgcgacgagtcgcgccggattgccaccgccagtgccaggtagagaaacgagagagagagagagagaggtggcgcgaaaggccggctggccgcctgcctttgtactgcagcctgcagcagatgtccggatggaatggggatgggggtcgtcgttcgtcatcacgctgcgcgggtgacgcgctgtaatgtactcctgcgagctggggcgagtgagcgacacgacccgcggcggcggcctcttgtcgcgcctctgccgtgcgcgcgtgcggctcggacggaggccgcggggttcggctctgcatttgcctgcacttggttgtcttgtacgtcgtgtcgttgtccggtgcggacgaaaaaaaaaatccttttgtgaattcgagcagagtttgtacttggtacccgtgatgttgcctgccgcgcacgttctggtgtggtgtcacctgtggtcgctccgtcgctgctggcttgtagtactatgtatgtacagttgtacaccaaataaataaatgctg

SEQ ID NO: 37104 - DNA, 727 bp, Zea Mays
atcggattgaaccgactgtgtctgtttgaaggatctgttagatgctttgaatcaactagaggtgggactcaaagaaaacctcaagaagttgagttcctttgataagtacaaacagcaagttcttcttggtcatcttgactggtctccaatgcacaaagatccaagtttctggcgtgagaacattaacaattttgaagagaatgatttccagattctacgagttctcatgacaatcattgacacatcaagtgacaccaccgctcttgccgtggcctgctacgacctctcacagttcctccagtaccatccatctggccgaatcgtggtggcagacctcaaggccaaggaccgagtcatgaagctcatgaatcatgaaaacactgaagtgcagaaaaatgcgctgctctgtgtgcagaggctcttccttggcgatttagatccagagaactcctggccatttttaaaaatggctgttaagaaaaccttgaaaattcttgtccattatatcctattgttatttgatttctgagaccgatgtataataaataattagagccataccatgctcgatgtaataaagtgtccatgggcttgttgattcatttatgtaaattctgatctccaactttagcaatccttttttttctgtacacctgacttgtgtgaatatggacgtacatgtttgcaattgttccacaggtttttatgttagttcattctcctgaaa

SEQ ID NO: 37105 - DNA, 767 bp, Zea Mays
agaagatgtcgacccgctgacattaaaccttgctatatcagctccagttgttgcgttagcttctccttctgcactgagctgtggtgtgatagatctggagataccagcatgtaagcaccaaatacgttttgatggagcgtagtttcagactactacaaaatagacgcaacgggcattccttaatcaaatcatcagtctccttggatcgtgttccattttgccagtgccagtttctatgtgtggttccatggttcagaccactgcgtctgcagcgaagaaactgggcctgaagagcatatattacccaacgacccctggacttgaggggtgggtcgagagcattctcgaggcgctcagagtccacaggacagcatcaaaagaggccccaaaacgttgaaaacgggcggatggcggagcttcttcttggcgttggtagccgtccgcagtgtcgaagaaattctttgcttctttgacgacaattgccccccgttgagggaggtggtggtgtcaagccatggctttccactggcccagtttgtaatggattcttgggccgaaaggcccatctctatatgtcttgactcgcaaggcgattgcatcagtccatccatccatttcatggagggttttagcagtgccgtctctgtttcgctaatcggtgatggcagccagccttgttgtactttgtgggtttgttgacgcagccggtcggattcttcttattgccggattggttgcgtaacgctaggtggttctgaatatcggcg

SEQ ID NO: 37106 - DNA, 2220 bp, Zea Mays
gcacacatttttcttctaaaatctacagtacactacatacaaactctagactgtacgtcggcacatgtgaatacattgagcgtacaagcggccatcactgagtagcaagatcgttgcacaccgctcggaagagaaatgattgccacgacccgcggcagctcggcgaaggcggcggcggcggtgggcggcaaggcggcgcgcgcctgtgacgggtgcctgcggcggcgggcgaggtggtactgcgcggcggacgacgcgttcctgtgccaagggtgcgacacgtcggtgcactcggcgaacccgctcgcgcggcggcacgagcggctgcgcctgtgcccggcgtctccgctgcagacgccgccagatcgctcggcggcggcggcagcgacggcgactaataagcgcgagcgtcacgacgaggtggcggtgcccgcgtggttcgggcgcaaggcgcgaaccccgcgcggcgggcacgccaaaagcgtcggccaggtggcgttgtcgcggcgcctcgtcgtaccgcatgcggctggcggggactcagactcacccgatgagcgaaacggcggcgaggaggagcagctgctctaccgcgtgcccatccttgaccccgccctagccgagttctgctcgcccccgcctctcgaggacgcggccggtctcgctctcgacgcgtcggtgtgcaacgaagacggcgccatcgaggaccccgcgaagccggatcctgcggcgccgctggcccagttctgccccgtcagcggccatttcaacttcggcccgaccgacgccgagctcagggagttcgccgcggacatggaagccctcctcgggcacggcctggacgacggaaacgaggaggactcgtcgttttacatggagacgctgggcctcctcgacccaatggaagtgggcgacgatgccacgcaagtcaaggtggagaccgacggcagcagtgcgtgctgcgaagccagtggcacgctggcctgtggcctggagctggacttagaggcatctgacgagatgctggacatcgacttcgactacgcatcgcctcaggacacggcgacggacgagagagccgccagcagcgacacgggagccgacgcccagttcttgcagacgagcctctcgctcaccctcaactacgaggccatcatccagagctgggggagctcgccgtggaccggtggcggtgagcgaccacacgtcaagctcgacaccagaacatgtgggttgtgggaggagtggtcggccacggcggcgaggacctgccgggcacgcctaggctggggatggacggcggccgggaggcccgggtgtcgcggtaccgggagaagcggaggacgcggctcttctccaagaagatacggtacgaggtgcgcaagctcaacgccgagaagcggccacggatgaagggccgattcgtcaagcgtgctaccgccggtggcagcctcgccatcgctggcctcgcttaatgccgccggcttgctgcatgtttggttgttgagcctgcgtgtctgcatatctcgtcacgtcgtcatgaaatcatgacaagaatgaacaaacaattcgtcgaagctgccttttagttaattcaacttaaaataaaaaaaacatgtttttttcaccgatcaatttgccaatttaattattttataagcgggtgacttcgagtggcacttgcctccttatggcgataatcgagtaataatactagtgcaatattgctagctaaagagttgtttggtttaaataatcacttcatctaaaataagatggtgtatcataagtccattactcaaatttggtgggatgactacattactcgtattagtattaactaactaattataaggaatgaagtggtgatagatcaactcattttattttataaaccaaaaaaaattagtgaaaagatatactagctcattactcgaaccaaacgccctataaatacttgctcaacagttaggatgtagtatttttttgcccctgtttcagagcgtctgtcatctggtcgcctttttacacatgaagaatattggctcttgttgttttacttttacaaacacatactgtacctccaagtaagaacaaatgtacatgtcatacatgtgaattatattattggtatggatttattttgggtacattgtgaattcattttttgggccatgataggatatataatttttaaactagaaaatttgggtgactcgg

SEQ ID NO: 37107 - DNA, 774 bp, Zea Mays
gtccgacctggtttctgaaagccaggaagttcgattccaacaagacaatgcaaatgtggtcagagatgttgaaagccaggaagtttgactattttttggcattgacctgattctccaagggaagaagcaatttgacatggatcctcccgccggcccctttcggtactaaagtgaggtgccctgtaatttagctctgactctagggatcataccaagtatttggtcaggaggacccgactatgattgaatcctacaataacaagagaacatctggctgatctggtggtgaaggagttacatctacgctaaccatggaggaaccgactatgattgaatcctacaataacaagagaacagttggctgatctggtggcgaaggagttacatctacgctaaccatgctcaaggtcattggtgatggtggttatccaaacgaccactatgacaaggatgatcatcaatgaggccttgtgtcgataattataataacaactttgtgaaacatggttttgccccatctttgcagcatcatattgtcctatagtattgtaattgataagtgtttgagcatgaagcaggttaggtggtgttctacacctacgaattacgcaatcacatatagattgtttctatgggtttttagccatgtactgtagtgaatctttattactggcatacaacatctcacaacagttctaataatgagcaataaactgatatgtatttactggtttggtggtaagcttgaagtttgccgagtaatatgagtttagg

SEQ ID NO: 37108 - DNA, 1185 bp, Zea Mays
cctcgtcctcgttggcttcgcgttctcgttgacggggaagaagtcgcttgtgtccacagcggtgtttcttgcatggatcataattacggcgaccctaatactgtccggcactttccttctcctgcacaacgtgataggagacacctgcgtggcgatggacgagtgggtggcccagccgcaggggcaggggcagagccacaccgcgctggacgacatcctgccctgcgccgacgcggcggtgacggcggaggcgctgcggcggagcaaggaggtgaactaccagctggtctccaagctcaaccagctgctctccaacgtgtcgaacggcaacgtgcctccgcaggccgggcccccgctctactacaaccagtcggggcctcccgtgccgctcctctgcagcccctacagcgccgacctctccgaccggccctgcgccgtcggcgaggtcaccgccgccgacgcgcagcaggtacgtacggtctggcagcgctacgtgtgccgcgcggcggcggggtcgggccgggaagaggtgtgctcgacggcggggcgcctgacgccggcgatgtactcgcagatggtcgccgtggccggcctcagcgacgggctgaggcggcagtccccggccctggccgacgtcgcgagctgcgtgaccgtgcggcgcgcgttccggacggtgggccagcgcggctgccccccgctgcggcgggacagccgccgggtgtaccaggcgctgctcgcggcgtcggcggccgggatgctcgccgcggccgcgtggctcgtgcactcccgggagcggcggcggcggcgggacagcgagcggttcaaggtgtcgccgtacaggctccccatcgaggacaaggtgctgctcaacagccccagacggccgtacaggcgagtgtagctgtagtgtaaacacaagcttggtcatcgaccagacgctgacggatcggatcggacctctcgagcacagtgacgacgacggtccagtgcaggtccggtaggggagaaaatggattccgagcagttttggcagtacaattctgtaaagtatataaatgtgtccttgtactgtggtaactgtacatgagtggctacgcgaataaggtaccttcttggattggatcaaaccacaccagtgtgcctgtttgataagatctggtttgattgtttgtcaaaacaaaacca

SEQ ID NO: 37109 - DNA, 375 bp, Zea Mays
ctaattttgactcccctaagacatatttacacagggttggtcgttctgggagatatggacaccttggtttggcagtgaacttgaccacttacaaagattgtttcaacttatatagtattgataaaaaaacttggaacaaaaattaagacaatacccccacaaattgacatgtttgtatactgccaatgatgatagcgacaacttcatgagctggaggaggaggagaggcccatgtcggtggagctggaacccatcgccagcgagcagcagcttaactaggtccttggagaggcgtagcagctctagctcctcatcgtcctgctctgagcatcaaggctcgacaaccaacatattctcgtgtcaggaaatggaaaa

SEQ ID NO: 37110 - DNA, 3340 bp, Zea Mays
cacgaacagagaactcggaccgtcggtcgacgaggcatcggccatcgacgcaacactctcctccgcttcccttctcctcagtcgcggctcaccccctcccccttgccgatctaacgggaacgcgtctcacagcttccacgcgactgcaccgtgccacccgaggctcgcccccgctgagccagcggagcgaatctccatggcctccacatcctcctccaggtacgcgaaacatcgtcggatcggagaggacgatgagttggaggaggttgaggaggaggccgaagaggagcttgagcggttcgatgatttcaccattgcttcgtcatgggaaaagtttatatctgagatagaggctatttgccgtcaatggcttgcagatggcgcaaagatcttaatgcaaaaaggtgcagagggtgttcctccttttgaaaacttatatatgatcaagcgtgaattgaagcatgggaaaagagtctattctatggagtaccatttcatgaaatctgcaaaaggtcaaaactcatattgggacgatgacacacatagcatgcagctctcatttggagttgatgagtttttgataattgctccgctgagtgccagtggtgtgatcctcgatgatccagaatcaactaagcttttgagttctgtagcaattgctctttctaattgtggcagcaattggccagcgtttgtaccagttcacgacccttcacggaaagcctatatagggattcaaaatctgggaactgtatttactcgaagatttgaagctgaccgaattggtagtcaagtgccaataagactcatgcatctggaggggttacatgagctatttctgtcaaaatttgtcctatcctcgtcagattttccagctagggtaaaggttcacttctcaatgaagcttagctacaagaccccagaatatgatcatgataatgaaactttagattctgaagctactgagccattgactgaaaatgaagttgtgaaccaccctagaaaactatgggacgatgattgcccttgggcagagtggtactctgctgaggatcctgttaaaggttttgagttgactgccatctggggagagaggacatttgaagagacccttgagatggctgaagtggaaaatgcctcgtcctttgatgctgatagctggttccttcacccagttgtatctcgatacatggtagatgattctattggaaaatttgttgggtttgcatcccagctacatcttctagtaaatgcatatgaatcatcagtggaggcacaatttctagaagactttgttgcagatacttcaggccaggataatgcaaaatctactgctactgtgcctccaccatcagttattgatcgtgttatgaaagatcttttcagtgatgagactggcaactatatggaagcagaaaacaagtatagtcgtgctatgcgaggtgcacctgcagattcactttttggccagttctgtttgcatgcactgtggtttggcaactgcaatatatgcgcaattgctacactatggattgattttgtgcgggaaattcgttggtgctgggaggaatcagaaagattgcctaggatgaaaagcacttcaagcattgatctctcttcttgtcttatccaccaaaagttacaaatgctcacgatatgcattgagaggaagagatcactgaaccgtgagaaaggtactggctacaaagatgagacttcaaatagtacggcagtgaacaagtctaggaaaggatcagctggtgttgtgcctaaaatgatgctcctgaatacgtttcaggaaatgcatgctccatatactcagttccttaggatgcacctttgatgaccgaagatatgcatgaagaaaggctccatgcagctgaagcttttggcaatgccattggtctatctggacagctggaaagggatatattatgttccgatatgtctgcttttaaagctgcaaacccagatgctgtctttgaagattttattcggtggcattcacctggtgaatggttgagcgaggacaaaacagatggtaatgcaggctggcctcccaaaggaaagctttctcaccgtatgtcccaacatgggaatgtgtggcgcaaaatctggaatgatgctctgccattgcctgtttctgaacagaagtctttgcttgaccctgttcgggaaggagaaaaggtgcttcattaccttgaaactttaaggccacagcagctccttgaacaaatggtgtgtacagctttcaaatcatcagctgatatcctgaataagaccatgtatggtggcttcaaggaaatgaagacaaaaatggatcgactatatgtcaccatggcgtcaacactgaaatcttttctagggaattctgatgtcaatgatttggttggaggcctgaaacggctttgtcaagtttttgagcacatcgagaagttactgattcttgctgcttccatcaatcggaagcttattgatgctccacgactagctcaagcaatattttacgactactacaacttctaccttccaaaaatgggaactagcctggaaagcatttgctatgagaaggagttcacaactaaggaaaaggtcgggatgtatgagagagatgctgtgtcgaacctgtttcctccccctactgctaatcagtcttggaggaaagttttgagcatgggaaatcttctgaacggccatgaaccgatgcaaagggaaatcatattctcagtccaggagagaataagcaacggtcattattcgagcccaaccccattatgtaccaacaatgagaagatccagacacataggatgtatatatctgggacatctaatgacctttgggttgcattgtctgtaacgtcctgggattgagctgcacgatgtatgagaggagcaattggtgttttaattagcttagaatcccgttggtgcagataaactatcattgtattttttttttgttggatgtaccagaagtccagaaggggccaccaggacatggctagtgacgcactgaggacaagcatccatttttgacatcagatcaaagtattgattatttacgtcttgtagcagtcagaactcagaaatgctaatatattcttggcttcctctagagaaatggttgtagacaagctctatttggctgacgtttttggtctgttaggtggtgggctggtgagttgcaacacacacactggggttgatgtacgtaaacatcttgtatgacttttgcaatgagctaggctttgttcaatactcgagtccatgaaattttcaatatttgatatctgcccgcatttttttagatgggttcatcccatgtattcgcagttcgcac

SEQ ID NO: 37111 - DNA, 1113 bp, Zea Mays
catgccacagattattataaaagatttcagtcctccatggacgacacgacgaaggtcgtccgacacaaaggtacagctggagagccctgtcgcacccgcacccgcacccgcacgcagcggcggcagcgcagctgcgcagatcgccatctcaattctcgacccaacccccacgctggccgctgcactgagcagcaaccaccagtccttctgtccgcagcctaccacacacgccacgcctcgcctccggtctacatggccggcgaactgcgccaccgccgcgcgccgtcggaggacgagggcgtcgcctcctctcaaagactcgactccgcccccgcaggcaacggcaaggctggcacttcgtccggcggcggcgagggggcggagccgcggggcgggaagagggacgcgctagggtggctggagtggtgccgcggttggatggccatcgtgggggagttcctcttccagcgcatcgccgccagccacctggccaacccgctcgagttgcccccgctcgatggcgtctccatcgtcgtcaccggcgccaccagcggcatcgggctcgagatcgcaaggcaactcgctctcgctggggcacatgttgttatggctgtaaggagacccaaggtggcacaagagttgattcagaagtggcagaatgaaaattcagaaacaggaagaccactaaatgccgaggtgatggaacttgacctgctctccctcgactcggtcgtaaaatttgctgatgcttggaatgctcgtatggcaccgctgcacgtgttgatcaacaatgctggcatcttcgctataggagcatatatatctaccttttccattctatgtagaaccccaacatttttcgaaggatggacatgaagaacacatgcaagtgaaccatcttgcacctgcattactggcgatgctgcttataccttcccttctccgaggttctcccagcagaatcgttaacgttaattcaatcatgcacagtgtaggttttgttgatgctgaagatttcaacttgagaaaacataaatatagaagttggttggcgtattcaaatagcaagttggcacaggtaaaatttagtagcatgcttcataagagaatcct

SEQ ID NO: 37112 - DNA, 2088 bp, Zea Mays
gagataagcgtgggcctaccaaccacacatgtcaattctcggaatttctcagaagattggagacgggcgttctcttttcatttggagttttggactagtcgaactgacgaactggcagagcgttcaggatagacatggctgccacctttgccttcatccctctcctgctactggtctgcgtccagagcgcggctcctgttctcggcttcacaaggagcgagttccctgaagatttcgtcttcggatccgctacctcggcttatcagtatgagggtgctgttggtgaggatggtaggagcccaagcatctgggacaccttcactcacgcagggagaatgccggacaaaagcaatggtgatgtagccgccgacgggtacaacaagtacaaggtgtccaagtccatgttatgatttaccagctggatctccctcagatcctggaagacgagtatggtggatggttaagtccaatggttgtggaggatttcacggcatatgcagatgtgtgcttcagggagttcggtgacagggtttcacactggaccactctggatgaagtcaatgtggctgcaattgggtcctatgataatggacaaattgcaccgggaagatgttctgatccatttggaacaaaaaaatgtacagtggggaactcaagtgtggagccatatatagcagctcataacatgctactggcacatgcatcagctaccagactgtacagagaaaaataccaagctgtgcaaaaaggagttgttggtataaatatatatacaatgtggtcatacccactaacaaactccactgccgatttagaagcaactcaaagatttctggacttctattccggctggatactagaaccattggtgtttggagattatccaagcgtaatgaagaagaatgttggttctcgccttccgtcattcagtaaagttcaatctgaagccattcgtggcactctagatttcattggaataaaccactattattctttctatgtgaacgaccgccctttagaaaaaggcatccgtgacttctcactggacattgctgctgactatagaggtaaaacagtttgtcactcgatacatgattatccttttattgcttgcaattctttagatacattccctgggacttctgattcatttatctagagtcacacacacaatggcctacagaagttcaaaacggtgtcacatggaccaaataatttgatgatacttctgaaacatattcgcaattttatgaaacctacaagctaaatgctgtatataacaaaacaattatctgaaacaggttcgagaactgatccgccaataggtcagcatgccccaacatctattcccgctgatcccagaggattgcaacttttggtagagtacctgagtgaagcctatgggaaccttcccatctatatccaagagacaggttatgcaaccacaaacggcagcctccatgatactgacagggttgattacatgaagacccacataagcagcacattggctgctctaaggaatggggctaatgtgaaaggctacttcgcgtggtgcttcctggacgtcttcgagtacctgtcagggttcatgtcgcaatacggcctgtaccgtgttgatttcgaggacgaggcgctaccaaggcaagcaaggctatctgctcgctggtattctaaattcctagagaacaaggggatccatgtagaggacgagcttgatgatgcgggatcacacgttgagcaataagttttctacagcgacacattgatctgtacatcctctagcgagactattgaatactactgtgcgttgcaataagaacacttatattaaaaaaacaaattccatcaaaacctctgtccaggactccaggtaaacaccaccacaatattagggacacggtcctgccagaacaagggaccgtttgtacaactcaagcccatatctgctagagtgtgaggagaaatttcattatttgggtcttaattcggcttcctgtgatctttagggcctgttcgtttttcacggattcaagccctggaatagttcctagccggattacttctctaatttatataaattttgat

SEQ ID NO: 37113 - DNA, 1235 bp, Zea Mays
accaacgcctaccgaccaaattcggcgactgcttctccatccttccacgaattacacgaggaaagaacgctgataaacaaatggcgtaaatctctatcgacgaagctgtggaggaaaacgaaggatctccccgtgcttgtgcatgccagatcgcctgctctacgtccgcatcccgtccctcgcgaaactcggcactcccagggaaatggtgattgtatcgtactattctggggggaaagcgcaattatttgagggcaagttgattcatcatggaggggtgtgcaaaattcatggcttcagacaccggcaagaagctcattcagatcgatgtgagctcggatacagtgtgcccttggtgcttcgtcggtaaaaagaaccttgagaaagcaatggagcaaagcatgggcaagtttgatttcgaggtccgttggcatccattctttctgaaccccgacgcgcctaaggagggcgtcaagaaatctgacttcttcaagatgaagttcggtcctgtccaatatgagggtgcgatgtctcgcatgactgagatatttcgaggactcgggcttgaatatgacatgtcaggattgacagggaacacgatggatagtcataggctcataacacatgctggacaccaaggctatgacaagcaaaatgctcttgttgaagaattgttcctcaattaccattgccaaggaaagtacattggtgacaagcaggttttgctggatgctgcaagaaaggtgggcatagaaggggccgaggaactgcttgaagatcctaccaaaggagtccatgaggttcaggaagagctcaagaagtactcatcggacatctccggggtcccacattttgtgatcaataataaatatcaactcagtgggggccagccaccaaatgaattcatgagggcgtttgagatggctgcaaaagatggagcttaatggcgcttatttgcgagaaaaaactgtggaaccagttgtgtttcgtagttttgatgtggtgatattagtgacgaagatggtgtggatgttcacttttgaatagagttctaggtgattggatatggaacatgggttatgtcctgtaaatagaggccagtctgtatatttgatttgatttcaaccgaaagctgtggttttcagaacctgagatttcagcatgaaaacctattgtaagcacccctgcggacattaacatcaagaaaaaatctataaaaataaattttcgcaatg

SEQ ID NO: 37114 - DNA, 273 bp, Zea Mays
gccgcctctctctgctcgctcggcttctagctccatggccgagctcctctgctgaacgctgctgctcggctccctgttggaactttgtcggcgccgtctagtcatgctccccgccatcgtctcacccttcctgcttgccgtgtgtgggtctacgcactagccgcgctcttctgttttctctcggcgtgcccagcgtcgcgccctcgccagccgagctcccatctcccgtgcgcgtggccatctccctgtgcccgacgcccagctcgccatgga

SEQ ID NO: 37115 - DNA, 1775 bp, Zea Mays
cttccgggtccaaccaaaagttctgattcctaaactggcccgtactcccgtccaatcccaacccggcaacgcgagaatatatcaatccatcctcgcgtcgcgtgatctcatctcgccctcgctcacctacatctccgtccgcaagcgtcagccaggctgccccgggaggccgggaggaagcagatcggagaaggcaagccacggatttccttctcgccttctggaccccatgtgatctgttgtaatggctcgattgtacatcggcaacctggatccccgggtgaccgctcgggagctggaggacgagttccgcacgttcggggttcttcgcagtgtctgggttgctcggaaaccacctggctttgcgtttattgattttgatgataagagggacgcagaggatgcaatccgtgacctagatggcaagaatggatggagagttgagttatctcgtaatgccagcggtggtcgtggaggtcgtgaccggcatggtgggtctgagtccaagtgttacgagtgtggtgagactggccactttgctcgtgagtgccgtttgaggattggttctggaggtctaggcagcggaaggcgccgaagccgtagccgtagccgcagtcgcagtcccagatatcgccggagtccaagttacggtagaaggagttacagtcctgcagcacgctctccaaggcgtcgtagcgtctcaccagctcgtggacgcagctatagcaggtcaccacagcacaagggtgcacgtgaagaatctccctatgataatggataccgccgcagcaggagctagagccagatcgttgtatccgacgacgagcgttatgtgacagatattgggaaagctatggtcaataacctgcttgacagatccttcgtcgactgcttgactttggttaaggcatcgtcctgcactgcttaaacgactcggccgactacggctttcagttctgtcttcatggttttgttctgcgctctacattcttcgcacaccctcgcatgcttcattcagtctgccgtgtgttaatctgcctgcgtatcttctcgaagatgctgcgcatcgcaaaagcagtttggtctccgtgctgcgtgcgctgctcctggttcaggaactgcagtatgttagatggatgaggatgactgaatgactcacctactcacgttatcatgccttcagaggacccaagttagtgagcgccaggaagtgaattgaccaggccaaatgctacgttgagccgactttggctttgctctgcgatctccacttgccaacatgtgttgccttcgacgaagtcttcttcgccttccgcttccttctctgcagcatcctgattgatattcttcattcttcgagtgacatgcagtcaccctaattgatcgtcatagagcctgcgttgaagtcgaatcccccctaatggacaatgtagttaaattgttattagcttgtttcttgttggatagactaatgtcagatgctgtttggtataaaatggtaaccatctggttgatgattggcggcgaactatttgttcagcacgtggttgctatatgacaagtcacaaggtattattaacctgagtggtaggctgcatttggatcaaccaggctggttgagaggcagcatgtgcttgtttggttgctcgtccgtgcatctagtagcttaagttgaagtgtttggttaatggttgtatgtatttttgtgctcattgcaccgcggaatgcagaatctgggcagctcgcttgaaacagatttcattctcgtttcttcg

SEQ ID NO: 37116 - DNA, 3486 bp, Zea Mays
caaatgccccgtcttcctctgctctctctcccctctccctctccctctctcctcctttcgtctccttctcgcgtaagccttgccttgccctgccctcaaaatccctcacaaaatcatcacctccacccgccgcctctcccccaattctccccggcggcgcgccctccccgaggcaactcgaccgtgcggcggcggcgctccggctaatgcgcgtgctcccctcagcctttcctggtgattttgtgttatccgtgcgtcacacgtaactctgggtgccgtagtgttggtgaaactacctgcattgtgtgatcgagtttggcttcgtggactcttctggtactgatatggacgaagccccgggtaatcaggacaatctgccattccttggcaacttcactggagccatgttttatggggaacaatctgcagggtgttcttctctcgaggcagggtgggttcctatgagtgaaaggatccctgctcagcatgatatagcaatggcgcgaggtaactggaatggtctgggcataatggacaatgccaatttgtttgatgagcaggcattggtatctgcatttggtaacatgggattgagcctcactggtaatgctgctgctgattcttctgctcactctggcactgttggatccagggatggactcctttttgcagactctttgtttacatcggctgattacccaacaaatctgccacatcagccagcgtttggtcaagatgagtttgtgccttcatattatacggtccacaatgctggacacatgaaaacaaagtttggtgcacaaaatcctccaatgtacacagggatgcatggcacagataatgcgtttgtgactagaaccaatttaccgcaagctttgtctttccagcaacatcatattattgatacgcagccacagacatatgcaccttgttatcagcagatggactataaatttaagcggcatgatatcgatgccgagacgaattttttcatgcagccacagtatccttatcagcaatatccacaggctgctgatgttcattggatcaatagcaatcagtatggtgttatcaactcatcagacaagtatgcagctgcgcctcaccgtggagtgcctactgttcgtcatctgggacatggcagtcctgatatctacaggaatggtgctgtaattcctaatggaagtaaccgacggggtttgacacatgtgaataactgtccttttataagttatcctgactgcttatgtgaaacctgtgaatattgtcagattcatctatctgaaaatctcaaacgttcatttgcgctcagacatacacccaaatgttcatcagacgattgcatctctgataaagcgaaaagttcaccgtcatccttggattctgtggccatgaaatctgcccaactgccctatagttcagttgatgaagttgttggggaattgtaccacttggcgaaggatcagaatggttgccgtttcctccaaaggatatttattgaaggttctcgagaggatgctcgaaaggtctttgatggtgtaattgagcatatcgatgaacttatggtggatccatttggaaattatttgatacagaaaatatttgagaagtgcaatgataatcaaaagatgcatatactttatgaaataaccaaaatacctggccagctaattgaagttgcatgcaacatgcatgggacacgtgtggtgcaaaaggtgatagaatctattagtacctcagatgaagtgtccatggttgtatctgctctgagccacggtgccattactctgatgatggattccaatggctgccatgttgcagaacgttgcttgctgaagctgtcacctgagggcaaagcagtaagacattttttttactttaatccaatgtagccgtactcatgccttttatgttgtctgactgtctctaatcttccttttatcagctttgtattgttataactttttaccctgctacttataacttaagatcctttatggctagagcattggcttatacctagaaattacaaatgttcaaactgatgcgaactaatgcccataagaatagtgcctggcttgggttgttcttagatggaccatcctacttcctatgacaaccgtgatatattttgattagctttccgaagagtgtttcatcatttaatagcaaccctggtgtttatgacttgctgcacatgaaagcttgcagtgctgctaattgtctcaccaagttactttaatcagcatcttctattatatttgatatctctttcctgaacattagctatctgaatttgaaataccgtttagtattaatttacaatgttctctacaatgaagtcttgtttggtggaacataataggtactaacgatgtctgaattaaccaaagggtgttcaatcaaatcaaaatgttagaaagtgtaggacattgcatctttctccttttttatattaatattatgattgttcgagagagaaaaaaagtgtagccatgatggattctcatgctagttgtatcgaaaggacaagaaaaaaaaaggataatataaattgtgtacttggcgactcctacgtacgtagtttctttggtatcattactaccaaatctgcaaagccgattttggaccgttgcagttccttgtcaacgcggccacgaaatactgcgttgagctagcaaaggatcggcaaggctgctgtatcatccagaaatgcatcgctcatgcgagcaaggagcagaggaacaggttactgtacagcatcacaactcgggctctcgagctcgcagaagatgagtacgggaactacgtgatacagttcgtgctggggctcggggttgcctgggcaacgaatgaggtactggacaagcttgagggcagctatgggtacctgtcgacgcagaagtgcagcagcaacgtggtcgagaagtgcctgagagaagcgccggagcgagaacgcgcgaggatcatccttgagctcatccacgaccccaggctgcttaacgtcctggttgataagtatgggaattatgtgatccagactgcactccgggagtctgagggtactgcggtggaggctgcgttgatccgagccatcaagccacacgccggcgctcttcggaacaacatgtatgggaagagggtcctgtcgaaagcctgcctgaagagcaggaagccctgatcccaacaatcccatgccgtcctgatcgcgctcaagtgtagtacaaatcctgtaataaggtagtgttatctaggaatggggaggaggaggagagtagtctgtggggtctggttggaggaggaatccacattttgggccagtgtagaacgatcccatgcgtgttgtagctgtagagttcttgggagagttcgttgcaaataagtaagcgttgtgtcgttgctacgattagtattacgtccgtcagacgatgctctgtatcttctttacattttcttacagcagtaaaatttccattttctggtaca

SEQ ID NO: 37117 - DNA, 2608 bp, Zea Mays
aatcaatcaatccattttagctacgagaaagaaaggtgggggaagaaaaaaaggcagggaaagcggtgcgaggagcagaaattcgggggtgactagctagctgttcgtcccgtgtcccgttcctcctcgcccaccaccaccgcacgccggacaaaaccgctctcctcgccacattcgcagcccccctcgctcgcgcacacgccacaccacaccaccagtacactgctctacgccacagtacagcagcatccagcgggcggctggctgcctaatctttccagctctttcgtcccctcgccacgccgcccaccgctgccgcatcatccgcccgttgcccgccgtcgtcgcctggcccgcggattccgcccccattcgccgtcgcagcgcgccgagccccgtcccagatcgccgcggcgcttcctgccgccgtcggcgcggcgcagggttgaaatctatttgaccactcagttataaccatttctggtctgaagatgcttcgtcaatgacatctggaaactgtaatagtatgcgctgatcttctatgcttcaccacctgactatcaatgggctctttcctgtggaaacagcccagctacctcttcattttgataattctccaccttgttgctcatgaggcaagaacgctgagttcagatggtgaagcacttcttgccttcaagaaggcagttacaaattcagatggagtctttctaaattggcgtgagcaagatgcagacccctgcaattggaagggtgttagatgtgatagtcatagcaagagagtgattgatctgattcttgcataccacagattagttgggcccataccacccgaaattggaaagttaaatcagttgcaaaccttgtcactgcaggggaacagtttgtatggttcactccctcctgaactggggaattgtaccaagctgcaacaattgtatctacaaggaaactatttaagtggatacatcccttcagaatttggcgatctggtggaactcgaggcattggacttgtccagtaatacattgagtggatctgttccacattctcttgataagttgtccaaacttacattattcaatgtttccatgaacttcctgacaggagccataccatcttctggttcacttgtcaatttcaatgagacatcctttgttggcaaccttggtttatgtgggaagcagataaacttggtgtgcaaagatgcacttcaatcatcatcaaatggtctgcagtcaccttcaccagatgacatgattaataaaaggaatgggaagaattcgaccagacttgttataagtgcagtggcaacagtgggagctctcctattggtggctttaatgtgtttctggggttgctttctttacaaaaattttggaaaaaaagatatgcgtggtttcagagtggagctctgtggaggctcttctgtcgtgatgttccatggggacctcccttactcctcaaaagacatcctcaagaagctagagactatagatgaagaaaatatcattggagcaggaggcttcggaactgtttataaacttgcaatggatgatggcaatgtctttgctttgaaaaggatagtgaaaacaaatgaagggctagatcggttctttgatagagaacttgagatattgggaagtgttaaacatcgctatttggtcaatctccgtggttattgcaactccccttcatcaaaacttttgatatatgattatcttcaaggtggaagcctggatgaagtgcttcatgaaaaatctgaacagttggattgggatgcacgtattaacattatacttggagctgcaaaagtttcgaggcccgtgtatcagactttggacttgcaaagcttttagaggatgaagaatcacatattactacaatagttgcaggaacatttggctaccttgcaccagagtatatgcaatttggcagagccaccgagaagactgatgtctacagttttggggttttggtactcgaaatactcagtggaaagcggcctactgatgcatccttcattgagaagggactaaacattgttggatggttaaattttcttgctagtgagaaccgggagagggaaattgtcgacctgaactgtgaaggagtgcagactgagaccttagatgccctgctctctcttgccaagcaatgtgttagctcctcgccagaggagaggccgacaatgcacagggtggtacatatgctggagtcggatgtaattacaccgtgccctagcgacttctatgattcagagtagtctcctggacaagccacgctgctgctagtttcccgtgggggcgcattcctttattctttgcgtatattgtgtaaatgcattgccgcggtgtttggtctccaatcggctggctcaacgggtgacttttttttgcgtctgtatacctatgtatgtatctgtcatggtacaagttggctatatgctgatttaataataagagagaacttactagtagactattgtatgtttaactatagtctttagatactcgtagatgttgtgggatctacaaaagaaatggggaaataatgaatatcgcttggaacaaacaagaatagataaaactcttttggcttggaggat

SEQ ID NO: 37118 - DNA, 2743 bp, Zea Mays
ctgtattccactcccatcacgcgtcgcactgccacaccgtggcgcagtgtggccgtcgctgtcgagcatttgaaccgcgtcaaattcaaagcatttttaatgcgtctcagcgtctgttgtgcgtctggctgcctaatccaaaaattgcgtcaaatccgaattttcattccgtgtatgcttggccgcctaatccaagttcttaaggttcggtgcgggggaacggaattccgaattccaagcccgcttcccccaacaagagccctcgagatcggaatccgcgagtaaaataacccgcaaaagggtgctttatttaaagggatcagtgtgactgagaggggagggtttccagtcagtcatttatgaatcctgaggcctgtgcttactagagggagggcaaggctcgttgggatccgggatgaaggggagaaatgactcggggcacagcaagaggccggttgtgctgtgctgtgtgatgattgtgtgcctatgtctcctcttcttgtatttctcgggctccaatggacaggctgggagcgccgcatttgagtacgggaccaaattctcacggtcacttggatggggcagtgatgatggtgaggatggctctgaagagtccatttttggaaccggggatgcagatgatgtcaagcccaagagctttcctgtgtgtgatgaccggcactctgaactgatcccctgcttggataggaacttgatatatcaaatgaggctgaagctggatttaaacctgatggagcactatgagaggcattgccctccacctgaaaggcgttttaattgcttgattcctccaccacatggctataaggttcctataaaatggccaaaaagtcgtgatgtagtgtggaaagcaaacattccacacactcaccttgcaaaagagaagtcagaccagaactggatggttgaagctggtgaaaagatcaagtttccaggtggtggaacccattttcaccatggagctgacaaatatatatcaaatattgcaaatatgctaaatttcaaggataacaatataaacaatgatgggatgcttcgtacagttcttgatgttggttgtggagttgctagttttggaggatatcttctttcttctaatgtgatagcaatgtctttggcaccaaatgatgtgcatcagaatcagattcagtttgcactcgaaagagggatccctgcatatcttggtgttttgggaacaaaaaggcttccgtacccaagtagatcatttgaactagcccattgttcacgttgtaggatcgattggcttcaaagagatgggattcttctgcttgaactagatagattgctcaggcctggaggttattttgcttactcctctcctgaagcatatgcacaggatgaggaggatctccgaatctggaaagaaatgagtgcccttgtagaaaggatgtgctggaaaatcgcagagaaaagaaaccaaactgttatttgggtgaaacctctggacaatgattgttacaagaggcgagcacatggtacaaagccacctctatgcaaaagtggcaatgatccagattcagtatggggagttccaatggaagcttgcattactccgtatcctgaacaaatgcacagagatgggggaactgggctagctccctggcctgcccgattgacagccccgcctccccgtcttgctgatttgtacattactgctgacacatttgaaaaggacacggaaatgtggcagcaaagagtagaaaactattggagtttgctgggcccaaaggtaaaaccagacactattagaaacatcatggacatgaaggcaaactttgggtcatttgctgctgcactcaaggagaaagacgtatgggtgatgaatgttgtgccacatgatggaccaagcaccctcaagataatctatgatagagggctgataggcagcaatcacgactggtgtgaagccttctcaacctatcctcgaacatacgatcttctccacgcatgggcagtcttttctgaccttgataaaagaggctgcagtgccgaagacctgctccttgaaatggatcgtatcctcaggccgactgggtttgccatcgtgagggacaagggcaccgtcattgagttcatcaagaagtacctccacgcacttcactgggaggcattgactgtcgtggacgctgagcccagcccagaatcagaggagagcgaaatgatcttgataatccggaagaagctgtggctaccaaaagcaggcccgcaggattccggcacgtagttcttctcgtacctgttcctctcccagcacctgcagctcagaagccaggcgcagctgcaccatccaaaatggttcgacacttgtagctcctgagatagagtcagtcatgatttctagccctaccgcccacatgaagataggttgtttacgaggatactgcaagtagtatgtagcaggcttggattaaaaaaaaggcccttttttgtcgcgacagatatggattggtgtttgttatctagtttggttaggaaataaacattctttttcttttaggtgtttcgtgtcctttttttttgaagtctgctatagtctgtagcaagtgtatttggtgttttcttgaaagaactactgcgctcacatttttgggatatgtgctttgccctagagcctcaaggctgcgggtcctcagctcgaaactactcgtgcaaatctcaaccgggagagcacttcaatataaacaggtaattttacagcaca

SEQ ID NO: 37119 - DNA, 2965 bp, Zea Mays
atcttcgttctgagctctctctctctagtctctcccgtccctacccaccaaatctcgcagtcgcagcaggtccaggtgctcccgaggaatccattcccaatttgcgttcccactcccaccaccgcttcttcccgtatcccttgtcctccctaatttcctctcacaaaaagcgggtgcggcgtcctgccactcacctcggtctcggggggcgccgtgcggcgggcgcccgtgctgctggtttcgctccaggggagaaggggcagagggagtagagcaggttaggtccgtttgcgttttcttttgcgggtttgtaggtcaaaagctcggcgagcactttccgctccacctcctcacgctcggaatcaaatcgatgccccccctgatttggttcctggtatcggtgcatgagcttgctccaagagatctcccttttggttcggcgtcaggggttctgtgaggtcacgcggcttcttcctcttggcgctcctcacatgtccgggcgcttcgatctctgcccactgcgcgagtgattctgctgctgcagcagctgttaggtgcgcgcggtccgttatggggtgaaccgaagcgttcctcgcagggctgtgggtttattacgccgcctgtttgcttccccgctccatgtccttgtgcccatgcttctttgcttttgtcacgcctgaaccgtgtcttcttgtagtatctgaggcttggcagttggcaagtacaaactagcaacttgcttaggtataaagtataaaccagtgtctggtgcagagcccaaaggggtcacgaatcgttgatgcatagatctgcttctggctgagataaggctctaagttcgctctgttgatggggctaccatgagccacgggaacgggatgttgaattctgtcaaggtggagaggtggccagcagcagtcgctgcaaatggccagcctaggccgatggatgtgctccacgacggcagctcgccgccgttccttaccaagacgtatgacatggttgatgacccaaccacgaacgccgttgtgtcatggagtgccgccaacaatagctttgtagtttgggatcctcatatctttgggacggtgctgctgccaaggtacttcaagcacaacaacttctccagctttgttcggcagctcaatacttatggcttcagaaaggtggatcctgacagatgggaatttgctaatgaggagtttctgagaggtcagaggcacctcctcaaaaacattaggcgtcggaaacctccacactcatctccaaatcaacaatctcttggctcttacctcgaggtaggacactttggatatgaagaagagattgatcagctgaagagggataaacagctcttgatggctgaggtagtgaagctgaggcaggagcaccaaaatactagatcagatctacaggccatggaagagaaattacaagataccgagcagaagcagcagcagatgatggcattcatggcacgcgtcatgcagaaccctgatttcatgcgtcagctgatctcccagcgggagatgaggaaggagctcgaggatgccatctcgaagaagagaaggcgccgcattgaccagggacatgaagctggtagcatgggcactggttctagcctggagcaagggccacagggagtgtttgaaccgcaggagccggtggaatcactcgccaacggtgtgccatctgatctggagagttcgtctgttgaggcgaagggattggaggttcgacagggtgtttcttcaggtggttctgagcatctgaatggcaggccaagcggagagttaaatgatgatttctgggaggaccttctgcacgaggggggacttggtgcagatgcaggcaatgctgttggtcaggatgatatgaacatggacatggacccagatgttagcctgcctcaactgaaacaacatggacccagacattagccgctcttgtgctatcacaatggctgtgactctgttgtttggcgcggtggacggcgtattctgcatgttccagggaacaattgcgaacgttgctgtgctgaagcagcagtatgggttgagcaaaggcgctaatgaggtcagcatcatcatcgaggcttacaggaccttgagggacaggggcccttatcctgcagatcaggttgtgagggacataagtgggaaatttgcatttgtcctgtatgattgctccactaagtcggtcttcatggctgctaacagatgcagctgttcagttattcccgaagacatatatctgatcacaggctactgctacgacgtacaatggtaccactggtattgaccggcaactgataggtagctcagctcgtgttcgtaacctcataacaggacaccgatggaaatgttccgttctactggggcgtggacaccgacgggcgtcttgtggtctctgacgacgccgaactcgtgaagagtgcctgtgggaaatcctgtgccccgttccccaaaggcttcttcttcacgacgtccggagggctgaggagctacgagcaccccatgcacgaggtgaagccggtgccgagggtggacagcaagggcgaggtgtgcggcacgacgtacacggtcgacgcaagcgccaggaaggagaccaccatcccaagggtcggcagcgccgccgactggtcttcgcagtactaaaattcgttatctttctctgtgtgtgttgaacgggttcgagcgcaggtagcagggcgtcgcacgggcgtggcccgtgtttgttcgcatggaaaccctagctgtctggtgtttatctgaatgaatagactgttctctatgaatcaacacggatttctctctaagttcacatgatttccgttgctgctttgctgcacgcctgtactgtaacaagaattactgcctttgttatcaggaaataagttcacatgatttcctgtctgcagatgcgctgccagtcgagcatccttgaggaaggatagggataaggc

SEQ ID NO: 37120 - DNA, 226 bp, Zea Mays
gttgttcatagtatgcgggacagtgtattataaagtaaatgggacataatgggtcagaggacacttgccttcaccaaacagatgcttagggtcttcaaacttgtagaactcgaagagcctgatcacttggtcgccaacgcttgatcttcgattcgtcgaagcgcggaataaatcgcgatctaatcgcaacgcgaagcgaagacgaactagtacaagcaaagaaaca

SEQ ID NO: 37121 - DNA, 1443 bp, Zea Mays
ccaaccctagccgccactacctgctccctctccctagcagccgacagctgccatccagcgccaccaggaaagccgcccaggcgccccgcctctgcatccgcccgccaggagcagcgcccctgcaacccgctctgaagactcgacgcccagagccgcgcgcaaccccgttcgccgccccgccctccgtctcccgtcgcctcgcccctgcgctccgtcagctgcccctccccgtcagtttagatggtcggtcagccaccagggcctccccgtccggccgtcgtgcgtccaacagtcgggcaccggcgggcggcggccgctcgcccctgcggcttgggcgctcggccacagccagtgcgggccgtgcggcagtgtccactcgggcctcggccagctgctagctaatcctaatcagtaattacttttgcactttgtggacaagaagttgtgaatgccttcagtgctgcagtgttgggcctatcttcaggttgtgtttcttctcaagtcaaccaagagcagcctcatgatggttcccctcctctgagagaagatgacaagaatgggcattatgtttttgctgttggagataatctcacatctcgttataagatcaatgcaaaaatgggagaaggttagtttggatgaccatatattctgaaatagttgatttaactcgattgggcatgccaatacattcaacaaattttgtctataactgaatgtagctgggactacttggtgtaacctgttagcccctttgatcttattgtgcacacagaaaaaagataactaattttatgagataattccttgcctttgtttgcaaaagtactttggccgataagctggtgttgactaatcattgtatgttgattatgtattcaattcagcatggagttcagtttacttgcatactggctaccatgtatacagaatgctagtgtctgctgacacgttcttttttgcttgttttttgtttgctcttctcaaaaatatagtctacaggaatcagtggtcttctccgctacgctcctgaaatatttgagcagtctggagtggctagtttgttttcagacattggactttctcctcattcaacatcaattctcatgagtacccttaatgctttgctgatactcccttgtataactgccgcaatgctgctgatggatgtctgcgggagaaggtagaatctgagacaccatgaaaattagtgatgcagttgtggacttttgaacaatagctggagtgatatgaaacattagtgatgtagttgtgggcttttgaactgcttcaagctggagtgatgtcgctgtggtgcttttgtgactgatctagctagctatctgtaaatgatctagttgtgaatgatattataattgtgatgtttttgtgaatatataattgtggtgcttttgtgtttatgtgatggatctataactgtgg

SEQ ID NO: 37122 - DNA, 1306 bp, Zea Mays
aaccgacccggcctagcggcggcggcccactccagtacgcgtacgccaccacgcgcacgccaccctccaacccaagcaatcaggcgccgcgcagaggtagtaaggcaaggaacgcggcgcgaccggaccacaccggcaccgcccgtctgaccgacgcaacccagccgtccagacgcgccgccgaccgtccttccaccaccacgcccgcgccgtcgcacgctccctagggttccgcagggccggggatcgccggagatggactggagcgcggtgacggcggaggacttggtggacgcgctgcgggaggtggactggtccatgccgccgcggcctgtcccggagttcttctcccgcttcaccgtcccacgctcctactccaagtggaccagccgcctcaagtgcaacctctactactacaggacaaactatttcatcttgatcatgttcatccttgggatgggcttcctttggaagccagttgctatagttgctgcttttatgactggacttagcatcgcatttctcaatgatagttttgcagtcactttcaatgagaaagtcacaaggaccgtaagacaattttcaccacatttagctgcaaagttgaggccacctataactcctgttcttcgcggtcgaccaagctctaagagatcaattcatatttgtgggcgacctcgctgggtgtttgtcctgttcttttctgcagtgagctgtatactctggttgacctcatgcagtcttctcacagtcctctgggcacttctcattgctctatttgcaactgtgctccatgcaagcttcagaacaccaaatctcaaagcacgtctgaatacattcagagaggaattccgggctgtttggcggaattatagtgagctttaagggtttcctttgtttctctcatgttcatgggtaatgaaggtgtctggtgccgttgtttgtgagctgtgctaggagatctagttgaaggtgaaacgccattgcacattacatggactacttgctctcttgggaggtgggattctggttgggttgactccgaatgcgatgctatgccagcacacgatccttcaagaacagtagttttctttcgtacttctccctaaccgagcattagagagaggacagcatgtaaaggatgtaaaaatgtacttgttctcgatcaaaaagtatgttgtttgttgaaattattactaatttgtattgcatcctcttttggatcatttgttaggtgactatcattttgcttcagcatttttgtcgagttagttacatcaaataaatcaaaaattctaactctatt

SEQ ID NO: 37123 - DNA, 1682 bp, Zea Mays
gtctataaactcacccgacccgtagggcacgcacaaacatgtgtcactcaccagcgctttccgtcccgtactcccgtgtaccctgtcccgtcctcctagctcgcattccgatttccgagttccagccagcgagcgagccaaccaactgaaccaaccaaccaccgctccttcttccttccttccttccccagttcccctcgtctcaccagtcaccaaggttccgagagcagagcgagataaaaaaaaaggtaatccgacggaaacgacaagggcgcggcgagggcggggacagggtcgggaaggccctgggcgcgggggcgccaagcgcatggcatcgtcgagggtgatgccgtcctcctcgccgtcgcacacggcctctgatctcgcgcgcctagcgcaggccgccagcaggcccggcggcgggggcagcgggctgggctccatgaacgtggaggagctcctccgcggcatctacagcgacatgcccaccccggcgccgcccgcgtcggagcccgaacgcccgaggtcgccggccccggcgccggaggtcgccacgcggaggacggcggaggaggtgtggaaggagatcaccggcggaggtggcagtggggaacccgtgccccccgtggcggctcaggctgccgtccccgctggtggtggtggcgccggcggcccggagatgacgctggaggacttcctggccagggaggagggcgcggtgaaggaggatggggttagggtttcgggcccctctgcgccggccatggggttcctgggcggagcggagggcgtgggtgtgcctggcggcggaggcgggaggggaaggaagcggcagctcatggatccagtggatcgcgccgcgatgcagcgacagaaacgaatgatcaaaaaccgcgagtctgctgcccggtcacgggagaggaagcaggtgggtgcacagatgttgcaatttaacgtgattgttaagcttccaattgtgcgaatgtaagtggggaatttgtttgtcttttgctcggttgctgaaggcttatatcgccgagctagaatcgctggtaacgcacctcgaggaggagaatgccgagttgttgagagaacaggaagagcggcaccagaagcggcttaaagagctcttggaacgggtgacgccagtcattctgaggaaaaaaccatcaggagatcttagaagaacgaactcaatgcagtggtagattggagccaagctcagtcgccgtctctttacagttataacatagaatttgcccctgtatgtcatttttctatttatatatgcgccaactaagttgtagtatcttagctgaaatagcatgggcaattagccgacacaaaggttaaacgaaatcatattatgtaggagtgctcatgaccaagaaaggttgctgttcctgcctgctcgtgtgttcattctgcctggtttatttttaagattttgttgtcaacatggcaggtaggtttggcaaggaagtagacaatcgtactccaataagcaggcctactttaagtgaaactgaaacgtcataatgctacgcagcgtctcggggcgcctacctgtggcttacctgcgtaaactgaaacatcgtaatgccagggagcttccagaggcgtgtaccttgttggtgcttgaatgatcaaaatattcaagataaagcgtgaacttgacgtga

SEQ ID NO: 37124 - DNA, 1878 bp, Zea Mays
cgcgcggcttccactcgcgccggcctgcctgcctgcctgcggccgcaggcggcttccgttgccgccagggcaccgcccgtgacaccctgatctcccctcacctactcctggattcgatcccatccagcccgtcccgtccctctcccacccttttcagatctgcctgcgagcccccgccacgcacccccatgcccatgcccatgaccccccgacgcgaggccactactgccaatggctccctgccgtgaccgagcccatggaggacctcgccccgggggccctcgcgctcttcgccgccgtcgctgacttcatagacgactccgctcccgctgccgccggggccgggatgccaccgccggagcccgagtccgcgcccgggagtccctgctccgactgcagcagcgtcgccaccgccgacttcgagggcttcgccgacctcgcctccacgctcgtgctcgacgacctcgtctcccccgcctccgcctccgcctccgccagctcgctccccgcctccgggcccagggccgccaggagcgtcttcgcgctcgactgcgtgccgcgctggggactccactccgtgtgcggccgacggcccgagatggaggacgccgcccgcgtgctcccaaccttcttccacgtcccgctctggatgctcgccggcgacgcgcccgtcgacggcctcgaccgggcatccttccgcctccccgcgcacttcttcgccgtctacgacggccacggcggccttcaggtcgccaactactgccgggacagaatgcacgaggtactggccgaggggctcaccagggcagagcaggccgtgtccgacgctgacttgagtggccttgaccctagtactcacgagcactgggagaaggtctttgtggactgcttcagccgtgttgatgcagaggtgggaggagacgcggcgaccggaaccaagcctgtggctccagacacagtggggtcaacagcggtggttgcgctcgtctgctcatcgcatgtcatcgttgccaactgcggcgactcgagggcggtgctctgccggggcaagcagcccctgccgctgtccgtggaccataaaccaaacagggaagatgagtatgcgaggatcgaggcccaggggggcaaggtcatcaactggaacggctaccgagttctcggtgttcttgccatgtcccggtcaattggtacctgaagccatatataatcccagtccctgaggtcacaattgtcgcccgtgcaaaggatgatgagtgcctaattcttgcaagcgatggcctgtgggatgtaatgtcaaacgaggaggtatgtgatgctgctcgcaagcgcatactgctgtggcacaagaagaacggcgacgactcagcgtcagcccaaagaagcggtgattcggcagatgaagcagctcaagcagctgctgaatatttgtcgaagctggccctccagaaggggagcaaggacaacattaccgtcattgtagtcgacctcaagtcacatagaaagttcaagagcagaacataaccacggattcggtaagacttggacagtaacaatagacgctaggaaggttgagaaaatgctcctgtttaccctttttttttctttttctttcccacaaccatataggctgccacgtttgatcagggtacagattcatacacagatgtaatctggttggagactgggctggctaggtaaggtggtcgattctagggtccaaatcttagaaataacatacatatgtagattccaacaagtagttcactgattgggtttggggcattgtttctgttattaacaggtaaaggtacaatagaaactgccacccctgaactacctaattgagcactgtatctgtgctactggtgttttgacgtt

SEQ ID NO: 37125 - DNA, 1511 bp, Zea Mays
tttttttctttcttgaattgaacagctccccgtatcgatcagtttattcaatcctgccaccaagggcaagaaacgagttgctactaatttacaattttctttttgcatttactcgaaagaatcgtgaattgtttttttttcgcgctgctgttcttgtttcgttctttttacatttcgtccaatcgcttgcccgctaaaaacaacagtttgattttatttgccaacgacgactccgcgcctcgagagggggtcaagaagaaagcagcaccgccagagcacaagccgcgcggtgcgacgtcgactctccggtgagggcgacccaaatccgagcccgcgaacgccgggccggccggcctgccgctttaccgagagagggagagcacgcgctaccgtggtggctcgcgctgccgccggtcctttcttgccggagccgccgcgcgcgacctcctctccgcccaatcgttcagagagcagactgcagcacgggcacggcgtggcgcgcgacgagccgctccagcgcctcgcgcatccaccagtgcgggcacccgtccatcacctgctgcaccgttgcctgttccattggatcgcgagcgcacggtgcgcttgcgggacgccatctcgggccactggtggagctcgtcggcgacgcggagcgggaacatgaacccctcgtaggtctggtccacgtagcggcggctcttgtagtgccagaggccgaggaccggctcggtgtcgccgaggacgccggcctcctccagggcctcgcgccgggcggcctcgtccatggactcgtccacctcccacccgcccttggggaacatcatgccgtgccccttctgggacgtgatcgccagcacctccagctcgccgtcgcaccgcacgcggtacgggatgcagcccaccacgatgcgcccgccggtgctctggctgtaccgctgcagctcccgcccctgcctcgcgaccagcacggccatgatggagatacgcgggcggctactagctgattcgttctcgttgctctagcggctcgccggggtcggagctggagcctggagagtaaggtggaacgatgatgccgcagctgctggttttgcggccatggaggctggggatcaagggattttatagcgtgtcaagtcaatggaatgctgttggtgccgagtgattaactgatgagtaacatgcgtgggcctggagtatggacgcgaggactggctaccgacgtggacaagccgagcggatcggatcggatcttctgtggcgtatgttgctgccttcgcctcagcctcaaactcagaattgttagagacttcaatggatcttttggatgggcgccgctgggatagacgactgttgtaagatatagcttggcagtggacgtccctaatttgctgatctgccccaaattctggaggagccactgatgtcattctgcgtcgaatatctgcaaatcagttgctttctagcttgcatttgcttgttatagttcccgtcgttaagcgtcctgaacg

SEQ ID NO: 37126 - DNA, 1356 bp, Zea Mays
gttgaaataatcagtatgtgagatttgtcaagcctgcatttgatgcttttgtcctgccttcgaagaaatatgctgatgtgatcataccaagagggggagataaccttgttgcaattgatctaattgtgcaacatatcaacacaaaacttggccagcataacttgtgcaaagcctacccaaatgtctttgtagttcacacaactttccagataagaggaatgcatactctaattcgtgacaagaacattactacacctgactttgttttctactcagataggctgattcgtctggtggttgagcatggtcttgggcatttgccatttacagagaagcaggtggttacaccaacaggatctctttacatgggagttgacttctgcaagaagctctgtggagtgtctattattcgaagtggagaaagcatggaaaatgcactgcgtgcttgttgtaaggggataaaaataggcaaaattctatttcatcgcattggagacaatggacaacaactcatataccataagctgcccgtggatattgctgaacgccatgttttgcttttggaccctgtgcttggtaattcagctaatcaagccattgagcttcttatgagcaaaggagttcctgaggaccgtatcatttttctgactctcgtctcggcccctgaaggcatccattgtgtgtgcaagcgcttccctcatttgaagattgtaacctcagagattgatagtggattgaacgatgaatatcgtgtcataccaggacttggagagtatggtgatcgatacttcggcacagactaaccgatgactgatgctgttgtagttagcagtgtgaaaaggtactcaaattagagctgacattaccgtggcagatatactggtgtttggttgctttatggtatactggaagacaaacgtggataggtttctggtaggtgctgaaaccgtgaccgtgtggtcttgtccattatcatatgttttgataccacaaaccgttggttgtgaggcaaatttgttttttttttgcattttgaggctcctagctgaagtgcctgctcctcgtcacacaatactgttatacagccttgtgaaatgtatgactgaaccctgttcccggcatctaacagttgccgtggggtcacagctgtggttggaatgaaattcaaaggttgtgacaagacttaatgtgtgatgcagagttttgttgctttggagtatctataatgctttttgatgcattagtcgacatggattagtttacatttttcatttcccgtgcgcgcttggtccttctacccaggctcacctgagtaaatgagttcagttaactgtccccgccaaggcgccaagcaac

SEQ ID NO: 37127 - DNA, 966 bp, Zea Mays
ttcttgccttcttggcttcttgtatgcatgtgcccgtccaggtccaggcatccaggctcagcgtctagggaccagccccagccctggcggccggcgtggcggcacacagtgcccggcgcctccgtccacttcccggcccggcgcgacgttggccccggcgcctcgctcatccgctttcgtcttccggtgcagcacaggcgagtagcgcttgcgacgacccggcccgtcggtctccgctcccttccatcaaggcaagcagtcaggaagcccatatacgtacgtcgagtcctcaaagttcgattctacgaccatcgcacccatcttggcccaaagtacttccgcgccgcgctacgaacgaggccatccgccgccacacgccgtaggccatgccgctgaggtcggagaccggcactgctggggagggcgatgaggagcagcggttgcgggctgctctgcgtcacctgcaggcggaggcgggggtgctggagcgcctggtgtacaagcaccggaaccagcaccgtggcgccgcctatttccaatacctcctcaaggtgaggagggacctcaagcttctgctcggcgccggcctcgcggaggtcctcaacgccgtgttcccagttctcgcatgccgcaagccggccaacacgatcctcgtccccaacaagcagactaagaagaaacctggtgcaaaccacagccatcaccagaggcttttgggtgtagcccgcttgttatcccagatgtctgaacctgttatgaaggcagcaatgtatcctttttattctgcttgctacatcatgcttctgtttagtttcttaggtaacaaataggactagttgtgcacttgcacttgcacttggcttgcattaaactatactggtgtgtttggtttgtggaatcatcccatgcttcatgagtgcatcccatggatttttgtggaatcaagtaatcatcccattcctggag

SEQ ID NO: 37128 - DNA, 3205 bp, Zea Mays
atctgaggttatagaagcagcggcggagcacagccaacaaatgaggacttgcccgattgatctgaaggaggcagtagccagtgttatatttgcatcaatgcggtgttcagatgtcacagaactagcagatgttcggaagcatttcaaaagcaagtacggaaaagagtttgaagcagcagcccttgaagtgcgacctgacagtggtgtaaatcgtctgataattgagaagctgtcagcaggagcacctgatgtgcagactaaaatcaaaacattgagctcgatagcagaggagcacaacatcaaatgggagccaaaagcgtttgaggagaaactgcaacaaccaactgaaggtcatctgtatggttctgcaacatattctggaggaaatacttcaactatgggatcatctacttctagcatatcaacaccacagcctacatattcaggtgttagtgcggcacctgtggactcagccactatccatgtgccagcaaataaaactgcatatggcagtgccaattctaatactttttcgaaagaaagcattcataatagttccagtgcatcagtacctcctatctcccaacatgggccgtctgcttactcttcagcacaggttcctggttctaacaatatctcacatggaaatccaggaggtccaccttaccctcaatacagcgcaacagtcccagacgcagtatccaggaatgaagatagcaatcagaatagggaaagaaaacctttggtgactggtgccaattggaatgtggaattcaaggatgcaacatctgctgctcaggcagcagcagagtctgcagagatggctagcattgctgctagagctgctgctgaacttgctagtcgtggaaactattctggagataaaggcactggagcctatgattcagccgcatacagtagcaaaaacacagtgaggaagcaacgggcggaacatgtagtgaaggatgagagtttccatgaccagagttcaggtgttaatgatccaagcgagatgccaagtaactcaagaaatttttttggaggaacagaaacatcccatgttgatagtgagaatatatcgacagccccatatcaacagttccatgcctacaatccagacagccatccatatgtttatgaaatgccaactgaaccacctcgtgctcattcacctgacccacgttttgatgatttatatgagagggaaagtgacattggaagatctgaagttgatccgtttgattttcctagagaaaacttccaagatactgcatctgttgggcacaatttcaaggatgtggaaatcaggacacctagctacgatcaagaaagcacagatgactactatggtaattttaattcttcacatgatacattggcccatggcagcagcaccactgcttgggataagcaaaacgacaaagctcaagacaactcttcacctgttgtttttgatcaatatgattctgatgttgaacaagagaatttgttggacacattctcctcaaagcatactgaacaactacctgctcccggagatcatatgagattctcaactgcagattggagtgaacagcataccagtgaatctccatccaagcagagaacatggtggtagctctgatgaggaaatagccacaaccacgcatgcagtgcctttaaggtcacattcaggaggatctgcttcgtctgtcctgaacaaaggtggtggacctgatgcttcacccatatttgattattcaggagcacatgcagtgaggaacttgaaccgtgtgcaaagcagagattctgatctttcggaagaagagacagatttagataaatttaaaggttcatccttcgccagagcaaatgagcagcagctgttgccttctgccatacgtacttcagcaacttctgatgataaggaagatgacatcagcctgaactttggtaagttaacgcctggactaagaaacaaacccaggcaacccccaccatacaccaaagtttccagggagagcattctgcctaagcagtccttgcctaaggtttctgctggcactgaagagtcagtcgattctgaagagaatactacattcaaacaggatagaagtagtccccaaagctcattttcagccaggacttcttcaggtaaagactacgacagtggactttatgaaaggaaccgaagtgttggaacacactgggaagcaaaatcaaccatagcaagaaattcctctggtttagatgatgctgagaagttatctgatctacctactaatataagtcttccaacaactaagagttctgaacgctggaattcgagtaaagtgccttatcatgaaaaaccaggtattggaacacgccgagaagtgagatcaacactggctagaaattattttgattcagatgacagtgaagaagaactagagcaacagcagattcctcagtcgaagcaatctggagtgctgatacagtcacgcaggacacgggaggtgacatcagacacaaagagagatggtcgtttccaaaccggagctcagtatggtgatgaaactgagagtgtgacaagtaagacacaagtccatcaaggattcaacagctcaagtactgaacggagtgaaaggagggatccaagtgtgtaccccagggttgcagtacagcgctcttcgtctaaagctgagcagattgaatctccgatggagagagggaagccacaaggagctgaaatgagaagcaccttatttcgaggaaatgaagaggacacagaaacctcatctggaactccaaaagaaagcacccccaaaacaccccctgcacatgttcatcccaagcttccaacagactatgattctttcgccgcacattttaggtctcttcgaacaaaccggccttaggtttacacgacatatagagtttggagtttcagttgaattaagtcatatatacgatactatgatacgttttatggaggttgagttgagatttgtacattatagcaacactgttttctggacactatcgtgctgtgctagtttgggcgtacaattcttttgttctcttgtatcctcatatactcaatagaatcatattgtaaagactttaatttcctgttagtgattattaataagcacggcatgttggcatatgtatagaacatgcggggttctttcattccattgtaacgggatctgctacactcatgctatgagattgtttcatg

SEQ ID NO: 37129 - DNA, 2753 bp, Zea Mays
cttggatggatttcatcggtgcaaatcgtgccccgctgcactccgtcgccgccgccactcgacgcagcgcgttcctgcgaccgcttcgccaccacgggctcggcaatcgttctgcggagactaagctcgggatcgcgtctgggtgtggaggaggaggagggtgttttggaaaggtgcagggatttgatgccttgcggtcttgcggagtaccacgacgaaagttcagagcgggaaggcggggagaagtgtgataaaggaaatggggcacacctcatctggcaatgaagtgcccttgaaatattcttcaggcaaagctttccccctaggagtgtcacaagttgacgatgggctaaattttgcaatattctcacagcatgcttcttctgtcaccctttgcttgaaacttcctgagagaggcacccaagatgatgcggacattatagagtttgctttagaccgccagaagaacaaaactggagatatatggcatgtgtcagtggagggtttgcctgcttcttgtgttctctatgggtatcgtgttagcggtcctcaagggtggcaacaaggtcatagatttgatgacagcgcttttgactccgtgtcatggccgtttctcattggggttttgaggaaaatggggtttgggcagatttggtgtgatgttgtttgtgggctgttggctacttcctccacaagaattttgctaaatggcgttcatggggagatcatttcgcaccagaggggtctaaggcaaggagacccactatcccctatgttgttcattttggttatggatgttctgaacttgctcattcaaaaggcttccgatgaagggttacttcagcagctatcagctgggactttgcatcacaagctttctctttacgcggatgacgcggtggtttttcttaggccggtggcttcagacatcaatttggtcctggagatccttcggctttttggggaagcctcggggctcaagaccaatgtcctgaaaagtagtgtgttccccattcgttgtaccgaagatgatttgatgcgggtccaagcttctctcccctgccccatttcagatttcccgtgtcaatatcttggactgcccctgtccttgggaaagctttcaaaggcccaactacaggcattggtggacaaagcagctagtgtactcccgggttggaaggccgacctgatgacaaaagcgggtcgagctgtttatgttcagtttgttctcacagcaaaaatgatttatgctgcgatggctttggacctccctaattggaccaccaaagctattgacaagataagaagaggtttcctttggaaaggaagaaaacaagccaatggtggtcactgtttagtggtgtggggtaaggttactaggcctaaagttctgggcgggcttgggatcactgatctttggcttttgagcgtggcgcttcgagctaggtggccttggctccagagaaccgatcactctaagccttggtcggtcctccctgttcaggcctgtggtgcgatggaagccttgatcaatgttgcagttgtgtctcaattgggtgatggacatgatatcctcttttggaaggatcggtggctgaatggtagatgcatcggtgaggtggcacctgaggttcttgagcatgtacctacgtgtgtcgcttccaaaaggctggtaaaagatgctctaacaaatctgaattgggtggctgatataaggggtgcgctttcagtcagggcgcttgcacaggttttggatctctgtgacttgttggagggcttagttcttcaacctgggattcctgataagcatttttggaagttcagcgcgtcgggggattactcctctagttctgcctaccaggttcttctccttggagctgttgagtttgggccggctgaacggatttggaagacctgggcgccagggaaatgcaaattttttatgtggctggttgtgcatgatagatgttggacagctgacaggttggctaaaaggggaatggatcatcccgtctgctgtccgctttgtgaccaggcggatgaaactattaatcacttattggtcgagtgcagctttgcgaagcaattttggttccttttccttcggtcaggggacttccaggtgctctgtccctctacaggtgatggctgctttgactcttggtgggagaagagtgccgaggtggtgggcaagcctttgtcggatggtttcaacttgctggtcatatttgacagatcttgttatatatgaaatgaatgtccgtgccttcactgcggatgagtcaagcaagcttggtccagccattcgtggaagttaccttggtgtcattgacaaaattcctcatttgctggaacttggcgttaatgcagtggagctacttcctgtttttgagtttgatgagctggagtttaagagattccctaacccaagggatcacatggtaaatacatggggatattctacaatcaacttttttgcacccatgagtcgttatgctagtgcgggtggtggacctgtggctgcttccaaagagttcaaacagatggtgaaggcatttcataatgctggaattgaggttattctggatgtagtttacaaccatacaaatgaagctgatgatgctaacccttacatgacttcctttcgtggccttgataacaaggtctattacatattagatctcaacaacagtgcacagctgctgaacttctcgggttgcggtaaaaccatggtcctaagcttctctttctaa

SEQ ID NO: 37130 - DNA, 998 bp, Zea Mays
gctgtgtttacaaattacacctgcttgctgttgatcttcgtttcccgtccagccgtttttcgcatccacgtgggccagccggccaggcgaccgccgccaccgccgccctactcctggtcccagctctgctgcacccttcgccggcgacgagcgtccaccgcggcagccgaagctcccagcgtcctcctgcaggccgagctgaaggttcagcgcgccggtggagttcgacgacgaaactccgtcacgtcatacctctccgcctcccgtctccaatcggggctcccagcgtctcggagaagaggagcagcacggcacggcggctgtggcgaggaaggctcctgtcccatcccaacccagttagcagccgcccaaggaggaggagatccaatcggcgtgcgggcgtccgcggtccatccatcgatccaattccaatctgcagcgaggaggtcggctacctttctcctccggcgagctccacgagggcgccgacgaggggatggacgcgcagcctaactggagaggtggaccggcggcgactaggatatcgtacaagaacgccaccatcgtcatgtgcgcctttaacctcttcgttgcggccctcctcctccacaactactactcgtcctggacgcgtatcgccggaggcaacaagctcgattctgctcagcttcggtatatatgggaatctgaggagctgcgtcgtgctatggagcctgtggatttgattagaagagtgaaggaaattgagcaagaagcttatggtgagcatggcatggcgacagatgaagatcctaagcaaactgccgctgttgatttatcaaaacggcttaaggatttgagggcaggcaatgatggcagtagccaaaaagctctcgaagaatggcgtaaacggaagatggagcgtgcaaggcagcgagccatcgaaaagaatgggacttctagtgtgaaaactaaatgaggatggccacgctgaggaacctgaaggtcaagacgtcaac

SEQ ID NO: 37131 - DNA, 1939 bp, Zea Mays
ccaccgctgggccggccgccgcccccaggcctgcctttcgaagcccggacaaaaaatgagtgataacctgatggaaaaggttagcgcctttggtgagcgcctgaagatcaccgggacggaggtcagcaagaagatgacggccggaatgagctccatgagcttcaagatgaaggagttgttccaggggcagactcccgctgataagattgttgaggacgccacctcggagaatctggacgggcctgattggaactcaaacttggagatttgcgacttgatcaacacagagaaagttaacagtgtggaacttatacatgggatcaagaagaggatcatgatgaaggatgcgagagttcagtacctctcattggtcctgcttgagactattgttaagaactgtgagaaggccttctcagaagttgcggccgaacgggttcttgatgagatggtcaggttgattgatgatcctcagaccgtggtgaataacaggaacaaggcccttatgctgattgaagcatggggagagtccggtgatgaactccgctatctgccagtctatgaggaaacgtacaagagcttgaaatcaagagtgcggtttcctggacgtgacaatgagagcttggctcccatatttactcccccacgatcagttgctgaagctgatgttgaaaccagcttgccccagcaggcgttcgaagacgtccatgttcatacatatactgctgaagaaacaaaagaagcgtttgatgtagctcgtaacagcatagaacttctttcgactgttctttcctcttcccctgagcaggatgcttcgcaggatgacttgacggccacactcgtgcaacaatgctaccaatctcagcacactatccagaggattattgagaccgtcggagacaacgaagctgtgctcttcgaggccttgagcgtgaacgacgagatccagaaagtgttgtcaaagtacgaggagatgaagcagcccagggcctcggagcatgcagaacagagagcagttgtcataccggttgccacagaacatgaagatctgactgctgccgtcaatgaagacgcccttgtcagaaaaccagctgccgcgagaacaaggtcaggtggggatgatgatatccttgatgatctggacgagatgatattcggcaagaagggaggtagcagctcccaggaagggccgaagaagccagatccaaagaaggatgacctgataactttttaagcgtacccttctataattgcagcctttgcttgctattttctggtgatgtacccactcggtagattgaagattccttaggatttggatcgattgtctattcgcatacgattcgtatctgccccctttcggtttgttcagtaaagtcgctgcactttctcagtcttgtttcatggatgagtcccagtcccagtcccagtgaccatgaatgtgttggatggtggattatgcaccaacggggggaaataaaatcatgacgggaataaatggtggtccttaattgacgaagcactcgcatacaaagcatatattgatagtacattctcggtacctcatgtttcacgcctgtacccatacactggattggcagtaaacgccactaccaaacgagttgcacgtagcaaggcatggaacctgagcgtcaagctcctcaggcggtcgcggctgccgcgagcttggcgcgcagctccctcctcaggatcttcccggacgccgacttggggatggagggggtgaagtacaccttgtgtagcctcttgtagaataccacctgaaaatcggcgcacgcgcgcacacgtacactgttatgtcagaacaaacttcttcatggcataagcaaggcgcgcggcgtgatccagcctgcgtgactggtgagtacctgcttggagatgaactccttgatggcgtcctccgcgatgtcggcgtcggcgg

SEQ ID NO: 37132 - DNA, 664 bp, Zea Mays
tttcaatattttaacgccagattaaatattaatagactctatttgcatctggtctaatttcaccatctcatcaatacaacatcatttttattcataatgtttacatcctgacttaggttgtaggtcggagatcaagtctccactctccggggatataacggcgatccgaatcgatttactcagctgaggatctctaaccacacgacatatgtagcacttaacccttgcatatgtcaaccgttcccacggatcctccactacatgaacaggtccacgccacccgagagcacaccaccccttttaggcgatcctttgccaggagggtacgtgccactctcgccatctctccactcccagtgcgcgattgtcttttcatgtatggaatagccgggttcaagcttaccctgtcccatttccagggcatgtggctagttaagatagtccttgatcaacaggcctacatacgcatccaatccttagctaacctgggtagaacatcacctattcctagcccaagtcccgatttaagtactttcatccttaggattgtttatgttcctaggatgaaaagagcatcaaagggaactttgtagtaagatcccaccacgctctcaatgaaaatattcttgcaggtagaagtcatctttcctcaggataacccctg

SEQ ID NO: 37133 - DNA, 3255 bp, Zea Mays
cccctcccaacggcgcccttcctccccgcacgctacgacggccgagacgaacgcgcggcttcctccccaccaacggcgccctttccaaaagcctcgacccgctgctctcgccgagatcccgcgcgtagcacgcgcggcttccttcccaggctggcgagatgcctccttctacgctcgcgcatgcactatgcccctgtcgttgtccacctcccacgcccacgcatgcacccatcccctcgtcacgcaaaccatagtctcctccgcccccgtgctcgccaccgcgtcgacttcggtggagtccagcgatagggcgaggtcgtaccccgacgactcccccccccccgacgtgtcgtcctagcccgcacgctccgcctctggcaccgttgcacaccacgccatcctcacccttcaactcctaaactgtccagtgggagacgatgccgccctcggttcgcgatgccgcccactcccacacgtcgtcgcgcgaagccggcgctcacttcgggccagatctacctgcccgtgtggtgttgtgcgtacgaccacctcgtgaagatgctgcaacaggcgtacgcgcaggtcgaggagctctccgtcgagcgcgagcacctcgtcaatgagctctagcttctacagagccgcttccacaagcgcaagatctgccaggcctgcctccagaagatggatggatttgatcaaacagtgaatgtgaaggttgtaatggcaactaatagggcacatactctagattctactttgttgcggccaggtagacttgacaggaaagttgagttctctcttcctgattggcggtagaagaggcctgtgttccaagtatgtactactaagatgaatttgagtgacgaggctgatttggaagattatgtttgcagactggataagatcagtgatgctgatgttgagttggtttcatggcacagaccaaaaattttatgcatttgttgttttctaacaattgtattgctagggacttttgtcctgcgctggccaaagctgtcaaaactatgaaaaaggcagagaagctgctccttatatatagtaaagccattaccaacagttggagaggaaggtgttctgatgagcatcatcttgttctgcatcatcactaatcaacttgttatgcacagtgtccgatgtgcctgtctcaactcgattgctaaggcatataattgacctaaaaaggcacttcaagcgggtaggaaaattcaaggtcgttctcaagtacttccaagtcggtacggtcgttgagcctgcatctgagttctactcaagtaggctgaaaaatagggaacgcaaggcaacattggttgacgagctgttatcagatcaatctctgaagagctacaggtatgctcatcatacttttgccattttgcatgtgcatcaatggacagtggcttgtttttcagtgcaagattttctataaaaattgcatatggtcttttgcaagatttcctggtgccttgtttcagagtccaaccatcataataattacacggttgtggtgtgtatatctaaatgggtttcactggttacaactaaggtgcatggttttaaagtcggctgactaatcgcgattagtcgcgattagtcggccttatcgcctggcatagcacgatcagcatggacgactcgatcagggcgactaggttacgactaatcgtcctggtcgccgactaatcacgattagtcggccgactaggtgccatgtccgactagcttgtgccaggtttgggcctgtaaaaaaatgtgtcctctgttatatgggctggcggcccactatctcctgtccacagtagaaagaagctctactgccactgtgccgcacagtacaagcacagtagaaagttagaaaccctaaaaccctaagccgccgcctctgcctcctctgccccggtggtcctcagctccggtggtcctcagctccggcgactgtctgctctctgctcccgtgctccgttgcgctcgcctctgctcagctccggcgctcgcctctgctcactgctcagctccagcaaccgtctgcagccagtctgttctgaactctgttcagagttcagtgctcacttcagttgttaatctcactatctgcaccctctgttctgaacttaaccgaaatgagcacctctacagatggtaatctccaaggtaagtgatctttaccttttacttttagtggaaacatcctttattttgattgcttgtactgctgtcctgctagacagctatagtgtactgctgtcgtgctacagttatattatattatatacatagggtcctgttataggtggacgactataggacgactaggagtcgactaggctcgactaatcgagtaaatcgacgactaatcgcgattagtcaccttatcggtggtcaggcgactagagtcgactagccgactttaaaaccttgctaaggtgttacataactgatagttaattagtatttttttatatgtcaagatatcagtccaacaggtttcttcgagatgcaattagcacttataacaacaacattgattttcttattagaccattaaattggtttcacggataaatttgttatcattcaaaattgtcttatgttgacattatgtatatatgctattcacaataacagagtcattcatgttggtgggcgtcttggatgaactacattttcttcaacaaagatggagctcatgcagattgatttagtccctttttgcaatgtaacatatatgtttcatacaaattttttactcctgttgcaacgcacgggcactcacctagtcatcttttaagagtggtatagcgcctttgttgcagcaggcagctacgtgcccacgtttggcgaggcgccatttccggccaccggccacgtcgccgcgcgcaggagagaagctaggcactacatgatgtcagccgaccaagatttttaaaaaaagatacgaaagcttgctacaaaataaaccggtccagtcacaagctagctagctagccagattaagtcgatgccgcactgcttgtatatgcattggattccatattgttctcttcagatggacatcaaatgttctgttcattaattaaggttaatcagtggcatcctatgtggaatcgtccctgcttacatgcatatatagtgcgtgcgtgcattatatgtatccattccacatgcatgcatctgtttcaccatctttaatttggatgcttatgcatgcatgcttctttactttgattattgtttttt

SEQ ID NO: 37134 - DNA, 5876 bp, Zea Mays
tatcaatcgaaccaagcaactatcgcttccgtcgccggcgagcctccttctccgcaaccaccgacgccgccgcgaaaggggaagcgatggggttcttggacggcttccgtcccgacacgctgctaaagcgcgtctgcaagtcgctgctcaagaagcggctgggggatctgatcctcggcgacctggacctcgatcagttcgacatccagcttggccacggcacgctgcagctcaacgacctcgctctcaacgctgagttcatcaaccgtaagttatcaggatcccctattacgctgaaagaaggatcaataaaatccttgctagtaagattcgctgctagctgcgagattgttgttgaagaattggagcttgtgctttctccatctgttgcaagtgaagttgatgatgtgcatactgaatgctctgtctctggtagtactagtgacacacacactttagtcaagatccaaagaaatgaatccgatagtaatcagtgttccacttctgtatctcgagatgtggatgatggtgtaaagagaattgccaatgccgtcaaacggtttctgacaagctttaatatcaagttaaagaatgcctatgtcatatttgatcctcaaaccagtttgagtagtagatttccagaaactagtcgatctctagttttccgaattaaagagttggaatttggaacccaacttggtctatttaaactggacaactttttaactttccgtgaggcagtcattgagtttttgaagatggatgatgtcgacacactgcttcaaaatgatctaaatagaggaacagctgacatttcagcacatcatagtactaccgcagtcttaaccggtcccattggtggattctcagggaaactcaatttaagcatcccatggaataagggttgcttgagctttgagaaaattgatgcagatgtatcagttgattcattagaattacgtttacaattcagcagcatccggtggatcatgaatgtatgggattctctccaaagaaagccagtagacgaacagagttgtgttcataatattgcagatatctctattagtgcttcgagctctgcctactgtccacctgcttcaagctctttgaagccatgttcagattctgtgatagccagtgactacatggcacagagcacattttctcaaaacaggcaggataaagttcaggattctttccttacaagcgcacacgtgataacagactggatggagcctgttgctcgtaaggatctgtgtgaccctgattcagattgtgatgaaagcattgatcagttctttgaatgttttgaggaattgaggaactcccagtcaagtttaggaaacagtggtatatgggactggacgtgttcagtattcaatgccataagttttgcatccactttagcttctggatctgatcaagttcctaaagaaccagttgtcgagaggaccttacgagcctccatcaccgagatatctgttcttcttttgttcagtgatgacacagatataaaaaattccagtgttcctatcagtgcattggatgatatgagacattctgaaatgttttcgagctgcctttcctctgagcattttgagaaatcaattatatctcctgctacagcttccagcttaaatatgcatcatctcaaagccaagtgtgagaacattcatcttgatctacagacttatccaaaaaatgtaaggctcaaggcatcaattgcccaaattaaacttgatgaatactaccacgccggaaacaatatttcagatgattcaaaccttggtaatcacttcttgaacaataacttgcggcaaggagttcaagcttccctccctcagtgcctgtttgctgttggagatcattcggtggaaacctatgaattttgtggcaatagttcaactgaattgactagagttgaattgctaaaaacttttggcgagtgcacattctgttatgatgtcagtaccaaagatcaagatggcaatttagtgagctcaacttccatgtcgatctatttggctcctttgcttttatgggtgcactttcatacaatatacatgctactgagttttgtaagtaatgttgagtctgatttgtcacatggagagcataaaattcaaaagcatggtgacgaaaagggaagcagattgactaccagcacaaccatgtcctcaagtggaagtctaaaagttcagatatccctagcacaggcaagaattgtcctgtgctttccatctgagttttcatgggatttgagccacccatctgtcctggataagttcctggtgatcgaccatacttcatgtctgaacatggtagaaactgcatcacaccctcaaaacgaaatgcaaaatgaggttcatcttagcaagtcgtgtacctcaatacatttggctgtaggggacatagatgtatatttggttaagccagtcaataatgtattggttggtagaatctgttcttcaagtaggcaaactttctctgcaatgaaaattctttctgttactggatccagttataatgactctggcatcacactgatcaggagaaagtatcctgtaactggccctgagattttgaacaatgcttggagtttgccaaagatgcatgatgaaaagatcactaaaaatcaaaacagcaaatgggctggcatttccccttcttcaaatgatcttttagagacaggatctagtatgcgccaggagctccttaagagcactgagctcttatttcatgttcaactttcttgtgtttcattacgacttagtaaaaaggattgtgagttactaaataagctgctagatcatgtcattaaggggatatcaaatgaacaaacaagcatttctggaaattccaaggaccaatctgttctgatcaatgataccttcattcaaacgtctgtcctttttgaatgcagtatattggaaatttgcactgaattgaatgaaacagtggaagttggtcctttattacaggcagaactaaaaggatcctggaactctgttaagttgaatgtttcaaaattttgtcttttctcctgttcaaatgttggaggcctcaacaatgccagttttctttgggtgaatcatggtgaaggtgagctttggggttctgttagtgctaagaatgataaaatccctggagaaagtaaagattttcttatagtggcttgcaaggactctgcctgcaggcggggtgatggtgaaggtactaatgtgctgtctattggtgctgctggctgttctgtgacccacatcaggaacccaaagctaaaagagaattacacttctgttgatgttcgttctggcacaattgtagcacctggtggccgtatggattggatcaatgcgatatgcctgctgttcagttcaggctcagatagaactgaaaagtcagatgatagtaacacaccaaatagctatcagtctggtgaaccttattcatcatctttatttatcgagttggctgatgttgctgttagctatgaacctcattttaaacattccactctcagtgctggagcagccgaccgcaagtttttctcatgccttttagctgcatcatcatttaaactccataataaatctgcatcagcctctgcagctactgattttgatatccaattacgtgatcttggagtcctcatttctcaatcatctggttcaacaaatggtacttgcagttatggtgtagattaccttcgtcaagcaggttatactaaggttgtccagaacacattcattgaagcttctctaagattagattcttccttttggaagcttgaaatatctgattcccaatttgacattggtacatgtcatgacacaacttatggtcttattggtttgggatctcaactccagcagctatatggtccagatatgcaggatgctttagatcatctgcagtctaggtggaatagtgttcagcaagcaaacaagcaaaatatggctgctgatgcatcagacaagtctgagagcagtttggagattttggtcgattctggggattaccagtcagatggacttcttgatgatattattgagaatgcttttaacacagaggattgcatggacaccaatttttgggagaacaattaccatcacttatttagtagcagtgagacggatgatggatttgagctgaatgcggccacttcacatgtatttcctatatctactccagaaggcaatgttactcaaatatcactagaacagaacgtctgtcctgatcaaatcattgattcatattgtgtgcctgaatttcatcaatcattatcaactctatgtgatgaagagcataaatgtacatctggtgacaattctcatagaaccctggaaagtgaagatgctggatggtataacaatgttcccttaacaatagttgagaatcatgttttgaaaaagaaaaacgagcaagtacttcaacacaaagtgtcttctgtttgcagtttgaatcctgatgaatattgtaatctgaaaggaaaggttcatattcatgatatagatgtaaagtggcggatgtatgctggagatgactggttattacctcagaaagatttgactagcttaacatgcacagatggaagaaataggagctcttcactggaatttactgtgagagggctcaatatccaagttgacatgtatccaaatggggatgtttctatatctaggctatctgtagctgctgaggacataactctttgtgatcaaagtatccatgctccatggaaactggttcttggatgttacaactcaaaggattacccaagagagtcatgctccagtgcattcaggttagaattggagtctgtgaggccggagccacaggctcctttggaagactacaggctccatcttgagattttgcctctacagttgcatcttgatcaagagcaacttaacttcctaataaatttcttcaagaatgattcatgtaacaatgatcctcatttgcattgcgaaaatgatactgttgatgtgaagagcacaagcaatggaagcaatatggttgtggatgaggcattacttcctttctttcagaaatttgacgtaaagccacttattctgcacattaattatataccccgtcagtttgacccgattgccctaagcaagggaaattacgcagaacttctcaacattcttccatggaagggaattgatttgaagcttaagcatgtttctgcaatgggcatttacggatggaacagcataggtgatacggtagcagcggaatggttggaagacatttctaaaaatcaggtgcacaaattgctaaaagggcttcctccaataagatcactagttgctgttggttcagggaccagaaagttggtctcgttgcccatcaaaagctacaagaaggatcggaaattgctcaagggaatgcaaagaggcgcagttgcttttattagaagtgttaccattgaggcagtagggcttggagtccatttggctgcaggagctcatgatatgcttgtgaagacagaatgcgcccttacaactgttccaccacctttagcctcatgtgaagtgaaacgaacaaagcacaacattagagctaaccaacctgaaagtgcacagcaaggaatgaaacaggcatatgaaagtttaactgacgggtttggaagaacttcctctgctatcattggcaatcctattaaagtttataaccgaggggctggtgtcggatcagttctggctactgcaatctgtggagcaccagctgctgcagtagctccaatctcagcatctgctcgtgctttacattatgcacttcttgggctaaggaacaggttgaagctgtgtttagaagcggcaccaataagttgccttgaaggttacctgcaaacaagaattggg

SEQ ID NO: 37135 - DNA, 2476 bp, Zea Mays
cacaaagtgaggagcgatggagaaacttggacttgctcgaaacatgccagctgccaagagaaaggattttgggtttgttacatttgatacgcatgataatgctgttgcatgtgctgaagggataagtaactctgaaattggtgaaggtgatcacaaggcaaaagtaagggctagactgtcgcgaccactacagagaccacctagaatgaagcatggattgagaggaaattttagagtcgggcatggtgccccacggggtggccgtttacagtacgctcgtgctcctccacctcgcaggcctccaccacgccttgttcggcctgctggtagtcgcttaccaccaatcaggagccatccattgaaacgacccatatacatcagagatagacgtcctgctatgccaatgctagatagagctaggcgtttacctccttcagggagatcttatgacaggaggcccccagctccagtttacctgaagaaaagtccaaggagagaatacgggaggcgtgatgaacttcctcctccaaggagcagagctatgattgattacagtcctagagttccagttgatagacgtccctctttgagggatgattatttaccccggggatcaggttattcagacctaggtcctcatagtgctccccatctttctgataggcgagcttatgctgatgatagttatggggggaagttcgaccggcctttaccggtctatagggagggtcgtggccatgattatgacaccgtttctggatcaaagcgtccatatgcagatatggatgatgcgcctcggtatcaagaaattggtgttcgtcagtccaaggcacgcttggactatgacattggtggcagcagtgctcgctatggagatacatacaacgagaggcctggacgaccacatgcgggatatagcagtagtcggtctatccctggtcatgattcagcatatggtagcagccgtaatggcatgagttatggaggttctgctagcagtgctgatgctggtggtatgtacccaccgagttacagtggtagctatgggtctcgtggatctgatgttggtgggagttcatattcttcgctttactcaggccgcaatttgggtagcagcagtggtggctactatggaggtagcggttccggttcatattactaagggataataactcggatcctgaggtcagaccgccagaggcaattttgcccttgaatttggtttttgcagatgacctaatgatgccactgggtaggatgaaagatcaatatgtaatttcatgaaaaggctactcagatgacttttgcagtattcagaaacacacttttctgtgattatcgatgtacttgagggccatttgtttgttacttatgtgttatttcttgttggaatttgtcttcaagagggaatttgatgatggaattaggagatctagcagaactgttgattgccaaatgtgcacagaagaaatactatatgcaatggcatcaatgggcttggttactggggggcagtacgtgggaatcagcacctgctggtgctggctgggttggtgctcatttgaaaaacaaggggaaggagattatttttccttgatggggcaaggacggtagatctgaaagcagcatggcgtggaaatatttttcttgaaaacagtaggcacaggattaagtacaagaatactccattagaattttgagttgaagggtcttgaattttttacccaattgctggagcaaactcagggatctaacacggtttagtctaactacttagttaagagtattcaacataaagattctttggaatcacaataagctgacaaatgcatcatttctttatcaatttcaccatctcatctgcatagttccctttgtttttattctgttattcacatggtttttctagtgatgttattatcaaagcagttgacgatgcttacctgtttttccatgctaacgtggcttcgatattatcatgtttttttgagccctttgagaattgtagcccaccagcatgcctctttccaaagtcgtgcgtggagattcaaaccggtagtctagtggttgccgtcaaaagcagccagatttgtgaaatcgtcatgtgtgttgctctctagtttaccgatctgtgggcttgtaaagaacactgtaggcatgaaagcaaccgtatgtacagaaaatataattaactgctcgtatgaaataccatacggagatgtaccgacgtttgtcacgcgcgtctgaaaatctgttcccaattagttcttgtaaagaaacattgcaggcatggaagataccagaagtgcaaaaatataatcaagtgcttgtatgaacattgtagtcttgaagttccatcttccattggccacgccgtgtccggtgcccgtgcagctctgtgcgtgttgccttggttctacactgcctcatggtcattgaaatcccgagatggccatagccgaccacgctgttgccc

SEQ ID NO: 37136 - DNA, 2231 bp, Zea Mays
cagggcccacactacatgaccgacagctcgcgggttgtattcccggccgccagcgtagcagaagcgaggtttcctccaatcgatctgtacgccctccccaccggccggtcgcgcacctccaccaacctgctcgctccgtccgtcgccgtcgccgacccgccaccatctccgccctccaaaaccctactacccctgtagcctgcagccccgtgcccgccatggctaccaacggcagctccgtgagggttcgggacacggagagcagcctggagaaggtgaagcggcagctgtcgtcggggtccgggaggtacctgctgcaagggcccctgctcaagcgatctgagacgttacggaaatggaatgaacgatgggtcatattggatccgacatctgggaagatggaatacaaaagccactgatgtattggtgcagactccggagaaatgaaactgtcattaagggcagtgttcttaaggcgtcgcctaggcgtcgcctaggcgacgcctaggcgtccaggcgcccgggcaaaactggccgccttgctcgccatacccgcctaggcgtcgcctaggcgccgcctaggcgctaaggcggttggctggtgcacttgctcgcctaggcgccgtaagaacactgattaaggggaccattctgtttgatgcctcaagcaccattactttatctcctgtgaactttcaagggatgccaaaatacgatggctgctgcttctacattgggactcctcaaaagaaggaatactttctttgcgctgaaactcctggtgctgcaaaagcttgggtatctacattacacgcaactcagttagtcttacgagctcataaagaggcagtaaattctttggctgggaatggctctccagctacattaggcacagttgctactgcagttgctaatgctaatgcaacagccatggaggctaccaaggagatagaagctgcactaaaggtttcaatgagggcagcccttgggttgggtacaaataactccaacgatggccaacttgatgacctaacaatcatgaaggagactctacgagtgaaagatgaggaattgcaacatttggccaaggatatacgttctcgagatgctacaataaatgaaatagcagacaaactaacagaaaccgcagaggctgcagaagctgctgcttcggcagctctcacaatggatgaacagaggcgacttttgtgtttggagattgagcgactaaaacaagccttggaaagacaagtagaacaatcaatgctgaagcttagacagtccgaagagaaggtcatcagcctgagcaaagagaaggagcagttgatgaaggaaagagacgctgcgtttcaagaggctcatatgtggcgcgtcgaactaggaaaagccagggagcaagcagtgatacaggaagcaactattgcccggaccgaggagaaggcaagagtctccgaagcagatgctgcagctcggattaaggaagctgctgaaaaactgcgtactgttgagaaagaaaaggaggagcttctagccctggttggtgttctccagtcacaagtccagagagagcagagcagcacaaagcaagtgtgtggggagaggtctgagtcgtgttcaggcgccgacagcccccctcccctgacaaagcatgttgatgcatcggacgatgacgtggacaaagcctgcgtgagtgactctagatcagtgctggtgtcgagcgacagcactgaggtccagctggctgtggacggggtggacatccgtcctgtcggcgacgcagagtggggtggcttccagcagtcagatgcgctgatcgctgatgtccgtgaggtctccccagaggcagatggaggcagcttggacattcctgtggtcaaccctccaccgatcagtgatcatgttcagggaggcgcaactcatccctgaaggcctgaggttgctggcttgctgctgccttccgagattggtgtggttgctgggaaaccgatagggatgtctaaatctggagagtcgccgttgagggtgcatattgcatcgatgcgattgtatgtccattgaggtatacgattgaataaaaaggtagtaactgtgtctggctgtgggattgtaaatattcgcctcattcccttttgctacggctattcacgtgtgatattttagctcaggtggatggattgtgtgatatcctggtcaagatttaataaaattaatagagtatttatactaataag

SEQ ID NO: 37137 - DNA, 831 bp, Zea Mays
agaaagtttttgaggttgccccatcacttcacatggttgagcttcgtaaaaccggaggagacacattggagttccacagcttctacaagaacttctcatcggagctgaaagatatcgtgtggaaagctgaatctgacgcaaataataaacagacgaataagtgatacccagagaatctgtgtagccctcatgaggccacattcagatagatcacctcttcgggtgataccacctgcttggtactgtatgcttttttttttactggtaccacattagcagccaaaatctcttgtaaacgggaactccttctgaatgagcgcaattgtacaaaacacatatgaagaggccctccgtgagatgctccgaacactgcaatgggatgtcaaatagttctgaatggtgagtgctgtttttgcatctataggggcatatatgtttccattccatgtgcatgtaccgttgttgtatgcgcatgggggtacgtgtgcagcaggagagagagaacatctgaacgtgtcctgagaggaaaaaaaaagtctatgtccgtttctaaaatgctttggttgtcaccagggttgagtgcctttgttttatgaaaatggacaatggagaatgatgtatgaagcttaactctagtatttgggagtaaaagtatgtttggttggatgtataatgaggaatggaagggggtcgtcacactttctatagtgtttggatgaaagttaagcggtgaagaggtaaatgccggagtaattttttggtggtgtagggaatgttgagatccacatagttgtacttggttggatacgctattatttttagcacatatta

SEQ ID NO: 37138 - DNA, 1989 bp, Zea Mays
gtagcccccttcaatatctgttcccagtatcccccttcaaatctttgatgggggttgtgaatcatgatcctctaataaccataccctggaaggctggaacaaatttcgttccaaaagggacataatcagagaaggccagttaagggggcagtgagaagggatggcgatggagttggccaagcaattgctcgtcgctgttctcagaagctatgcaccacctctctgggctacaatcattgccagtgtttttgttatcatctccgtctcactgtccctgtacttgctactcaatcatctgtcagcctacaaaaacccagaggaacagaagtttcttgtcggcgtcatcctcatggtgccatgctatgcagtcgagtcgtatatatcattggtatatccgtcaataagtgtggacatcgaaattatgcgagatggttatgaggcatttgctatgtactgttttgggcgctatctagttgcttgcttaggtggtgaagataggacaattgaatttttgaaaagggaaggtggttcaggttctgctgtaccactcttaggccaagcatctgaacaacgatatgtaaaccatccatttccaatgaactacatgcttaaaccatggccgctaggcgaatggttttacttggtcatcaaatttgggctagttcaatatatgataataaaatcaatatgtgctattcttgcggtgattcttgaatcctttggagtgtactgtgaaggagagtttaagttgaactttcttggagattatgcttctgtcgactgccctctagaccccgatgaagtcaaggatagtgagcgcccaaccaagtttaggctcccccagccagatgatcatgttaggtgttccactgccataaaagaaagcgtccgtgatgtcgtacttgggggcggtgaatacattgtgaatgacttgaagtttaccgtgaaccatgctgtggaacccatcaatgaaaagctgcacatgatatccgagaacatcaaaaagcgtgagaagggaaagaggaaaacgaatgatgatagctgcatcagttcaccaacatccttgaccagggtcatcagtgggattgatgatccgctcctgaacggaagcttgagtgacaacagcggtccaaagaaagcacggaggcagcgcaggaaatcaggctatgcaagcgcagagagcggtggggagagcagcgaccatggcctaggcgggtttgagatccgagggaacagatggattactagggagtgacagctaggagcaatctgtggagatactatgtaaatgtcacaggagttggcctgtggtgatgtgcgataaccgggccagtgggttctgagcgtaagacgaggtctctagcaatgatatgttgtagcgtgactaaatcgagatgagcaatcaggttgttgtctgttgattctttcggctgaccatttcggctgctgaggccttgatcctgtatttgagatgtcaggcctacttagagcaaatgctggaaggaagcaatgtgcctgttctgaggtccctccagcatcacttgtaatttgtaaagtactcaagtacagactagaactagtcatgcataccagaagaatagatagatgtttcagaagttgaggcctgagatgccgtgccactctatttgctctgtttcatgctttgccgttattatatcactattttcactgttcattctaaggccgttgtcacacgggtaccagaagagcagaacacctttttacgttccttttgctgctatggatggacttcgagagttccttgagaaagcactctcatctatctttccaattccttgtttccttgtggatcctgatcactgaagatggccatttgatttttcacttttcagttatatataaagtgaagacggttgtctcacgcaatatgtgaagtgcaagatgagctctacactgcaaggaaccccaagaaaaaaccacaggtaagtttgtctgattgacaacggc

SEQ ID NO: 37139 - DNA, 1821 bp, Zea Mays
gcctgggctgcagccccggtcgcggcccagtaaatacaggtacagtgaatgaaggaaaaggcctagacgctcagcccagtcgctctcgctcgccctactcgcccagccgctgcctgcccgccggccgccgctcgcccagccgaaagctgctgcctccccaccggtcgccgctcgctcagccggaagccgctgtctatccggtgcccgccgtcgctcgcccaggcccagtcgcagagccgttgcgtgcccgccgtcgctcgcccagctgctgccgccaccgctcgcccagtctaggtccagccgctgccccgcccagccgctcgcggctcgtccaagtgtccgccaccgctcactcagtctaccttcagttcttgttcttgatacacgggtgctcagttccttcagttcttgttcttgatatacgggtgctcagttcatgatacatgggtgctaactgcctgctagacgtgttatcattgcttatgtggtttctacgtgcaggggtacaaattttgcaagctgctttaatttatctgcaatcagcaagggcatttgagtaagaactgccctgagaacaaacatggcatctatccaaaggtatcatgatactcatgcattctcaattcttatgatactgtgaatgggcatggcttcgattatgcagcaataatttatgggaaacaaatatgacatgcgctcatgtctaacatgaagtgtttttggttaattattattctttttagttgcctaaaatggagaaaaaagaagcttgtattgcctctaccactcgtcactggaagtcagccccctctttaactcatttctagatccgccactggacatgccaacatccaaacatgctatatataccgtacaacatacatagacggcattccctctttcaaaatgtcctatatatgctagtatttagggcctgtttagtccagggactaaagtgtagctagtggactaaagtttagtctctaacatatttggctatagagaataaaaatattcagagcacgttaaattaatcataaggagatcaaaatacaccttagcattttcccacaattagtgcaactgaaataaacgagagccaaaaaagtgaaattaatatggtttagtttcttttagttatcctttgagggactagatactaaaacagtttagtcttaacgtttgataatttagaaactaaatgagactaaaataaagagactaatttttagtcgctcaaaccaaacgaagccttagctgggaaagatatgtgtgttaccctaaataggaaccattgtcatccgtcaccggtacagagtatcggtgtcaacgacgacgttatgcaaggaagaagaagcgctcggcggcggcgacatcacgagtagcgcttggggaaggccaggaacgtatagtgtgtttggtttgagggatagagtgatccatcttcttcttactcctcatttttttatttggtttgtggaatagaatgagttgatccatcaccacctcattcctcataagctaataattagtatatagatgaggagtgagttgattttaccaaaattgatggaatgaacttatgatgcatcatcttataaagtataaagtgactccacaaaccaaacacactagtagaatagactgtaattggtggatgacaaccaaacaacaagtatcgaattaattaatacaacctcaattattcactccgatccaatctgaaattacccaaacaaacccgtaatccgtttgctttacgttttcgtttatcgttgaaccaaacaccatcactgtccacttccaccccatgcatcgcgc

SEQ ID NO: 37140 - DNA, 1601 bp, Zea Mays
cattgatacagaagttggacaacagcactgtcatgatttagtaaatgtaaaatggcattttgtcctcctttgagctcctgttaaacacgagtgctaaatagtgagctacttaaattgacccagaacttttgtggtattttaatgttaatacctatgccctttgtaagttgaaaaaagggggaaaatgagagaatgacgaaagagcctcatgacgtgctggttttacgcttccattatactatacaaaagcaaaaaacatttcttctctcaaaaaaccattttagttagccactggtcaaacttcgtgtgctaaaatctccaggatttctgtaatttgttgagtatgctttgtagacctcatagttgagtcaaaggacaagtactgtctcatttttctgattgatttttttcactgattgcatgtcctcatatctgcaactagtcagatatcctagtggtctcatgccagttcaattgattgcttcttatgcactatcagtagtgggcccagcgtttgatcatagcttgggcaaaacacattgagccaattaaatcatgtactttagcacctgatgcaaatcatgccatacaaacataactacataaggatccagtggcatcacagccgagcaggtgcccagggtcgtcggctcctgtgtccgccactgcacactatcatgatgctacctgacttgtctaccatgttcaacagtttaagggctactggtggtagagctaacggtgatggagccaagaagacgagagcacgtgatcgacctaaggcagttccagctccagaggcaaatgctgaacttcaagtaaatatcgataaacgaaggttcgtcactcatgcagctaagagcaagagcgaaaagttccctcccccacatcaagatggtgcggttggtgtccctttggacacttcaaatcatatggacccactatatgagcctccagacccgtcttccttcagcactgtgttcacgcacgagaaaggcgctgtgcctacttggtccggaccattggttgatcctgctgcagtggtgaaccaaaagcggaagcacaagtttgggcgctcatcgaaacaaccggccactgcccgtgctcggtaagatcctaaggatcaatatttacaggtaaaaaaaaggagacttcaacatgggggaaatgctccatgcagctgttttgcaaacgaaaaatgcaatgataatgtattttgttggttacctgttgtcatgtgagtgattttttttctagacatcatgtataggctggggagggagttgaagtagttagttctgtatattaggttttctttcctgctctttaagcagctgcgtttgatgttagatttatttgaatggaagcttagatctctagcgtttcactacacccctttccattgtaacagtctgttgcctgcataatcagttatcaattcaacgcaaattttcaatcggatgttttggtgaaaagttggtggattcatgaaccatgacatgtatcacattgtaagctggagtaatattcctaaaatttctgaatttgtattgttgatagagagattgaatctgtgtggagctttggtgactcaaacctcc

SEQ ID NO: 37141 - DNA, 134 bp, Zea Mays
cgagcaactgatgtggtgccaaccacaagatgtcgttggtggacgacctgcagaatgatggacataaccagtagatgctcgccaagcgagtacctcccccagcaaacactacataagtgttaaattaaaggcaa

SEQ ID NO: 37142 - DNA, 561 bp, Zea Mays
caacattaaagactgtcaagtttcagattgtcagggtccctttcaggtgacatccagtctctatccgaattgcagaccttgcatgtgaggtgattgccacctatatttggcacttcctatattttttatagaatgtttcatcttgttcttgttgtaattatgtcagtgacatttgttcttgcctttggagagggatcatgtttgggcttacaatggggctcgtgtcacttggcctcgtcaagctggagatcctctaatgtagcgacacaggcatctcaggagaccatttatagtatgaagaggtcgatggaataaaataacaacctccttcatcaactattaagcttcaatcgtggtcaagtgtctccatcttaagtctgcttaaccgctataggacctgcagctgtagtagttctagatgtgaagttatactatcattttcaattattcttaatgtttaatactttgagatgaagttataggatttgctttggattttaagttaaaggatttatatatatatatgttttgaagttatatgattctcttatggatgaaata

SEQ ID NO: 37143 - DNA, 5830 bp, Zea Mays
ccgcattctcgacaattaaaacctccgccccacccctcctcccctctaatccgcccgccattactttcgcagacgccgctcttcgctcgctcaccgccgcttccttccacgggccatttcgtctccgtcgcccatgctcacctccttcaactctgtgaacccgcgatccgacgtgtagtgccgccgtactgcgcggcgacggcccaccggcgaggagccgccgacctatgcccctcggccagtccggcattggctaacccccaaatgcctcccgccgctaactagccgcagcctgtacatacacagacagacagacatacacaccgtaccggaggttgaagcggagaatcgatcccgacgcttcgccgccgctgtctcgtcgccggagaggagttttagcctcaaaggcgtgattttttgccttgttattttctagcttttttctttcgtgatttttggaccgtgttctcgcgatcgcgccggagagatgggagttgtggacttctcggtgctgggcgctctgcagaaggtcagatccttcgtcgccggcgccacgccggctgaagccgcagacggccggctgcccgccacgccgaggtcgcgcagcggggggccctccccagagaactcgcccccgcccgcggcgacgagatccggaggcaggcgcgccatcgccctgcgccggcagatatcctcgccggagctgctccgctgccgcgctgtcaggcgagcagatgatgaggatgatgatgagcccggggttcagtttttcacccatgggaatgacttcttacatgacttctcagatacagaatctgttagtgttagtacccctaatgatatcaaccgctccctgaccccaagccccttggagagcccgacttggatggtgaagcagaacgacagctcaccaatatccaggaagaatggccgtttcagcccggattctcctggatatggtacaaaggcaagtttaggatctgatggttcgccgcaacagataaatggtagcgtcactgacagtggtgacggaagcaaaactcagtatcctgttgaatttggtgccaatatatggtgcccaccaccaccagaagatgagggcgatgatatcgaatcgaggttatttggattccaggacgaggatgatgaggctggggactcaagcgggcttcttgtttctggtagctttagtgctaacaaaatagctgctattgacgaggtcacaaacactgctcaggaagagtgtctgaagactgcggtgctcggccatttccgagctcttgtggctcaattactgaaggcagaaggcattgatatgggaaaggatgatgggtccaaaggttggcttgatattgtgtcatccttaacttggcaagctgcaagctatgtgaggccagataccaagaaaggaggcagcatggatcctactgattatgtgaaggtcaaatgtatagcatcaggggatccaagagatagtaattttgttcgaggagttgtttgctccaagaatgtaaaacacaagcgcatggtctctgagcataggaatgcaaaattgctcattttagggggcgcacttgagtaccacagggttcctaataaattggcatctattggcaggatacttgaacaggagaaggagcacatgaaaatgattgttggaaagattgagtcccggcgacctaatggtatcaaggtgcacaggggcacaaattgcttcatcagctgacagtattgcttcagtacggctaggtcaatgtgaagcgttcaaggtgcaaaaagttacagaattcccatcagctaaacagacaaataggagatcaagcaagacactgatgttctttgaaggctgcccttggcgtttgggttgcacggttctactgagagggtcatgtcgggaggagctcaagaggattaagcgtgctgtacaacttgcagtctttgctgcttatcacctttctcttgaaacatcattctttgcagatgaaggtgcaacacttcctaaattgccctcgagacatgtggtagttgatccagatacaaggaattgtacaaatagcaattcagctgcattgaccaatgttggtatgcctcatggacgtaaatcagaacatgacaaactctcacagactgctatggtcaacattatgtttgaaaatacccctgtgtcacctagttcattgccatcgaatggagaaggccacatgtttgtgggtgcatgtcagcataaagaaactgaatattctgttgatcataagaactcttgtgaacattgtgtatcccgtgcaactggttcatgcaacgggtatgaaacatctttatgttcatcagataatgattcaatgacacagaatcaaaatttgcagaactctgcaaagcttacatcaaatgctcaccaatatgagtttccagcaaaggaatgtcaacaagtagaccactgggatagacaaccacatgatgatcaatcagtagatcagcgggacctgaataaattttctggtgaatactttcctggttctgacaatcatcagagcatattagtttcgttgtccagtacgtgtatcccaaaaggcttggtatgcgagcgctcccatcttttccgcatcaagttttatggtagctttgataagccacttggtagatacctccgggacgacttatttgatgaggcatatcgctgtcagtcatgcaaagagccatcagaatcacatattaggcgttatactcaccagcatggtagcttaacaattagtgttcggaggcttcaatctcgaaagttgcctggtgagcgtgacggaaggatatggatgtggcacaggtgcctcaagtgcaaacctaaggatggtgttccacctgccacacggaggataatcatgtcagatgctgcctggggtctgtcgcttgggaaattcctagagctaagtttctcaaaccatgcttctgccaaccgagttgcaagctgtggacattcactccagagggactgccttcgtttttatgggtatggaaacatggtggcattcttcagatattctcctgttgacattctctcagttaaccttcctccaccagtactggacttcaattgttgtagtacacaagagtggctaaaaagggtggcagttgagatatttggcaaaatggaatccttgcatgtggaggtgtctgaatttcttcactgtactgaaaagaacattgtaactgaggatgaacctgtgagggaatgtgttcaaaggcagattatcgagatgaaggattggcttaaaatgcaaagaaatgaatatgagatgttgcttttaccagtcatgagggaaagcaatcaccccatgcagacatcaattgatattctggagctcaaccgcttgcggcgtggtcttcttcttgatgcttacatttgggatcggaggctatgccatatagactcggttcttaatacacatggccatatttcaaaaaccaatccagataatcttgatattctcctatgcaccagactgaaggagtggaaagctgatttgctttgtggggatactgagattgaaaaatctttagggagtccaaagaaatctttgttatccagagagggccatttgaatgataatgagtacagtgttgctgatacaaatttagagatttgtttggagggtcatcctgtggatgatgcagatgatcttgacaaagtctacaacaaattcagtggagtaaagaagcggcctactgctgaacctactgatggcttggaacctgttgagaggttaccctcacttgcatccattttctctgatactattgatttggcatggactgggtcttgtgatttgcagcatgatcttccacaagctttcaccaaaattgatgaaaatgtatcctttaatttggacagtccgaagtacagcaatttagtaacccctgttagaattcactcgtttagttctacgctggggttgcggcagagagaacgaactggattagttccagcttctttgcatctatcatcattcaaatctgctgagtacttcggagctatgagaagcatcctgaaggacccaatgccaaatatgcgaaggtcctgttctcaaaggtctcctgggacgatagagaaattaaatgttgttcttgcacgtaaacccacatatatctcatctacttcaaatattatcaatgatggggcacggctactgttaccccagactggatatgaacatgatgtcgttgttgcagtatacgaggatgagcccaccagtattatatcatatgccatgacatcagaagaatatgtagaacaagtaacacacagactgaattccagtttgagtttttctcatcaaccaaatactaatgggattagcagccatggacttgaggcgtcctctccatctcaaggagaccatttgcattccaagggaactcattttaagttatccttcgatgatgactcaccgatttctccagataaaacaaagttctctgtgatttgctattttgcaaagcattttgctgcgctgagaaagaaatgctgtcccaaagatattgattacatacgttctctaagtcgctgcaagagatggaacgcgcagggtggaaaaagcaatgtttactttgcaaagacactggatgaaaggttcataatcaaacaagtcacgagaacagagctggagtcttttgtagagtttgctcctcagtacttcaagtatttaatggaatccttggcttctggtagcccaacctgcctggccaaaatagtagggttatatcaggttggcgtcaagagcttgaaaactgggaaggaagtgaggatggatctgatggtgatggaaaatgttttctttgaaaggaagatatctcgggtgtatgacctaaagggttcattgcgctcacgctacacggctggggacagcaaagtcctcttggatgcaaacctcatagaggcattgcatacgaagcctatatttttggggagcaaggcaaaacgaagattggaaagagctgtctggaatgatacttcattccttgcgttggcggatgtgatggactactctctccttgttggcatcgacgaggagaagaaagagctcgtcatcggcatcatcgactacttgcgccaatacacctgggacaagcagctggagacgtgggtgaaggcctcgggcattcttggtggccccaagaacgaatcccccaccgtcatatctccaatgcagtacaagaagaggttcaggaaagccatgtccaagtacttcctcaccgtcccggaccagtggtcctcttgacggcctggctagctaacaagaattgtccgccttaaccagaagcgtttgccgtgccatgccatgccatgccatagtacatgtccgtcattctttctgtgcctagaccctagagagagagagagagagagagagaggtagtcaaattcattttgtgtccgcctgtaccatctgtagcagccatagataggggatcatcctccgactggggatgctggatgccaagcatatggtcactgcagtgtccagccacagatagagaggcttggtccatgactcccatctccatgtacattacggccagcatataatatgtctgaggagaaaaaaaaaggaaatctgtcgacgaaatgcagagaattcttttgatgcctttgtggcatgtatgcagactgtgaaggctattgcaatgtgtcacccccccgtaatttcgttgggagtagttgcggttcacctgccgtgagagtgaaagctattgcatgtatcactgagctcttgacggttcttgtcaaatactcctagttaagtttcacgcaacaatcagacatcatcttcttcgagtaata

SEQ ID NO: 37144 - DNA, 420 bp, Zea Mays
caacaaacaaaaatacataatctacgaataatatacgaaaacaagaaatacccgagatcgcggatgagtaaaacgtacctatttcatgtaaatatactaacaactaaatagttagctacctaactatatactacaaaacatgtgctagataagtagtaaagtaatactgaactactaactaaataaaaaacactaatacaatactacatactaaactaaattaatagtaactaaccactaactactaactaaccactaactaaacactaagacaatacaccactaaccattactactgactaaccactaactaacaattagctaataactatccagacggttgggacgggacgggacggcgcctggcggcgcggctggatgggcgggcggtgaggccggacaggcggcagggcggtcggc

SEQ ID NO: 37145 - DNA, 4857 bp, Zea Mays
cagcgagcaagctgaaggtgaaagccacagcagctcgtccccttccccccacttcttcctcagataaggagaggccccaggccagagaaaaaagcatcgaatttccccccgttaattggcctgagccctcagccgtctaccagcagcagctagaggcagacaagctaggttttactgcttcattgagcacaaagatccgctgacctcttgctcttggtaaaaatccaacctttcttgtattgttttcttcctgggaaaacctccttgtggtgcataaacttcgtagtacactctgccatttctggagaggaagctgagaactactatccatatctggcacgacccttgtcaagaaccatggctgttcacatgccatgaagctgcttgaactggaggcacctaaatgctgtggattgttcctatgcagatgattggatcagtggtttcaggcttcggggggttcgatcagatgttgtatgaataatagcaggattgcttgagagactatagtttgggtactgtttgcttctgtatttactggtacggtttcctactgatctgcggctgcgcaggaaggcattctcttttttgccgtaccatggatgcaccggatgttcaacagagcatgggatataaggagtccaggggtggtatgcctaagtttttccatgcccttggaccagcactcctgatttcaatgggttacattgatctcgggaagtgggtggcagccgttgaagctggttcttgttttggattcgacctggtgttgctggctctccttttcaatttcactgccattgtatgtcagtaccttgctgcttgcattggcactgtcacagggaagaatcttgcagagatatgccaccaagagtacaaccagccaacatgtatattccttggtgttcaagctggattgtctttgttgacgtcagagctgactatgatttttggcatagcactcggattcaacctcctgtttgaatatgatgatctcatcacagggatatgctttgcaacagtgatggaagggacaataaatgcctgcatagcaggatttgcacttcttagttatgtgcttggcttattggttagccagccacaaattcctctcacgatgaatgtaatattccccaagatcagtggtgagagtgcttactctctgatggcgcttcttggtgcaaacataatggcacacaacttctacattcattcatcagttgtccagggtcagaaaaagtcatctgcagttggtcttggagccttatttcacgaccaccttttttcaatattgttcatttttactggaatctttatggtgaactatgttctaatgaactctgcagcagcggaatctactaatactcttctcattaccttccaagatgttgtagagctaatgaatcagatatttgtaaaccctctggcaccaactatatttttagtggttcttctcttctccagccacatcatctcgctgacatctgctatcggtagccaagtgatttcacaccatttattcggtataaaccttcctctttctggacatcgtctcctactgaaggtttttgccatagttcctactctgtactgggcgaaagttgcaggagctgaagggatataccaattattaattatatgccagattattcaagccatgcttcttccatcttcagtcgtcccactttttcgtgttgcttcatcaagatcaataatgggagcccatagagtgtctttgcatctggagatactggtttttcttgcatttctccttatgctattttcaaatatcatatttgtggcagaaatgctatttggcgacagtgggtggatgaacaatctgaaaggatatactggaagccctgtggtgctcccatataccgttttagttttagttgcacttatatctgtggctttttcactgtacctggctgttacaccattgagatctggaagtcatgaagctgaatcccatgaatggtctgtgcattctcagagagaactcttgaatacttctcaagaaagggaagatgttaaggtggacaatgttacatatgaggaagatcaaagatcagatgttgtcccttctcccagggatgtgcctgacagccatccggaactggccttggactatattgatacttctgacactgctgtagaatctgatcacgactctcaacaatctactgcttatgcatccactgctcctgaaacctgctcctccccgtcgtttactcgcgaggagtcaaaatcagttgttgcagtcaactggccggagcctttggagaaggttcctacttctactgtgatggaggaaagcacagtagaaaatgtggtctctaggatcacgactgaaagagatgttttagtagaaacagatgttgtctcgggcaaggataaggaagatatccgtactttggagtctgagaagtcaattgttgatagcaccccatatgtgtctgatgacggtccgccatcccttactttcagcaggggaaagggctcagatgcaggaaatggcagtggtagtctctcaaggttatctggtttgggccgtgcagcaaggagacagctagctgctactcttgatgagttctgggggcatctgtttgattaccatggtaagctcactcaagaagctagcaccaaaaagtttggtatcttgcttgggatagaccttagaacacctagcacatctgtaagaacggataaacaagctgctgaaatacttaagagcccactggtgagagactcaatgcggggggcagcttttttgtcaagctcagtggacatgatgtcccctaagaatgaaacgtcgaatttggaacttgcatatgggcttcagaggggacctggcatgggattgtcaagctggtctcagggtatgcagctaccaaatacacagctgcagagctcaagcaatagcctacttgagcagagtgcaagattaaactcaaattttagttcatcttattcagacaacaatcagttctaccaacctgcaacaattcatggataccagctcacatcttacctgaaacagatgaatgccagcccaagcctttactctagcatgccgctggacccacaacggcttccaaaatcatctgtgtctgctgtgccaaactatgctgattccatgatgcatgctcgtaatcataacctgcttgcttcactgggtggtactactacacagcttcctgcaacatcccgcgtaggctcaatgatgcctgaaagatcgtattatgatccttccagcgttgatgggaatgaaaacgctggttcacctgcttactcaaaaaagtaccacagctcacctgatatgtctggaataatcgctgcaagtagagctgcactcttgaatgaagcaaagttgggtgctgccattggaccacagtcatacctcagcaggctggcggcagaaagatctcaatatgcaagctcaacagccaggcccgcggctccattagcatttgacgagctttcacctcctaagctccagagtgatatcttctcggcgcagtcaagcatgagaccaagtgctagatccctttgggctaagcaaccatttgagcaattgttcggcatgtcaagtgcagagctcagtaaaggtgacttcaatcttccaggcagatcaggtggcgtggccaaggatgatttctcttataaggaatctgagacgaagcttcttcagtccctcaggctctgcatcatgaagctccttaagctagagggatcagggtggctgttcaagcaaaatggtggttgtgatgaagatctaatcgaccgagtcgctgcagccgagaagctattgatgcaagggactgccgagaatcaactgctgcttcatggtggtgatctccagcaacattcttccgaccaggccggcatccagtacatgcgcacgcttcccaactgcggggaggactgtgtttggcgcgcgtcactcgtcgttagtttcggtgtctggtgtgtccgccgagtgctggacatgtctctggtggaaagcaggccagaactttggggcaagtatacctatgtccttaaccgtcttcaggggatcttggaccctgcgttctccaagcctcggggtgctctgacaatatgcacctgccttcagaaagacaccagagtgcgcaatagcccaccccacagtgggctaacagccatgggcccggtccccacaccgatccggggcgccttcacgaccgcaggcgtggttctggagatgatcaaggacgtggaggctgcggtctcaggccgcaagggcaggagcggcacggcggcgggcgacgtcgccttccccaaggggaaggagaacctggcctccgtgctgaagcggtacaagcggcggctcgccagcaagggccagtagcgcgcgggtgtcagacaggcaggcgatcgcaagcaatgttaggaggagcctgactattgttctccaggggggctgccactggcgccggcctccctgagccctggattttttcgttgcacgacgttcctagggaccggtggttgcccgatggtcgtcttggtcccttccagcaggttttttttttccttccctctttctgttggtttctttttgttggctttgtgatgttttgtaaggggcaactagggtatgtgctcagaaggactcaagatgtacacgcgaagatgtactagtctgctgatgcagcgttgtaaagtccacactctgcaggttaaccctttttggggccgtcaagtgttagtgcgtgccctatgtatgttaatcacccctgcagagaggttgcgaatactgaactactcacagacctgcacctgtcgagatcgtttgtaatatccgacgtcttgttcagaattgaaaaacaa

SEQ ID NO: 37146 - DNA, 2400 bp, Zea Mays
ctcccgacgcgacgcccgctccctcacgatttccgcccccttgtctgttctcagcatttccgctccccttctcgtgttttcaaactcccaccacgagacgagcgaaccttccacttgtaatccagccgaccgtacccgctgccgtcgcgcgccggcatttgcccctgcccggcgccagctcgatagctctgctgcttcctcgccatctccgactccgcggcgagccgcgcgcccgtcggctagcggaggcgggagggcggcggtaccggtgaagtgtcgtccggaggaggaggaggaggaggagcgggatggggttctgggtagggctggtgttgggggttgcggcgggcctcgccctcatcgtcggcttcgtccgctgcgagaattctcgctccgcccgtcggcgacaactggctgctaccgttgctagtttctcaagaatgacgattgaagattcacgaaagttactccctgctgacctatacccttcttgggttgttttctcatcgcagcaaaaggcggcgtcagaactgatcaaaacctctgtagagcctgttcttgaacaatataggccaataatcattgcgtccctgaagttctcaaaactcactcttggtactgttgcaccacagtttaccggtatttcgatcattgagaatactaaggaatcaggtattgtcatggagctagagatgaattgggatgccaatccaagtatcatacttgctgtaaaaactagacttggtgtcgcgcttccaatacaggtgaaggacattggctttacaggagttttccgcttaattttcaaaccactaattgaagagctaccttgctttggagctgtttgcttttctctacgacagaagaaaaagctggatttccgactgaaggtcattggcggcgaaatttctgctgtacctggaatttcagatgctcttgaggacactataaaaaatgctattgaggactcaataacatggccagtaaggaaagtcattcctattatacctggggactacagtgatctggaactgaagcctgttggtaccttggaggtcaagcttgtgcaggcaagagatttgacaaacaaagatctgataggaaaatcggatccttttgccattgtatatgtgcgaccattaccagacaaaatgaagagaagtaaaacaattaacaacgatctgaaccctatctggaatgaacactttgagtttactgttgaagatgctgatactcagagtgtaaccgtgaagatttatgatgatgatggcattcaagaatctgaattgattggctgtgctcaagtcaggctgaaggatctacagccaggcaaagtgaaggatgtctggttaaaacttgtaaaagatctggagattcaaagggacaggaaagatcggggtcaggtgcaccttgagctgctatactgtccatttgacatgaaggatgaggctccaaaccctttcagccaacatttttcgatgacttcattggagagaacattgacaaacatggaaaatggatcggggggctctagttttgataggctgtcttcaagaaagaaaagggaaattatcatacgaggagttctttcagtaacagtgatatctggggaggatctgcctgcgatggatatgaatggaaaatctgacccatatgtcatactttctctcaagaagacaaagacaaagtacaagacaagggttgtgaccgaaagcttgaacccagtatggaatcaaacttttgattttgtcgttgaagatggcttacatgacatgcttatgttggaagtatatgatcatgacactttccgtagagattacatggggcggtgcatcctgaccttgacaaaagttttgctggaggaagagtacaaggaaagcttcaacctggagggagcgaagagcgggaagctgaacttgcatctgaagtggtcgccacagccaatcatgcgtgattcgcgtgaagcgggcagcttaaggtcaagataaggccagtaagtgcgcacgcattggtgtacgtgtaattttttttggctgggtgtctcggcctcgagacctgcttggtcgagggtttgtaaattttgaggtgcattctttttgaaattcaacgcgtatgcggggacggtccaccaaaattttattccgaccaaggactccagttacgtgagctagcagaagtattcaggtgcaaaatgacccgttgcacatgtacatgaggctgttatatttcgatcggttaagctcgaggtatgttaatgtagtcggcgcatcgcaatggtttgtctgtatactccttgtaatatttaaagtatggaaaaaaaatgtgtagatcagaaagctagtgaaacaaattcagcagttggcggcttgacgcgaccacggtcacgggtggttgctcact

SEQ ID NO: 37147 - DNA, 1750 bp, Zea Mays
acatgactattattttgacatcataacctacatataaagattagagactaatctgtttttttctgagctaaggaaatgaacttccatcagacttgatagacacactactaaagtggatcccaagcaatgatgaggagcttaggcttcgactgtcctcccatagcaccgccacaccgcatgcgtccgcggcggcgtccgcctcggcgccggtctcgcacaccgctccctagctggggaagttcatcgcctccgagcccttcaacgtggggggattcgattgggcgatctacttctaccccgatgggaagagcggcgaggatggcgttgtctacgtctcgctcttcatagccctggccagcgaaggcaccgatgtgcgcgcgctgttcgaggtcacgctcgtcgaccagagcggcaaggggcaagacaaggtgcatacccactttgggaggtctctcgagagcgacccatacaccctcaagtaccgcgacagcatgtgatgagtctatgtacaggttgtttcctacggtatgcttatctatggtggaaagaaaaagtgattgactcatacttgaaaagaaaagatggcctttgcccattgacgcctgagacaaccagaaatttgccatgacctcgttcctgaccaagaaaaactgtcaagcacagaatcacagttgatatattgggattccaaggtatcagaggctgatatggatgcaatgtggaaacatcctgatgtgtataaggagtggataaaatctggtgagagacgtggaaatgtacgattctcccatgatgcaaagaacatgccttacctttctcgcgtcgaggtgaaggatatgattgccttctcatgttgtgtatatgatggtggtgatgaggagaaggaaatggatgcagccagagaaataggttggagagggaaatttactaagagaggacgtgtaataagaccaggaattattagaatgagtggaaaatgtcctcttacacctttggaggttgggttaatgcttcgtggaatggatttcagcaataagactgcaatctttttggcatctggaaagatttacaaagcagagaagaacatggcttctcttcttgaaatgtttcctctcctacagacaaaagagacactggcatcagaagaggaacttgctccattcaagaatttctccttctagatggctgctgttgactatagtatttgtgcccaaagtgaagtttttgtgaccacacaaggtggaaatcccgcattttttatgggtcacaggagatacttgtatggtgggcattcaaaaacaattaaaccagacaaaagaaggcttgctgtactcttcaataatccacgtatagggtggacggcattgaagcggcacttgcttaatatgagagcatacagtgatgtcaaggggatcgaaatgaaaagaccaaacgaatctatatataccttcccgtgtcctgactgcatgtgccgcttgaacagaacagaacactcgaaatccaaacagagtagatagtatatttcgtatgtagaccaaatggctaaaaccatccaatattttcatagactgaaaatgcagagaaagcaacaaaggtgtatcaatacagtcgtacaagcttagtatcggatggtttttaatttgtatagcaaagcacgggcacatacctatatatcttttaatgtatgtaaatattcttaacctttaaaagatactaacaagcaggtataacgataattaatgtttctata

SEQ ID NO: 37148 - DNA, 850 bp, Zea Mays
gagatgaatattagagtatccaaacataagcattttgcaaaccgcgacaacaagagactaaaaaaaagcaaatttgccgtctgcaaaacccctcccacagccgtcgccccccgccagcccgcctgcgagagaagtccgcttcatccgttcgccgcctcaaggacgagatggacacatcaagccctgcagcacttgtcaatgcacagatgctgaacatgtttgttgggcgaagagtgcgcacggttgttcaagtccaacacaatgaaggtggagtgcttgtcgggcagtccaccgatggccatcagttatgtgtcaaaagtgccatggacgtccccgtttcacactttatggaggtttatggaattgctgaaaacagccagaccatccgtgctgaagtttgcacagattttggtcccaactttgatcccaaggtttttgatgagttgtgcaagctggcgagtggcaggttcaagcacttgttcctgtagagataatcatcgcatggaggatcttcagccaactgaagcttgtttgaaactgaatgtttcggctttaaatttaagatttggctacatgttccttcattgcatggaggaccttcagtaccctgttactcgtcattactggacttctattagcatgtataagcaacgtaggactgcgaatacaagcaaaatatgtcatgtagttgaagaacctatggtctttttctacctttaggcaatccaaccctaagctttttatgttgctgtcgcttgcattgggaccctgagttgctacaattgtcatggagtttgatgagaggaaaaatgattctaatatgctagttctaaatgtcaattgaactgtt

SEQ ID NO: 37149 - DNA, 2783 bp, Zea Mays
ctcctcttcccctgcggccgagctcgccagtcgcctgaactcgtctcgcccgctgccgatctcctctctctgctcgtcgcgccgcaacctggagaggggaccgcgctcggtcgactaccacctggggagcgggcgggcggcgtccgccctctgcacccccccggtgtccccgcgaccggctccggcgcggccggcacacaggtccgcagggtttgaaaacttctcatatgctcatgcgttcggcgctgattgttgaaagtagctttgggactccgaggacctaaattctaatcaattgtgaaatctgaaaggtgtagctatttgtacttctggaggtgtgggaagaaatggaatgcaacaaagatgaggcccaaagggcgaagggtattgcaaagaagaagtttgaagcaggggacttgcagggtgccaggaaattcgccctcaaggctcagactctctttcctgcgcttgagggcgttgatcaaatgatcgccatctttgatatctatcttgcttcagaagggaaggttgctggggagaaggactggtactctatcctttctgttcccttgaacgcaaacgatgaaaagatcaagaaacagtacaagaagttggttcttcagttccaccctgataaaaacaagtcagtgggcgctgagggtgctttccagatggttcaagaggcatacacagtgctatcggatagaaccaagcgagctgtatatgaccaaaagaggaatgtgaggacattccaacagaggacagcacaatcaggtaaagcaagcacggtccctggtgcatccaatggcttctataattttgcagctaatgctgctactgcctccaagtggacagtaaacaagcaaacagtgggatcagcaacacatgccccatctgcaccttcaactgctactcgtgcacctgtggcaaagcctgatacattttggacctcatgcaacaaatgcaagatgaactatgagtacctcagggtgtatttgaataaccatcttcgctgccctagttgccgtcagccattcctagcaaaagaagtacaaaagccaccagcagggaacgtggtacaagattcaaacatcagtggtgctaatcaaaacacaaccactaatagaaatttgcagtggggtccattttcaagggctgctggtgcagctagtgccactgcatcgtctgctgctgctgctcaagctgctaatgtagttcatcagacatatgaaaaagttaggagggagagggaggaagcacaagcagcggcaagaagggaagaggctcttcgccggaagtacaatcctctaaagaggcatgcaagcatgtcagggaatgttaatcttggaccaggtgatgcaacatctggaaagaagacaaggactatgactaaagatgctgaagttggttcttcatccaccatatccagtccaggagcaaatttttttagagtgcctggtgtgaatatatccttttccaacaacattggggcctatgagtttcaaggcgatgatggtggccccagttggaaacccaggcctctgatccacttaagtttagccaagaccttctctcagatggatcttaggggtcttttgctggaaaaaacgaaaactgagcttaaaaacaagctaacagtaataaaaagtaaaacatcccaagttgctagtgaaaaagcgagcaagaaaattgcggtcaaggaaaatggtggggataatgaagctcttggaccagaagatcctacagctattaaagattctcatgattcagaacagactggttctaatactagcacagatgctgaaaatgaagatgatgaccacttatcttataatgttcctgatccagatttccatgattttgacaagaatcgcactgaggaatgtttccaaagtgatcaaatttgggctacatatgatgatgaagatggaatgcctcgttattatgcatttattcagaaagttctttccttgaaaccattcaagctcagaataagctatctcacatcaagagcaaatagtgaatttgggcctttgaattgggtttcttctggcttcataaagacttgtggtgatttcaggattggtaaatatgaaagctgtgatatagtcaacatgttctctcaccagatgaaatgggataaagggccgcgcgggcttatcaaaatttatccacagaaaggtgatatctgggctgtttatcggaattggtcctctgactgggatgaagatactccagataatgtgctccatgcctacaatgtggttgaggatgtcaggcgaagaagctgcaaatgtccccaaagatagttatgagcttgatccagctgctatttctaaagaactgcttcaggggatcacggaagcagtggagccaaatggaacctaaggcagttgatgatgcctgccttggttaacctgccattttgaagtaatcgagcaaaaaaatattaacgcttgctagttttatagatttccttctgcttttgactatcacctttgcatagaagagatacaatggggccagtcattcaggagtcagctgcttagcagcttctggtgtaattagcaggctctgatatgaattttgctgtgatatgttacttagggcttgtttggatgtacgtggattggaggggatcgaagcggcatataatcccttactagtccattcccctcaatcccatgcatccaaaccagcccttagcaactctagatgtgggtgtactaacgcgaagctcaagcagtttttatggtcaaagaaacgataaaaaaataataaaa

SEQ ID NO: 37150 - DNA, 3694 bp, Zea Mays
cagattcctcccgcctacgctcgcgggcctctcctgcccgcccgatttcgcctcgaagctcgtcgtcgcgggtgtgctttttcttcgtgccgatttgctgcgcctcgtcgccggcgacctcggcgcttgcaggcggccaggtgcagcaggacaggtctgcttccacagacttcttcgttgtttcgcaggtggcgcccacctccaccttctcttctctgccgccgccctgctctagtggttccggacctggggtggagcggagatccacccgggcttcgattgctttcgtcgtcttgttggctttggggtggagacgacactaagttggaatttttatcacacaaggaagcaagaacaggaaaaattcacatttcagtgttgcactctgtggagggttcattgtcagttcaccaaaatactacagtactggagggtttttgttgaagtgctcctcatgttcaccatctctaaattgtcataggctcagtctgcatgatcttgctatgagtgcatagataaatcatctccgtatctgtgttcagtatgccaccatggtggggaaaatcttcatccaaagaagtgaagaagactgccaaagaaaacctcattgacacatttcagcgtctcataagttcaaatgaacaaaagggaagcaaaaaatcacgaggtagtcgtagacatggtaaagacacagctggtgacaaaggttgctggtctactgcccaatcccgctcaacatccccttcaaaagaagtctctcggtgtcagagctttgcagcagatagaccacatgcacaaccacttcctcttcctaaatcacgtgctagggtgtcgcgttcttcttctgatattaccaactcaaagtccactttggaaaagcatggaaaaggacaactgcttccactccccccaattcagcctaaaaaaacacctgaggctactgaacctgttactgaagtagctactgcttctgtctccagcaactgttctattgatagtgatgatcctggtgattctcggcttcagatccctgtgggaaatgagactgaaaatgcgactagaatcactgcaacaagtagttcaagtgttgtgcacaaagagcgttctagtgccatcaccagaaagaacaccaaggaagttgcaaagccaaacaatgtttttctcagtaaccaaatcctgtcaacatctccaagaggtaccgttgctgatggttatcaatccaatttacagagcccccgacagattgccctggagagtgctccgaatagtttgatgtcaagcccttctcgaagcccaagaattatatgtcctgatcagattccaacttcagctttttgggcagtaaagcctcatactgacgtaactttccttgggtctggtcaatgctccagtccaggttctggtcagacatctgggcataattcagtgggaggagatatgttaggcccgatcttttggcagcctagccgaggtagcccagagtgttcaccaattccaagcccaagaatgacaagtcctggtccaagttctagggtgcatagtggaagtgtctctcctttgcatccaagagctggaggggtcactcctgagtctccaacaaatcgacatgctgaagggaacaagaagcaaacccacagattgccacttccaccattaagcattgctaatagttctacctttttgccaaacagctctaccccagctagccctatatctcgtagtcctggtagaacagagaatccaccgagtcctggttcacggtggaagaagggaaaactgattggccgtgggacatttggccatgtatatgctggttttaacagtgacaaaggtgaaatgtgtgcgatgaaggaggttactcttttctcagatgatcctaaatcaaaagaaagtgcaaaacagctgtgccaggaaatatcacttctgagccgactgcagcacccaaacattgtgcgatactatggatctgaaactgttgatgataagctttacatatacctggagtatgtttctggtggatctatacataagcttctccaagagtatggtcagtttggtgaacaggccattcgcagttatactaaacaaatacttttgggcctagcttttttgcatgcaaagaatacagtacacagagacatcaaaggtgcaaacatattggtagaccctaatggccgtgtaaagcttgctgactttgggatggcaaaacatatcaatgggcagcagtgccctttctcatttaagggtagcccatactggatggctcctgaggttataaaaaatgctagtggatgtaaccttgcagttgatatatggagtttaggatgcacagtcctagagatggctacttcaaaaccaccatggagccaatatgaagggattgccgcaatgtttaagataggaaacagtaaggagcttccgccaataccggatcacctctcagaagagggtaaagacttcataagacagtgcttacaacgtgatccatccagccgtccaacagcagtggatcttttgcagcatccatttgtaggaaatgcaccaccacttgaaaaatcatctgcctctaatccactggaacagttgacgactatatcatgcagaacaaattggaaggtggttgagcatgccagaaatatgtcctcgcttggtttggaaggccgataccaatcaattttgcagagaagagctgccaaattttctttgccaaatagtgatatccgtatacagagtaatatatcttgtcccgtatctccatgtggaagtcctcttctaagatcaagatctccacaacatcaaaatggtagaatgtcgccttctccaatttctagccccagaactacttcgggtgcttcaactcctctgactggtggtagtggagctgttcctttaaaccacctgaggcaaccagcttacagaaacgagggcttcacagtcacatcaagaggttttgatgaccacatacctagccggcttgttgatccagtacatggacgttttattcgggtgcagcaactttctgcgggtcgtcaggagagggtggtctctgaagctgacattctgagctctcaatttggaaagatgagacatgcaaacgtgtgggatccgcatgatagaccgttgccttctgagagatcctctcagcagtgttttggggatcatgcgaagctaaaaccttcgctggacttgaggtctggccctctgcaccctgggcgcaaccatggccattgattctctaagcaaaagttaatggagtcgtgtctatgtgatagctagtggtcctaagctggttcactgaaacctttaattgtatcatagaagaagacatgttcgttaattatttcagttgctgacagttggcagtggataaagattctccaatgtcaatcccatattcccattactctaaaaaagatgagacatgccctaccaggaagaggggatgttgtatactagactgtccagataccgaagggaccccaaagcagtgactcttgaacctgtatactcttttactctcgtcgtgccgacaacaatttagttctcgttttcttatgggtttggaaggccattgtacagagggggggaactctcaacaagaaaaatccagattagaaggcacaggagaaagcaagacactgatgagtgactcgaggaggtgcttctggaatggaattattacggaagaggaggt

SEQ ID NO: 37151 - DNA, 1677 bp, Zea Mays
ttcacccatgacgcttcaggggtgcgagtggggggatctgcctttaaaaaaggggccgatcccccgggcagtagacattcctcgctcctcttgcgaccaccgcgcccttccgccttccgggcctctagatggggtgtgccggtgttctctagagggatccgtgtcaaggtcatctcttccggtgacttcaccatcggagagcatgcgcccgtggtggtgtcgccgatcttgtcttcttcctgccgccattggaggagtgcaaccccatgggggttggcatcctttcgccactattcggcttcaaggattttcatcacgtagcccggctgcagtcccccgccggcggtcacccaggaggatgaccaccagccttgtggtggggagaagcaagccgggttgcggcctctctcccaccctcagcttcaaggatgttcatcatccttgctgtggtgggaggcaggttgagccggggcccttccctccgcttgggttggtgacccgcttcttcctccagcattcggaggggaagggtgttcaccaatcctgcggggggtcggtccttggctacacggggtcggccgactgcaggctatcagctgcagcgtgtctggccctttggggctggatagctctggtgctgcctctgtcgctgcctcctgctgcctggtcggggtgtggttacccatccaccacacgggcgacagtcgtgtcgtgcgcgggtttgccacattcatggcttcctctgccggtcgggtgcattgggggactatacaagacgtcgtacgccgcggcagtggcggcggtgttcttggatggtcttgtcctcactcatgttggtcaaaacaggagcgaggaccccttcgtgcgtgctgaggcagccgccgcccaccggtgcagaggtggtcgccgctgctggtgaggctgcctcttgtcggggcggttgcctccgctggtgagggcatcagagccatctgtcgctgagtccccgactccttggctttaatggcctcgttgtcaccccccgtaggaggataggggcgaggacctatccgcagtggcgcacatgctgggatgattgccgctgctggcgagtcgtcggtgcagaggcggccgttgccgtcggtgctgatgcggttgcctctgctggtgagccgctcggggcttgttatcccgcggctcttgctggtgtggaggtagttcattcctgcagaaatgaagctggggtcccgcttgtaagggaatgtaatgacatctgcttgaaagcaaaatgtaataacatatgtacgcaggatttagcctgggaaggcccagttatgtgcctgaaccccctagatggtggcttcaagtactaagacaccctgccgcagggcggtgtagtatgtaggcccacggtacagcctagctgagcggctacatggcttccggaccccccaagagatgagtgcctgttcttcaaagttggacctctaggttgttggatgcacaagactttagttttaaatactaagacactcgctatggggtggtggagtgtgcaggattttgggtacggaaccaggctaaccggccgcacaggctccagaccaccctatggagcgggcgtctattctttagaactggcccccaggtcttcccctgtttttgtaaataaatatcgacttttaaactgcatttaac

SEQ ID NO: 37152 - DNA, 2581 bp, Zea Mays
ccacgacggcgcgccgcactctgcccacgacctcgacctcctcccccatgaccacgacctcaaccgctctgccagctccgccacttacgcacgcacgacctcaacctcgcctgattcagcgcatagaagagcgtgtggcgtcgaggtcgagcgtgcggcgccgaggtcgagcgtgcgtcaccgagggagaggaaaaccactgagcgttatttcctaagcctcctgcttgatgtctccaccgtccctcaacgcaattgccgccgcccgggatgcgctccacccccgcccgctaatcgtccccttgcaactgccgccgcggccgccaatcggcccccaagaaccaaaggttcgagctccgcaggtggcaagctccttcttcatccacgccctccctccgccttgagaaccagaggaaaccagagtcaccaaaactacgggcaagactgtacgaagggaaacatagtactcccacgaagaagaagtgctgcaactgcaggaactccaaatgtttgaagttgtttcgagtggcttcgcatcgcaggctgccaagcccaccgagaagcaggtcaaggtacttgccttatccgtgatgagcgaatgtagttgtaaaatgggaaacgttgctgttttattatatggccgggagtggtgaactggtgataggctactcttgtcagtgcatatgtattatttgcaacccatggattatgcaactatttctctattatatttatattttttccctgatagtgccttcatgttttgtgttgtgctttcacatcttgatattatgtgcctcagtcaaagtttcatatttgtttctattgttttcttggttcaaatcatgcgttgcttgatggtgctgctgatttagctctagagatatgggggaaactacggaggaggaacaaatacatagtgatattgccagctggcctggcattaatatgtctgtaaaacctaccaactccagccttaagttgtatggtggtgcagcttttgggagacatgcatgatttcattgtgtaatgtatttaatgaaatgcccacaagtccagtctcaagggagaaggtagtctttagcctgcaaccatacacatacacaatttattacgagaattgcttatataattatgtcattaggttgcaaacatactacttgctcatgttggatgacatggaagcagtaggttgaccaaggcaacagctgagatagctcgtgcagccaaccgatcatggcttgctcttcttatcgatactgcatgtgaccagttttcatttatcctacaaagtctgtttgatctcgctatggagcacaaccgcaataaggactcacaatgtaagagcttgaccttgctattcatgctggttcgtcttgctttacatttgcctgggtatcatttggttcacagtgaagtaaattataattgtttagtaaatatttcattttattttgttctacatgttcatcaaaaggtaggcaaggattgcattttctctactgcatatttagtcatctgcattccccaacttatgctgtaaattttgctaccaaattatgctgtagattttgctttgcgatatctcagtaattgcaggagcataatttggtagctaatgtgttattgttttggtcttcccaatgacgactgttgttggcacttggcaggatgattttgtacgtcgtttgtgccaaactgttttagttttgaccaggtttatatgaaaaatagttacacaagtacattgtaaaagttattttataattaatatagtgatactaatttagtgttctacatgttgatattttttactatactttagtcaaccctaacttcgttttgacccaagaattttggaatggacagaatggttctttcattaatccattgttttgttttatatgttgatcagcccatcacaatgcctttgacagtgactttgctttttaaggtgcagtcaatacacatggcatccatcaaattacagaagaagttatttgtagttgcaaagagaatatcaaataaaatacttgttgagcttaagtttcttcatcaaatcatttttgggaggcttcaaatgcactataccatggtttggtgaaaggagagaagatgaaggtgctggtacatcacaatcaatactagaagcaagacagacgcacccactattgttactgaaggtcaagatgcacaagatgatctgacaacaccacatgcacctaagatgtccaaaaagattactccaaggaagaaaagcaattgaactaccttatgtatattcaaaattagtgtattatccactatgttgtgtcaagaactatgacttcaaaattagtgtgtcatgaactatgctgtttcatgaactatgtcttcaaattctgggaagtggagtgcagtttcttgtataattttgaacatgtccatgtgcacctactctgctaattgtgtcatggactgacatgaattatgtcatgaactctgccaactgtgtcatgaactgggaagtggagtgcaccaaccgtgtcatgaacatgtccagtttactgcaactctgccaatgataataaaatgtccagttt

SEQ ID NO: 37153 - DNA, 1734 bp, Zea Mays
gggcgtattcctctctctttcctcaacctcatccgagtggctctccgtgtgctgtggcggcggcggcgcccggctctgctcggacggactccaccgaaggctcggctcccctcggactccacctgcgacggccggccctctgcctgcaccgacggtgcccggctccctcggcatccaccagcggtgcccgactccaagaaatgtacaagtcacggctgcaggagctgtgccagaagcggcgatgggcgccgccgttgtacgagcctacccgagagggtcctgcccacgcgcccctcttccgcgccactgtcgtcgtgaatggcgagaggttcagttcccgggatgaaggggagaagtcactcaaggaggcgtacaacctcgcggcgatggccgccttcgacaacctcatcgcgctcccggccgcggcccttgcccctgccccggctgctccagcgccgccctcatccgagacccagcttccttacaagagtcagttacaaatttatgctcagaagcgaggcaaactcctgccttcatatcgtcccattcatggaggttctcttcatgcacctctatttaagtcagaagtaaccatagatggtcaaacatttgagagcccagagtactgtcacacaatgaaggaagctgaaacagttgctgcaaaagttgctctgatgtccttacctcaagaagcaaacccaacacagcaattactgtaaatcatgatgctggatcatctggctctgctaacccacttcctgttgccgctacaaaacagtctgttgatggaaacactctacgtgcaaagctggaagttaacaaatcacaccttgcagagccaagcacagaagttgaagcaatatattcatctacagaagttgacaaactgccacttccagggccaagcatggatatcgaagtaatggactcaactcttgaagttgacaaactgccccttccagagcgaagcatggatgttaaagttgtgaattcgtctctgaaagttgacaaactgcactttgcagagccaatcacagaagctgaagtgatccactcatctctgcaagttgatgaaccgctcattccaaagccaggcatgagctcatctctagagaacacacctgctgtgaatggccactcagcccccatatccccaaccattactcctactctaataagcgtgccaacagcaaccatgcctgtcagcaatgacagatgcggttgctacatgtcaaccaacagaatccaagtctaccctcgccacactgatatggttatcccggaaggcgcggccgtgcttcccatcagcgataatcagtgggtagctgtcagcctaccttattccatggaacaaagggatttctgttgccgtaatccggactgccacttaggaagataaaagcagacaaaaggatggatgctttgtgatgattatatagcttgtgatgctgagcattgcccgtgatgtactaaaatctagtgtaacaagactgccttgcgctggactacgattagtgtccctaatgcggagacttgtgtgactcctattgtatctagattaagctgtacttgtttgactatgtgcggaagtcttgagttacactcctatagtagaggacttgaactctggatggaccatccgcaacatttatcatgatcagacttttttcatacttcctacttgagcttgttgtctttcggaatgcttctgtatgttgatatgcgcccgagttt

SEQ ID NO: 37154 - DNA, 3165 bp, Zea Mays
ccgcctcggcaagcgccccctccctagcggcaatctccctcggcaagcgccctctcccccgcagcaatcttgccgcgccctcgctccacgacaatcttggcaatgtccctcgctccgcgccaatctcgctcgctccgcggcgcccccatgctcgccctcccccacggcccccacggcaatctgcctcccccataagggcaccatcccgagcccgccccagccgccattctcgcttcggggcgccgcgtccgcgtcgattcagtttccctcgagtttcagaaaccccgcccgccaatagccctcgcgtctgtagatctcgcgtcctcgatggaaagttcgcctccacgccattcatggcgccttcctcggtccccttccccatgaccatatcacgccattgtggaatcatggtatttgtcatcttcgtggaagttgaataaccgcatataatttctaggagcacccgggccactgccagtccgccatgcccaagccaccggccggcttcgtgctgaatgaatggggcaggtgcatcgccgctgcattcaagtgcatcttcatcatcgtgcggagttggcctgccgccggccaccaataccatcgcctcggtccacccaccagttgcaacgctggtcctgtgctctcaccatttgatagggagtgagggacgatgggatcaggtcgacctatgatgggcatgcctgctccgcctctctggcccgatctcacagtcatccccaaattcccatgtactactcttgctatcaatcggctgaagttgtatgatgactgttgttcattgaattttctttctgtcaatcgacccgattactcttatttctgactaaaaaaactcagactcaatgtcatgatatttgtctttgcattggttctttgtgaggggttatatataatttgagaaatttcaagatgtgatgattaccaggagtcagcaaaaaaggtattgttttcaggaagaatgttcttgtgaacaatcatcttcacagctaccccttccatgcccattaagaaacaagaaagaatcgcaacatttaggttctccagattttctaaagctcaataattggtaagcctacaacctttgtacagacatgacatggacatatcagtgaactgatgggagagtattaataattctggtttgctataatttctttaccttttatttcttttaggaattcagtccgaatatattcattgaaccaaagagaggatccatgtcggacgtggtggcttggtagatgtggaaatttttccaatagtgacccattttcctttcataattttcatttcatcactacacaaatttcatggattgcttactgactttggccaatatattttagatatgtccatagttttgtttttttcatcccatatctaagcttcagtaaaacaaaggttgtgttgttgtgcatatagattgcctggacataatcatacgatattcaggaaaaaatatttcacatattcagaagaatttgctcttgtttcttcatgtttcttttgcctccttgactcttagcatttggttttctgatttatgcaggttcagtacaaagaagatatcaattatgaagagacttcttcatgaattcatgaggaaacaagctcttcacctgcaggtgtacaccgaggaaatcagagtgcagagctctggtctttatctgccacggatacgaagccgagtgcagcatatccatcggaggtaaaccttcagtttcatttttcatgttcttttcattagtgaaaaccatgaactcatggcatcgatgtatgctcacaaacttccataaaaaacacagacacaacctttgttttagtacaccgtggatacattgtccatggaaacaaccatgatggccacagtaaatcttcaggctcgacaggctacctgtcgagctttgatgacacgttagagactgctctgaccatttcaagagtgtatctggtgagaacgaagctgtggattctagtggctatgtacgcaaaccatagccctacatgggacctccatttatttgctaacatgtccattgcatttccatataaatgagagaacatgctaaagaaaagattcctctacgggttctccatgggaggaactgtggtggtgcagctccatatgaatgatcctttctactgggacagtgtcgtgttgcttgctccaatgtgcagggtctggtgttaactgtattgaatggcctaagtctcctgcctatatttcccctgtgtctgtggactgttgtctttctatttctttctataggattgctctaagtgctctcatcaaaatatatggttgctttttgtttcacctggcatcggacttcgataacatgcgtcctcacctgatcattgttggcgcactgaagatgatcaacatcattgcgcctagctggagagtcatccctgcaacaaacatgatcgacaaaatccgcaaagaccctcagctcaagaaaaagatctgtttcaatccgtacatgtacagaggaaacctcgcactgcaaataggctgcaaactcctttccgtcagcctagacatcaagaagagcctgcacgagtaacatcggcacggacgacgtcgtcactgatcgttccgggagcaagctgctgcacaacctgaagaagatttgtctttttaagatgaaggttctgaagaacgtgatccaggtcgaggagatttctaaggtcttggaaatcagcggcgagcgcagcctcatcgataacttcgtcttctcctaccacgtgtaataatcacggctaatgtgacacttttgcaacaatatcaatgccggacaacatgcatgctccttgggaggaattaaggggaagatgaagaactaaaaaaattaccagaatctaatttacgcacgccaagtcagaccaccgtgaaaaactctatctccacgtgaccaatcttctccatttttcagtttgcaagatactttttatattgattaaagttcaataccaataacactaatgtgagctcactgtggtgttcatctttttgcataaattttatgaaaagaaaacagaactctttctattttgccttctctgctatagtaaagatgtaccatttcatgtttattcgtcctctttttggttccttacggtcaattaaggattatacttttg

SEQ ID NO: 37155 - DNA, 4217 bp, Zea Mays
caaaaacgttgccgtctaaccggcgtacggtagaatcgaacatgaaattcttccgcctccgcccgccggtcgccagagcccggagggagagcgctgagaagcagcggtagctggggaccgggggctcagcttcatcatttcccaaagcccccgagctagcagagggagtggtgcgagggtctcattggacgatttggttcttcaaacaagaagaacatcaccatacttaagaatgtcaatggtatcctcaagccatccaggatgacacttcttcttgggcctccatcctcggggaagagcacactcatgcgggcactcgccggcaagcttgacaaaaatctcaagagttctatcctgagaggactagcgcgtatgttggtcaatatgatctccacaatgccgagatgaccgtaagagagacactggatttctccaggcggtgcctaggcattggtgccagatatgagatgatcgccgaacttgctagaagggagcgggatgcaggcatcaagccagatcccgagattgatgctttcatgaaagctactgcagtacaaggacaggagactaatattataactgatctcactctcaaggtgcttgggctggacatttgtgctgacgttattattggcgatgagatgatcagaggaatttctggcgggcaaaagaaacgtgtgacaactggggagatgctaacggggccagcaagggctttatttatggacgaaatatccactggtctggatagctcgagcacatttgagattgtaaagtttatgaggcagttggtccatgtaatgagtgaaaccgtcatgatctctctgctccagccaccgccagagacatacaatctttttgatgacataatcctgctatcagaaggatacatagtgtaccatgggccgcgcgagaatatcctagaattctttgagtctgccggtttccggtgccctgacaggaaaggtgtcgcagactttcttcaagaggttacttccaagaaagaccaacaacaatactggtatcttgatcaggagcagtatcattatgtatctgtacccgactttgcagaacgtttcaaatcattccatgcatgccagcagatgcagaaggagttgcaaataccttttgaaaagtccaaaactcatcctgctgcgttgaccaccagaaaatatgggctttccagctgggaatcactcaaggcagtgatgtcaagagagcagctattgatgaagcgcaactctttcatctatattttcaaggtcacccagttgatcatccttgcactcatgtccatgactgtgtttctcagaataaagatgccccatgggcagattgctgatggcaccaaattctttggggctctgacttttggtttaataacaatcatgttcaatgggttcgctgagctacaattaaccataaagaagcttccagttttctacaaacatagggatttcttattcttccccgcttggaccttaggagtggcaaacataatcttaaaagttcctgtctcgttcgtggaatcagcagtatgggttgttctcacgtactatgtgatgggctttgcacctgctgcaggaaggttctttcgtcagtttatagctttctttgccacacaccaaatggcaatggctttattccggtttcttggtgctgttttgaaaacaatggttgtggccaatacttttgggatgtttgtgctgctcattattttcatctttggaggatttgtcatccgtagaaatgacatcagaccatggtggatctggggttactgggcatcacctatgatgtatagccaaaatgcaatatcggtcaacgaattccttgccagtaggtgggctattccaaacaatgacacgactatcgacgcgccaacagtaggcaaagcaattcttaaatccaaaggcttgtttactggagaatggggattttggctttccattggagccctcataggattcattattttgttcaacatgctctacctttgggcccttacatatttaagtcctagtagtggctccaatgccctggtttcagaaggtgaggatgatgtaaatgaaatggcattggaaggaagaaggaaagatgcaagaagaagcaaagatgaaatatcccaagttgtatccagtgatccaggcactaatggaggaacaaacacgctagctcaatcacgagtcactttgcctttccagcctcttgcactttgctttaaccatgtaaactattacgtcgacatgcctgcagaaatgaaggaacaaggattcacagaaagccgtttacaactactctctgatatcagtggcacttttaggccaggggttctaacagcactggttggtgtgagtggagctggaaagaccactttaatggatgtcctggcaggaaggaaaactagtggagctattgaaggagatattaccctgtcgggataccccaaaaaacaagaaacttttgcccggattagtggttattgtgaacaaactgatatccattctccaaatgttactgtatttgaatccatcacctactctgcttggttgcgtctttcctcagatattgatgatggtacaaaaaagatgtttgtggaggaagtgatggcccttgtagagcttgatgtgttgcgcgacgctctagtgggtctccctggagttagtgggttatcaactgagcaaagaaaaaggctgacaattgctgtggagctggtagcaaacccttcaatcatcttcatggatgaaccaacttctggtcttgatgctcgagctgcggcaattgtcatgcgtacagtaagaaatacggttaacactgggcgtactgtggtctgcacaatccatcagcccagcatcgacatatttgagtcttttgatgagcttctgcttttgaaacgtggaggtcaggttatttatgctggtgaacttggtcgccactctcacaaactagttgaatattttgaggcgattccaggtgttccaaagatcacagaaggatataatcctgcaacatgggtgctggaagttagttctcctctatctgaggctcgattgaacatgaattttgctgaaatttatgcaagctctgtgctttataggaaaaatcaagaggttatcaaggagttgagtattccccgatcagacaaccaggacctgtcatttcctacaaaatattcacagaatttctacggtcaatgtgccgcaaacttttggaagcaataccgttcgtactggaagaatccaccctacaatgctatgcgctatctgatgacatgtctctttggccttgtatttggtacagtattttggcaaaaaggaaagaacatagattcacaacaagatttatataatctgcttggagccacttacgctgctacattctttcttggggcttcaaattgcatcacggttcagcctgttgtatcgattgagcgagcagttttctaccgtgagaaggcagcggggatgtactctccgttatcctatgcatttgctcagacatgtgtggaggtcatctacaccatcttacaggggatactgtacacagtcatcatatatgcgatgatcggatatgactggaaagcggataaattcttctatttcctgtttttcatcactgcaagcttcaactacttcacattgttcggcatgatgttggtagcatgcactccctccgcattgctcgcgaacattctcatcacgtttgctctacctctgtggaacctctttgctggattcctcatcgttagaccggcaataccaatttggtggaggtggtactactgggcgaaccctgtgtcgtggaccatctatggcgttgttgcgtctcagtttggcgagaacgaaggtgagctttcagttcccggtgggacgcccgtggtggtgaagcagttcttgaaggataatctcggcatccagcatgacttactcggctatgttgtgctcgtccatttcgcctacgtcattgtgttcttcttcgtattcggttattccatcaagttcttcaacttccagaaacgttagcgggatcatttgtatgtaattaatcggtcgccgtaagttctagttctagttctagttctagtcaaagcaagtgcttgttttgggaggaagcctgtatgcaagtagcagtgtattcctcttgtttcttcaatgcaaaaatattaaaaggaagatgacgaatgcaaaagtgacatgtcttgttccttttcttcttga

SEQ ID NO: 37156 - DNA, 4126 bp, Zea Mays
cggttcaggcgaaacgggggctcacacgtcggatccgacggcgaatcgcagccagccaggcacggatgccccccgcttccgggtgcggtcacggacaccgacggcgggcccacccgacatcccctccggcctcctccccgtccctgtcctccggtcctccccttccctccttcacctcgcagtctcgcacacgctggcgcgggcaggcccccaccctgcgctcctaccacccaccagtccaccactataaaatccccgatcgcctcacgcacacgcaccgacccaccgtccgccgaggcgcaaccgccgcaacgcaaacccacaaaccctccgccgccgccgccgccgccgtaccacgtaccgtcccgcttctcctccgcccttgtgcgagcaggcaacggcagcagagcccgcacaggttgctcccggacggagggagaacgcgcggggctgggctagccgggggcggccggaggaggtacgtatggacaagtacgaggcggtgcgggacatcgggtcggggaacttcggggtggcgcgcctgatgcgcaacagcgagacccgggagctcgtcgcagtcaagtgcatcgagcgcggctaccggattgacgagaatgtgtacagggagatcatcaaccaccgctccctgcgccatcctaacattattcgcttcaaggaggtgatacttacaccaacacatcttatgattgtgatggagttcgcagcaggtggagagcttttcgatcagatctgtgatcgtgggcggtttagtgaggatgaggcccggtatttctttcagcagttgatctgtggcgtgagctactgccattacatgcaaatatgccatagagatctgaagctggagaatgttctcttggatggcagtccagctccacggcttaagatatgcgattttggctattccaagtcatcagtgttgcattcaagacccaaatcagctgtgggaacaccagcatatattgcacccgaggtgctatcccgtcacgaatacgatggaaagcttgcagacgtatggtcctgtggggtgactctttacgtcatgcttgtgggagcatacccatttgaagacccagatgaccccaagaatatacgcaagaccattcagtcactcttcgcctgcagcaaataatgcaagtgcagtacaagataccagattatgtccacatatctacggaatgccagcaacttattgcccgtatctttgttgccaatccagtgaggagaatcacaatgaaggaaataaagagccatccatggtttttgaagaacctaccacgggaactcacggagactgcacaaggcatgtactacaggagggataacaaggtgccttcttattcagaccaaacgtcggaagaaatcatgaagatagttcgtgatgcaaggaccatgccgaaatcatccagatcaggctatgggtggagcgctgagtattcggatgaagaagagaaggaagaggaacacagactagaggaagatgaatacgataggagggtgaaggaggtccatgcaagcggagaactccgatccagtgggatgtatgcagttttggcttctgaattgcttgtgctcggtcaattttcatgtaacataattcaatacactgaggcagactaccatgtccttgtgttgacgtccaccacggagcgccgcacggccgtagccctagccgccaggcaccagcggccagccagaggcccggacgactggactgccaaagccgtcgtcgccacagggaagcgccggtacgccgctcggcccttctacaggatttggtagcaccatggtccatgtatgtaaatcacatcactgagatggaggatggtttaaatgatgatggaatggaatatccatttgagggtgatgctaataccagtaacaatgatcagatagtagaggaccatgctgatgatgcccctattgctagtggtgataatgccatcgtccaacagcaagttggtctgagaaagaagaaatacatgtatgtgaattaccatcgtgttgagcaacctgatggttccagtgttaagcaaaagtgggcaaaatgtcttcgatgttcacataaagctaagtctgatgcttcaaatggtacaaaggcttttagtaaccacttaaaattgaaacattgtcttgtgaagggtcaacaacagctaattcagagtggaaatgacatagcaacatataaatatgatgagaaagctagtgtgagacttctatattatgccatcattatgcatgaatatccattcactgttgccgaacacaagtattttgtgaaatttatcaaatcactacggccatcatttcctttcaagtctcgtatcactgttcgtaaagagatcatgcaactttataaagaggaaaagaatatgttgtatgcacagttcaaaaagctgacatgtcgtgttagttttactatggatgcatggacatctatacaaaacaaatcgtacttatgtgtcacagcacattggattgatgataattggaacatgcaaaaaaggattatcaattttatgcatgtagaagacagccatggtgggataaaattgagtgatattttttttgtaaatgtgctcaattggaaccttgataagaaaatgtttgctctttctttggataatgctgcggcaaacaaggttgcagttgatatagtgatagataatgctaaagacttgctcatatgtggtggaaagttctttcatgttagatgtgcaaatcatatattgaaccttgttgctaaagatggcttagcagtaatgggaaatgctattgcaaacattagaatgttcataacagctatcaagaggtcacctttgcaatttgaggcatttcaaaaatgtgctaaagaatgtgatctagacactaagaaagtcctttccttagatgttgctacaagatggaattctacatatattatggttagagatgctatttactataaggatgcttttgatcgtcttgctaaaaaagataaggatagatttggtcatatggctccttcaagtgatgattggttgaatgcaataaatatcaacaagtgtttgaaaaagttctatgatgtcacattacttttttctggcacttcatatcccactgcaaatcatttctttcgcaagttttctgagattaagatggctattgcaagatggtgtgagagcagtgatgtcataatttgtacaatggcattctctatgaaagagaagttcaataaatattgggacatgaacaatatggctttagcagtgggggcatttcttgatcctaggtacaaacacaaaatggtggagttgtacatgtctaagatgtatgatagtgagagggctgagctagagaagttgtctttcattaatgtcatcaatgagttatttgctttgtattcatcaaacatcaatgcaaaaacaaccaatatggcttctacctccaaggagagtgaacttgttccacacaaaaatggttctttcatggatgatgaggatgaggatgaggttgatcttgatgagttgtatgcagcagcaaacaatgtgaagaaggtttcagaattggatgtgtatatgagtgagggtttggtgaaggtcaatgaaggtgatgctccatttgatatcctatcttggtggagggggcaagtgacaaatcttcctatcctttcgacccttgctcgtgatgtgttatctatgcaagtttctactgttgcttcggagtcagcatttagctctagtggacgtattgttgatgcctttcgttcaaaacttaaacctgaaattattgaggccttggtttgtaccaaggattggaagattgcttcagagaaagatttagaaactgaaattagaaccataagtgaagatatgaatgcaatggacttggacgaagatgctattgcggcgacttgatacattgaaattagactcttcgctatgttgtttgcgcttttgtaataaactatgtagcatgttgtgtatctcttttaatgttgcggtgaacttgtgtgaaatatctactatctattatatatttgtggacttgtgaacttgtggattatacataaaagaggggatatgctgctgatttatttttaaaactgtgttgtttcttctataatgaa

SEQ ID NO: 37157 - DNA, 902 bp, Zea Mays
gtgcgcgtaaatataaccccgcaacaagtgggacgccgcttctgctcctccgtcgtccgctcctctcctctcccccacccgtcgtctccttgtcgtccttgcctgcggattggggcggcacggcagtcggcacagcctctcgcttctcccgcgcgcgagccctttctccacggccgcggcatgacgttgccggaggcgaatgccggtgcgacgccgcagaggaagaaggaatattaagtacctcgcgacgggacgggtggtcgaggagtcgtcctggtaaacgcgggtattggattcggctgacttgaactcgccagagatggagttcttcagcgagtacggcgatgccaacagatacaagatccaggagatcattggcaaagggagctatggggtcgtctgttcggctattgaccaacatacgggcgagaaggtagccatcaagaagatacagaacatcttcgagcacctgtcggacgctgccaggatcctccgcgagatcaagcttctccggctgctgaggcaccccgatatcgtcgagatcaaacatgttatgctgcccccgtcgaggagggactatagagatatttatgttgtgtttgagctgatggataccgaccttcaccaagttattaaggctaacgatgacttgacgaaggaacaccatcagttctttctctatcagatgctgcgtgcattgaaatatattcatactgctaatgtttatcatcgtgatttaaagccaaaaaatatattagcaaatgctaactgcaaactcaagatatgtgattttgggctagcaagggttgcatttaatgactctcataccacagttttctggacggtatgttatttttacagtgctactatggtcgatccacatcataacattttatcaaagc

SEQ ID NO: 37158 - DNA, 2106 bp, Zea Mays
ccgctcggcgcttgcggcccattgcagaactgactgcactgcacacgcaggagcctggtcttacaggtggaagtgatgatacatatgtaaggcatatgcttatgagagctagaagcaagggatggcgtgttgtggtgtttaatagccgtggatgtgcagatagtcctgtgactacacccaagttctattctgcttcatttacaggggatctccgccaagttattggtcatattttaggacgttatcctcagtccaatgtctatgctaccggttggtctcttggagcgaatattcttgtgcgctaccttggcgaggaaactgataaatgccctttatctggcgcggtctccttgtgcaatccttttaatttggtaattgcagatgaagatttccacaaaggatttaacaacgtttatgataaagcattggctagggctttgacgactatatttaagaagcatgctctccttttcgaagggctggagggtgaatatgatatacccaaggcagcgaatgcaagaactgttagagattttgatgaggggttaacccgaggtttgcagcaacgtctaacccaactgtactagctgtaatttctatagtttcctgttcacattcaagaggacacttcaatggtttgcagtttcatttggtttcaagtcagtggatgattattactccaattcaagcagctcggattctatcaaggatgtttgcatacccttactgtgcatacaggtcaaacttcactctatctgttctgtgcttcattagacgccaggacattaggaacaacagatacagtttaagagcctgatgtgtaccaccacttcttagttttggatcacgcgttactcagtactatgactgagctttaacccaaagctgttaaactacttaaattaagaatatggaagttcagttaatctgtggccttttggttctatcattggaataaaacctggagaaacatttcaacaccagcttaggtcttgcatatttagaaccctgacttgagaaagctggatcattttgcggtaaagttgtttgtaaaactctagaaagcagtatgcgtggtaattttagccaaaaaagagatttgtcagattcaattattagtgtgcctatgtgcatatattgtgaaggtcaaagcatgtcttttctgttataacttcaatcataatttagtatgtgcaggctgataatgacccaattgcaccatccaggggaattcctagagatgatatcaaggcaaataagaactgtctacttatagtaacaccacagggtggccatcttggatgggtagcaggcgacgaagctccattcggatgtccttggacagacccaatagtgatggaatatctagaacatctcgagaatgagaaggactctagtaccaaaaataacacatcctatgagggtgtttcagaggcatcagtatcccatctaactgtgcatggccaaagataataatatctctcttctcatagtactcattcgccacattatgttttatatggaaatagtttagtagagttcatttagccgtgttgtctgctgctgcctgctggttaattgagtacatggctcttcgtctacaggtctagtggtctacacatgtgcgagaagatttctgtgtcaaataagatgtctggttctgagatcaaaatagaacatgcgttatccaattgttcgttcttagggggtttcactttcatcccgtgtttgaaagggattctctgtaaatgcatgagctgttacggagttggcctttgtatccctcttctgcaacgcgtgaaagttgatggcgatgagcacggcagtgcatcatgtaaatttgacaatgtcattcagcgcaaaaaaaaaaaaaccccccgaaaaatgtgttggaagagtttttgtgtgcgcatgctaacaaatatctcatgtggtaaacatcatcttggattaacatatggcaatgtgatgaaatagtaacagttgttgaaattttatatgatcctactattccttttacagatggtaccagatatagatgatttcattgaaccctttgcgccagaaaaattaatatatcttactactactgtgtctagattttcc

SEQ ID NO: 37159 - DNA, 1595 bp, Zea Mays
actggctacttccttctccccttcaaatttgcgtagcgttgaatccacgccctcccggaacccccgaatctaccgacgctccctctcagtctctcacaacgctcaatccaaacgcgagccgcgagcctaaccctagcaaccgtgagtgatggcgcgcccaagggctaagaagcgtacgacgccccaggcggccgccactgattcggtcgagccggatgccaccgtcggtgcttcgagcaagctggaggaggcggcggcggagccggcaactcgggagcgggggaagcgcgtcaaggcgccgcccaagcccaagcccgagacggaatacttcgacgagaaaggaaatttcgaggatctatggttatctgctttccccgttggtaccgagtgggaaaacatcgataagataaaggagttcaactggagctttgaaaatgtagaggaagccttagaagaaggaggagagcttcatgggaagaccctttatatgtttggaagcaccgagcgtagactgtcctttcccaccttcagacaaaattggcataaattccgtccaaagggaaaatgaggaaatagtgccaatgaaggcgatgaagatggcatgggtgccttatgttccccttgaggaccggctgagcaggattgacattttcaaaacaaaaatattcacgctcggatgcacacagcgaaggtctgcactgaagcatctcaaaattgagagagtcaagaagtttgactactgcatgccttatagtagatgagttcgactgggaaatggatgattacgaggattttgcagatcagaaagtccaagaaggtagcctgcccgagggcgagaaagaaaaattcaaggagttcctgaaggagaaggttagagaaaggaagagagagctgagacaggctaaagaagccaggaagaaagctattgatgatatggatcctgcgatgaaagaggcattcgagaatatcaaattttacaaattttatcctgtgaaaaccccagacacgcctgatgtaaacaatgtaaaggctaggtacatcaacagatactacaggaatgcccattatctgaagtaaaggctctcctgatctcacgtgcttgaggacgagcttgtcatttgagttggtgtaaaaaaattttgaaacccgggggagaaaagtttggtgacatctttggatggtcttactgttgtactgtactgtactagaattgccctcagactttcgctgtccggtgcatacagtcagaaaggttcaaggtagttttgagactaaccaaatcatgatggaacaatttgttcctttgtcatcatggttactgcacaccctgatggttatgctgtgactttttttaacatctgctatgagcaagctatgaattatgctgtaatctgtctggtgaagcgaccaggtacagtagggttcagactggttaacaatgggataacctggcttctaggcctgtttgtttttttccaattaataatcggtcttttgatctaatttaaattggtttctactccctttgccctacaatgaatgttgtttgacttttttggcataagttcgactgactcgtcttattcaaaatattt

SEQ ID NO: 37160 - DNA, 284 bp, Zea Mays
tcatctgcagacgttctcaccacttgattggagcctaaaccataagtacacataaccagtggctcatcttcatagtcatagatggcaatgccaaggactagcccgacaaatatttgcaaacccacatcaactccagaagtcaacaagggcaatttaacgtgaacgagaacctgccaggcatgccaaaccagttcttgctcggtgcaggcagacattttcgcaagctgccggtcgcgcacggattgacagcacgggggagttgcggtaactaacatttgccgacc

SEQ ID NO: 37161 - DNA, 5900 bp, Zea Mays
ctaccactgtagccgttttaggggctacagtccgcccctatccccttcaccggcttcctcctcctcctcctcttccctctcgattccttctctctcccgctaaatggatgggcacgctactgcgccagatttctccccagccggttccttcggccacgcgaccgcgcgctcggaaaactccacggacagcgaaggaggtgaaccaaggacgacgtatctgtcgccggagaaggtcgcaaatatgctttcaagaaagttcaaacactggacccatcatcaactcaacgaggtgttcgacagttcaaaacttacatgtcaattaagctggaccaggatgacacacaagttctaggcaatgatgcaaatgagattcaacagttttataagaagtactgtgctagtatgagtcatatttcaaaaaagagaaactttgaggagatggctagatattaccaagtggtgtatgctctttatgaagtgctacaggatgtaacaaataaaaacattgatgatcaggtgttgcggtgtgcagacatggttgaggaaaatggtcgtcatttcaagaactacaagtacaacattattcccctcaattttcctggttcttccgaggaaattatggaacttccggagataagaggtgccattgatgcaataagtgacatagatggccttccaatgccagacatgtcttctatccaaaggcatgaggataaatctatccaagatctaattgaatatctttcactagcatttggatttcagaaatcaaatgtagaaaatcaaagagaaaatatggttttgcttctcgcaaatattagtacaagaactgctgcccaggaagggcatcctttggttgatacagtgaatgaattgtggaaaaaaatatttggaaattataagtcatggtgttgctatttgcatattacttcaagtatcataatcagtcatgatattacagaacataagaagcaacagctgaagcttcttcacattggcttgtatcttcttatctggggtgaggcttctaatgttcggtttatgcctgaatgcttgtgctacatattccaccatatggcaaaacagttgcatgacatggttgatgaaaacaattttcaaccaccacaagcacctgtggaagagggatcatttctgaaaaatgtcattgaacctatctttaaggttctgcaaaaagaagcacaaaaaagtagagggggtacagcaggccactcggcttggagaaattatgatgacctgaatgaactattttggtcagagaaatgttttactgagcttaactggccgccggatctttcttccaacttcttttataaagggtgcggcatggcaagaaagcccaagaccaattttgttgaagtacgcacatttctgcacatatttagaagttttaatcgaatgtggatgttttttatacttgctttccaggcaatgctcatagtttcatggagttcttctggatctctttctggaattaccgatggaactgttttaaaaaatgtattaagtgtttttatcacagcagctctactcaactttataacagtaactctggatataatgtttactgtacaagcatggggtagtatggagtggacaaagttagtcagatatttactaaaatttgttgtcgccattgcttggataattattcttccattgacctattctagttccatcaaatacccatccggtgctggcaaaatcctaaatagttggattggggattggtataatcaatcagtttataacattgcgatcgtcatatatatggttccggatattcttgctgccttgtttttcttgttgccacaacttcagaatgtcatggagcgctcagattcacgagtgttggttctcctgatgtggtggattcagcctagattgtatgttggacgtgggatgcacggagatattttgtcaatccttaagtatgtcttcttttgggctgttctgctcatctccaagcttgcattcagtttctatgttgagatatcaccattgattgatccaacaaagttcattcttgaccaacaagttgggaactatgaatggcatcaaatcttccctttcttgccacgcaaccttggtgttgtcattaccatatgggcaccgattgtcatggtttacttcatggacacacaaatatggtatgccattttctccactgtctttggaggtgtttcaggtgccctaagtcatgtgggtgaaatacgaacccttggcatgttgagggccagattcaaatcaattccagaagctttcagtcaatgcaatgcgataaaacagcgagagcaagcatttgagcacagaagcttctttcgtgtttggaattcattcatcaattccttaagagaggaagacttcattagtgatagagagaaggacatgttgatggctccgtcatattcaagcaatttatccatcattcagtggccacctttcctccttgctagcaaggtacccgcagctgttcatatggccatgaattccaaagaaggggatgagcatgagcttattgagaaaatcaaacttgatggagacagatatgatgcagttatagaatgctacaaatccttgatgattatactcaatagccttctgctagacactaatgatcagaatattgtcaatgatattgataaaaaagtgacttatagcatgataaaaaaaactttcttggaagacttcgaaatggcagaaatcggcaaagtaagttctacattggctagattgttgcagctcctgaaaagtgaacctattaatgatgttggagagaggaaaattgttaatgccctgcaagactttatggaaattacgacacgtgatttcatgaaagatggacagagtttcaaagatgaggatgagagaaatcaaagattcatgaacctaaatatgaatatgataaaggaagattattggagggagaagtttgtccggctgcacttattgttgactatgaaggattctgcaatggatgttccaataaacttggatgctcgccgtaggatcaccttctttgcaaactcgctttttatgaaaatgccaagagcaccacgcgtgcatgatatgatttcatttagtgttctgacaccatactacaacgaagaagtactgtattcatcacatgacctgaatagaaaaaatgaagatggtatctcaattttgttctacctacaaaagatctatccagatgaatggaataacttcctagaacgtattggagttgaatcaaataatgaagtgtcgataaaagggcgcatggatgacatccgtttatgggcatcttaccgtggtcaaacacttgccagaactgtgagaggaatgatgtactatagacgagctcttgaactacaatgctatgaagatatgataaatgaccaaggttatggcctagctgatttggatacagctaaagctgcaaggtccaaggccattgctgatattaaattcacttatgttgtctcctgtcaactttatggcgtgcataagacatccaaggattcccgagaaagaggtctctacgagaatatcttaaacctcatgttgacgtatccagcattgcgcattgcttacatcgatgagaaagaagtacaattacgaaatggtaaaatagagaaacagtattactctgttcttgtgaaaggtgatgatgaggaaatctaccggataaggctccctggtaaaccaacagaagttggagaaggcaagcctaataatcaaaatcatgccataatcttcactagaggagaagcacttcaagcaattgacatgaaccaggataactatctagaggaagcatttaaaatgagaaatctcttggaagagttccttcttacacatggaaagtcagagcccaccatattgggtgttcgggagcatatatttacaggaagtgtttcatccctcgcctggtttatgtccagccaggagaccagcttcgtcactattggacaacgtgttcttgccaaccctcttaaggtacgatttcattatggccatcctgatgtttttgatagactctttcatctgacaaggggtggcataagcaaggcatcaaagattatcaaccttagcgaagatatatttgcaggtttcaattcaactctgcgtcgaggaaatgttacacatcatgaatacatacagttgggcaaaggacgtgatgttggaatgaaccaaatatccaactttgaggccaaggtggcaaatggaaatggtgaacaaacactatgccgtgatatttatcgactaggacacagatttgatttctacaggatgctatctctgtattttaccacagttggcttctacttcaatagcatggtggctgttctcacagtgtatgtatttttatatgggaggttataccttgttttgagtggcttagaaaagtcaatactgcaagatccaaatatccaaaacataaaaccatttgaaaatgcacttgccactcaatctgtattccaacttgggatgttgctcgttctcccaatgatgatggagattggccttgagaaaggatttggcagagcattggcagagtttgtaatcatgcaacttcagttagcttctgtattcttcacttttcatcttggaacaaagactcactactatggcaggacgatacttcatggtggagcaaagtatagagctactgggagagggtttgttgtgcgtcatgcaaagttcgctgagaattatcggatgtactcccggagtcactttgtcaaagcactggagctgcttattcttttggttgtctacctagcttatgggagttcatacagaagctcaagtttgtatttgtatgtcacagtttcgatatggttccttgttttctgttggctgtttgcaccttttgtcttcaacccatcctgctttgagtggcacaagactgttgatgactggaatgactggtggaagtggatgggcaatagaggtggtattggattagcgcctgaacaaagttgggaggcttggtgggtatatgcactgtcatggctggttatagcagttgctcttgtgtcactaaaggttgtttcaatggggagagagaagtttgttacaaggattcaactagtgttccgcatcctcaagggcattgtgttccttgtgctcattggtttgcttgtccttttatttgttggttttgaccttgctgtctcggatgttggcgccagtatcttggcattcattcccactggctggtttattcttctggttgcgcaattatgtggaccgctgtttcggaggttgatcatagagccacttcacttgctgtgttgcccatatggtaccggtggtgcatgcagaggtccctgctgtgccaggttcagacagaggaccggtgctgcgcttcggaagatgggaccatgggactccatccaggagatggcgaggatgtacgaatacaccatggggctcctcattttcctgcccattgccgtgctatcgtggttccccttcgtctctgaattccagacacggctgctcttcaaccaggccttcagcagggggctgcagatctctaggatcctcgcggggcagaatggtagcggcacaaagagcgactgatgctttgacattaacggagttatccattccgttgtgccatgtggtatctcgttgctattgtccgctaccgttatgtgtagaatcaagtatgttcatcgtttgaaaaagtgtcgcgcagtttgagtgtgtatgtcggattttaacctcttaattcagttcatattcattggttgtttccatttgatttgcacgtatacgttggaatctgtctgattttcggtgttaaaagtaagtgtttgtttttagctagaactttctctactcctttaaagcaccaattttatatgtcatgctttgcgtacgaagca

SEQ ID NO: 37162 - DNA, 1518 bp, Zea Mays
ttaaaaaaaatggtttatgaagcccttgcagcatgggaagctaaccatctgcatccaaaaggttggcaaggagccacttctgtttcagagattcgatctatggtgcaaaatgcttttcccgagaccagttgtcattgtttaaaaaacaggggtgtaatccagttagcactagctgctgaaaatgactctacgggagcctcaaagttctcgctgggacgcctttacaagtgccgagagaatattaagtgtgacatctgcagagacacctcaaagtcttgccagtgagcttcgtgatttcatcaacactagcactttagttgaatcacacacacaaactacttcaatggagtcttcacagggcctacttagtttccaggacgtactgcttctaacgattatagggtatatcttagctggtgaaaatttccctacatctatggctggtggtccattttcttgggaagatgagcggtctcttaaagatgttatagtggactctatccttgaacgaccatcatctgtgaagttgcgcttccttgatggcctggatagtgaacttgaagctaaagctagatctaaagatggcgagaggaataaaaactctagcgaggtagcacccagtactgatgatgattttgatgatgaatggggtacctgggatgacagtgataatactgatcaccaaaaggaggaagcttatggggacatgcaacttaagttggaagtgcgagatagagttgatcagcttttcaaattctttcacaaattatccagtatgaggttaagaaatcaagcccttggtgaaggtatagcagcattaagtagattcgagactgacggttactcgaggaaatgcttgctttataagttactattagctctcttgtcgaggtacgatgtacctggcctcgagtatcattcatcaactgttggtcgtctattcaaaagtggactaggtagattcgggcttggacagtctaaaccagccttcggtgatcaatctgttcttatcatttttgttcttggaggtccgggaagtcatgacagcgatatcggagagcagcagaccagatgtggagcttattctgggtgggacaacccttcttaccccagacgacatgtttgagttgatgttgggatcgtcaagctttgcttaggctcaaccttcactcttgagtcatgtgcgggacttggaaagaaatcggagcatatttttttcttattctccagaatagttacttgtctgatgtagcagaagcattcagactcggaagaggatactaccagaagaaagcagtccattcagagtcaaaatagtttgcaagatgaacctacgagtattgctggaaggtgtaagaaacagtgtgtctagttatcagtggctgactcttgttgtaaaacatgtagcagagatatatcaagcaaaagatgcgtaagaactcaagtaatttgttttgtcactaacatgagcagatgccgtttggctccatgatgaattgtttgtcggcagtaactaac

SEQ ID NO: 37163 - DNA, 2276 bp, Zea Mays
agtcatattcttacttcatttaaggacaaatttgcgatatgtgggaaggatattatgctgacgctcattgctagacgctccaggcattatgctggcaccaggtatctaaagaggggtgtgaatgaggagggcagagtagcaaatgatgttgagactgagcaaattgtttatgaaaacatgcttggaccatggcaaataagctctgttgtgcagaacaggggttcaattccactattctggtcccaggagacatcaaagctgaatcttaagcctgatatcatatgtaagcatttaagttcttgttcaatgcgtaaaatattattcaaacatttgtttttccttgcagtgcatgaaaaggacaaaaattatgaggctaccaggcttcattttgaaaatcttaggaagagatatggaaatcctatcatcatcttaaacttgattaagacacttgagaagagaccacgtgaaatcatactccgttgggaatttgacagagcaataaagattattaatagtggtctaccaggtgaagatcatttaagatttttacattgggatcttcataagaactctcaaagcaaaagtacaaatgcccttcaagtgcttttgaaagtggcatttgaagctttgaacatgacagaattcttttattgtcaagtttccccagatcaaagggcaaagggctcccctaatttaagccctacattgaaaattggttttggtcatcatgcgtgtgatgacaaaaattgtggcaatgcagattatgttgatgatcttgatgacatttcccaagaagatacctgtggtagttctgatcctggcaatggaattgcggaagataaatttgaggtcaatggatctgctcaaataaagcgtccaaaatttcaaaagggtgtcttacgtacaaactgtatagattgtttggatcgcacaaatgttgctcaatatgcctatggcctagctgctttaggacaccagttacatgcacttggttctgtagaatctccagaagttcatctagactctcctttgtctcgacatttgatgcatttttatgaacgcatgggtgacacacttgctttacagtatggtggttcggctgctcacaataagatattctctgcgaaaagagggcacttgaagtttgccattcaatctcaagagttctttaggacactgcaacggtactacagtaatgcatatatggatgcttacaaacaagctgcgataaacttatttttaggatacttccagccacaggtgggaaaacctgcactttgggagccagaatctggtgatgagcatgtacttgatgacgagacatgtaaattgatgaagagggcaagatcagatggcagcattcttaataaaagcaaactatcaatatccagtaatggcccaaatggaattttaaagttagcatttactggttcaaaaaatgaagggcagcgtccaaaccggagttctgatacagcctgtgacaatggcatgtcaaagtcaaggtcaaaagccataagcactcctgatgtgaatatttcaactgatagtggtgttcgtgatgtaatatctgggacaacggacgatcaagcttctgggatccacgcccaggggttttcaaaggatttcgtgcagtggctcaatcaaggagaggcgttttggtactgacatcgcaaggtgggcttaccatgtaaaaccaagccacacgatggttgcacttgcaacccaaacctggttccaaaagcatcataactctcaaagaccattgcaagcaaggagggcaccatcgacgtgcacgagatttgcttgtcaaccatcagcattctcctcgcggccaaatatgatgacggggcttagagtcgcacacactgttagcagacttgtctagggaagtgtaccattctgttcattgattggagcttgctcaccaggcgggtagatagcgcatcgctgttgttcttctttaaaaaaaaaggaaagaaagaaggtggtaggtagtagtatattcttttgaagatgtaccattgtccagacatcatcgtctccatctccattgtgtaaatatatatgtatgtcccaggtgctcccacctttcgcttcgccgttgtgagagttgaggtgggcaaaaaagcatcattttcccccctcggttgggggtctttcccttctggaatcgtgtacatgtgtcttctgtggcaggcaacaggaggcgagattgttgtgtacttcccatcgtactaaacccctctgttaccgatactgcccccttggaccgttcg

SEQ ID NO: 37164 - DNA, 7716 bp, Zea Mays
cagcattaagctccatttgtgtctttcaaaatgaggcagactttgctggttgttccattacagtctacaacaacaacaaccaagtcattctcgtgaccaaaaattgcttcacctgctcccgtatgcatgatactcgggagattttccgggcagaagaggaaatcctgacaagtagtgcgttccttgctcacaggccctcgttgtgtcatgtaactgcaaatggctcgccaaactagcgttacagaagctgacctggagttcatgctaattgatgaaaatgcaaagccgaagcccctgccttattcacttctcgaaaagatcacaaatggtttctccggggcacatattattgggtatggtggatctgcagatgtttatgagggattcatcgggaatcacaaaatcgctgtgaagaggttgcgcataccatatcagcacgagaaggaattcagtcaagagattgaatgcctgatgaaggtgaagcacataaatgtcgttaggtttataggatattgttccgacacgcaagggcaggcggaaaagtatgaagataatcatgtcatggcagacagccaagaacggttaatttgttttgaatttctaccagcatgtcttgataaatacatcaaagatccatcatgttcacttgaatggagacagcgctatcaaataatcaacggagtttgtcagggcttacatcaacttcatgagcatgaaattcttcacttggatctgaatccgagaaatatacttctagacgatgacatggtcccaaagatttctgattttggcatctccaagtgcttgaaaaaaaaccaaggccacttttatactgaaactataagtggaacaccgatatatatgtcaccggaacggggcaaacatggtccaatcacaacgaagtctgatttgtttagtcttggtgtcacagttatcgagataatgacagggaacaaggagaacattgatcaagccactgttgaagatgtatttgctagctgcatcaaaattttcaatgataaatcattgacagctgcacaagtgcggcagataatggtatgtgctgagatagggattaagtgccgcaacagtgaaccagacaagagaccatcaaatacaaaggaaataatcgataagcttgaagaggaagcaaggacagaggaatctcaagagtctggcaagctacttaaggtcctaccaaccctactcctgtttgatttgcatcccgggaaattgatcccatgctcactgcagctaacaaacgacacggatgaacacatggcatataagcttagtataacagagagtgtggactggtcaaagtacttcacgaccaagctgccgctatatggcattgtgcaggcgcgatccacttacactgtcattctgacagtgttgttggagtgtgatgctccggtcattaacagatcttgttatatgaccctgcagagctgtacactggcatatgagtacatctggaagttcaataacacacttgagtttgaggattttcttgaggttaagaaaacagagaatgcggtgaaggaagtgaaactgaaagcatttttgtgtgaggaaggacgatcaatttctaagcaaacgaggccgcgcgtcaagctcttgtccatagtgaaaccacaaacacctctgttgtcattggatgcacacccgaccaagccctgggtcataactggtcatgcctttggacatgttcgcatttggaaccatgagacacagaagctactgtattcgtttaaactatctctgggaccagtttattctgtcaaatttattgcacggaagcaatggttcgtctccagctctgcagaaggcctcatacatgtctacagtatggaaacaaaaatgcagaaggtcaagagttacagagctcatgacggcgtcagcatatcgctggccgtgcatccaaccctaccatatgtgctgtcatggccttgttcgggcccccacgagaagaagctatggaactgggaaaagggatgggactgcacacaaacatttgagagggagtacgttgcaaggaattttgtatgtcaagttgcttttgacccaaaggagaccaacagatttgctagcgcttcgaactatagggttaaggtttggagcgttgatcttcccaaatgtaactataatctgcctggtttttttaacgaagtgaacttcctggaattcttcacacgtgatgatcaacagtatttgattattactgtctctcatgataagactgcaaaaatatgggacatgcggaacaagaaatatgtttatgatagtatggaacaaaatttgatgtctcccgtgtcttctgtcttctcacatcccaatctgccgatactacttacacgttcaattgatggcacttctcatttctggagtcccaaagatttcaggtttgaggcagtccttgactgtcgttatggaggacatgtatggggcattgcatgtttgatgggatcaaaaagaaggtttgtaattggacaagaaactgcattaacaatcctggatgttggtgaccaagaatgccaggacatgagacaagaaggcacaagttctgaggtgataaccccagggtcaagcgagcttttgcttgacgtccacccgctgacactccactttcccttccatgcccacaagttgatcccgtgcacgctgcacctaacaaataaaacagatgaacatgtggcttttaatcttagtatagaagacggaatggagtcttggcagcagatctttgtaaggatgcccctaagtggaattgtgccaccaaaatccacttacactcttgttgtcacaatgagggagctgacgtatctaccaacacaaaactttaatttgaccctgcagtctaatatatgcgaagataggtacatctattcatttatgagcctatcagaatctgatcagttttttgaggatttaaaggagataaggaatgtggcgccgcctcaggtgaaactgaaagcagttttttctctgcaaggacagacaacgtttgagaacggatcgtcaactggagaaaacttagtccaacctttaattaacatatggactttgttcaaccctgccaaggatttttctagtatgctgatctctctagatgctgatccaacagagtcatgggttataacaggtcaccgccacggtgatgttgctttatggaagcacggcatgcagaaaatgatgtctttgattaacatatcgggagaagcaagccttcctcggaatagcttgaacacccaacatgatgtttattccgttaaattcattgcaaggaagcggtggtttgtagccgggacatgtgatggtttcatccatgtgtataagtatgaaacaagaataatggactgcataaagagattcagagcatactcatctgggatcatagactggggtatttgctcgtccagagcgcttatcgttcatccaacccagccatatttgctctctacctgtgaagaaatgaagctttgggactgggacgatgattggaagtgcatacaaaaatttggtagggaacacactgattccatacttcaagtggcatttagcccaaatgacagttttgccagtgtttcaagtgatcacacaataaagctttggtgcctgaaatctcccacatcagagtgtactctgcacggccattcggacaaagtgaattgcttggatttcgtcacacatgatggtcagcaatatttgattagtggatctcaagactgtactgccaaggcatgggccttgaaggaaaaggaatgcgtccagacaatggatgttttcatgtcgccagttgtttctgtcatttcccttccggacactccatatataactacaggttcagcagatggcactattcatttgtggagttctgctaatttcaggcttgagagaatacttagccttggtttatgtggccctgtttgggatctacgtttgattgggccaacgaggatcgtgattcaaccgaacaactatgaaatatcagtcatcatggatattgacacaggttctgaggctagctcgtcagctccctcaaatgagctgatccaggttgaccccaaagagttgcgcttcccggttgcccaagaggtgtcaagcacactagagatccgtaacgttacagatcaccatgtggcattctgtatgtggtcattgaaccatacagcaaattacattccagtgccgaacatagaagttctatcaccacagtcaatgcggcaagttgttataacaagaattgcacgacgagagcctgtgccagcagaccccgtcgacgacatagtctatgtgaagggcactaccgtggttcagggtacaacgagcgcagatgtcacttatgacatgttcgatggaacaaggacaggccaaattctgcaaccggccatggagctgaatgttgttctcgtagctgactccgagatcatacacaaagcaaggttaccatgggccttagatgtgcatccaacaatgccatggataatgatggctcaaggagattaccaaattcgtatatggaactataagacacgggtgaaagtatgcatttgtattcgaggactaatcaattaatgtgtgctcatatcctgcagatagagaaacctattgctatcaaggggagagaagttacttcggctaaatttataatgcacaagcaatggattctggcgggctgttctagtggacttgtctatgtgtaccgttatgaaccagaaaagaaaaaatcagtagagaaaatccgagttctacaaggacactcaaatgctatcaattccttggctgttcattcaactaagccatgcgtgctgtcagcatccaaagatggcaaaattttgatctgggactatgaaaatgagtgggagttaatgaaaacatttgatgtcaaaagtcctgtgcagcatgttgcgtttagcccaaaggactccaatatgttcgccagtgcccaggacaaaacagtaaagatatgggattggcattctggtaactgcaagtctacattgtctgggcattcagatttggtgttatgtctggattacttcagtcagggtgatcagctatacttgatcactggttcacgagacaaaactgccaagatatgggattgcaagacgaggagttgtgttcggacattggaagggcatacagatgttgttaatgttgcatgttgccatccagatcttctaatactaattacaggttcattgaacgggtcagttcgtctgtgggatttgaatcgctcaactacgttccgatatgagctcatatttgaccttggagaagtatatgctatagcaagtttgaagggtacaaggattgtgattggacacgaaataggattagcactggtagacatagacctagagggcaagaaggatggatatgtgaagagcaatgtcgcaattatggattcaaaaaatgacacagatcaaaatatgaaagagttaagcccaacagcttcctcaagtgaggtgcaaaaggtgtcaagcattatagcattggagactctatacaaaatgaagtcatcagaatcgtctatagatgtccatccaacagagacatggatggtcattacatccgacaaatatgttcatatatgggactaccatacaaggtcagattggctaaatttatagcccgcaagcaatgggttattgcgggtgctactagtggattcatcttcgtctatgattatgactcaaaaaaggaaataatacacgttttgtgtaaccacacagaacccatcaagtctttggctattcacggaactgagccccttgtgctgtcagcatccgtggatggcaaaattttgctgtgggactatgcaaatgactggcatttgattaaaacatttgatgcgagaagtcaacgtttggtgcaagtcgcgtttaatccaaaggacaccaatatgtttgctagtgctcagggcaaaacagtaaagatttgggatcgccagcatgatgaatgccaatacaaattagatgggcattcacatcagatcgagtgttttgattactttagtggtggtgattttgataagctatatatagtcaccggctctcaagataaaactgccaagatctgggactgcgagaatgcgggctgtgtccagacactggaaggacatgcaggtcccgttagagctgtctgttaccatcagaatctctcgttattaattacagggtgctctgacggatcaattcatctatggaactccactaccttcaggcttgagcataaactgaactttgctgacttcggattactgagttctgtagcttgtttgaaaggatcgaaaaggattgcaatcagaagcagggaaggattagcacttgtagacatagacatagaggacaagaaggatagcgatgtggagagcatcacgactactgcttccatgaacgacacaggtccaattacagaagagaacggagtggcagcagaccatatctctgatgaccacctggcgcagggcgtagtatatgtacatacagagattataggcaaagtcaattcagcatgcaccatagacgtccatccgacaaagccatggatggtcatcactcaagctaacaagtttgttcatgtttgggactaccatacaaaggtagtggaatggacgattcagattaagggagcgaaagttagttcagctaaatttatagccagccaggattggattgtggcgggtactacccgtggattcctccacgtgtacgattgcgaatcgaggaaggaaatacgccgtctttgtgaacacccgaaatctatcacgtcattggctgttgacgatgatgcccttgagctggtgctgtcagcgtccatcgatggcaagattttgatctggagctactggcactactatcacgcacgtagacgtagtacctggcatttggaaaaaacatttgacgcgggaagccagtgtctgaagcaagtcgcgtttattgctccaagtgtccatcgcagcagcagcactatcatcgctactgctcgagacggaacagtaaagatttgggatcccgatcgttctgacggatgccgtgagttcacattggctgcggattcaggtcagattgttgaatgtttcgattggtttagtcgtggtactgatatatacttggtcaccggttctcgagacaacactgccaagatctgggacatagaggatgggagttgtgtccgaacactggaaggacacgcagatcatgttaccgttgtctgttaccatccggatctttcaatgctcattacaggttcaagggacggctcgattcgtctgtggaactccactaccttcaggtttgagcatgagctgaactttgacctcgggtctctgagttctttagcttgtatcaagggatcaacaaggattgcaatcggatatgaaagaggtctagtactggcagacatttgcactcaggaacatagagcatgatctataaagcggcataataccttgagagcgacagaataaaatctaaacattgataaagcggcaaaaatccctggcaaacatttgctgatgcgatgggattgcatccaaacatttttcttggtaagctaatagactgcaataagtttttccatggacttgggaggtgtcgatctgcggatatgcttttgtatggtttaaacatatcatcggatagaaatttatactactatattaaaaatttaatatggacatctcgtgctactatgactttatccttc

SEQ ID NO: 37165 - DNA, 2659 bp, Zea Mays
cccacgaccaggccaccacttcgccatcgccacggctccacccacgtctcggcttttgcttgcttgcttcctcctctcccgtcgggcactcgggctcgtcagactgcgcccgggcgccgaatctccagacgggatcgcgccccccatctgacgccaccggcgccggagcccacggcgaccgcgcgcctctgcctccgatctaaaagaaacattggagaaccgtactgaacaaaataagtactggtatttcatcatttgtctcggtattccaataatgtggaaactcaatccctttggaggtaaagcacagagtgggttggatggtcgtactattgatgttggaaatttgaagatcacagtacaaaatgccattgcacaaggaggtttctcttgtgtatatctggcatgtgacacagtacatccatcaaagatgtatgcactaaagcacattatttgcaatgactcagaatcgcttgatcttgtcatgaaggagatccaggttatgaacctcctcaaagggcatcctaatgtggtcacacttgttgcccatgatgtttttgacatgggtcgtacaaaagaggcacttcttgtaatggagttctgtgagaagtctttggttagtgcaatggagagcagaggtagtggttactatgaggagaagaaggtgcttttgattttcagagatgtctgcaatgctgtctttgctatgcatggacaatcaccgccaattgcacatagaagagatgggcattgaggaagatgtcatcaggaagcatacaaccccagcctacaggcccccagagatgtgggatctctacagaagagaagttattagcgaaaaagttgacatttgggctttggggtgccttctatatagaatatgctacttcaagtctgcatttgatggagaatccaagttgcagatactcaatggcaattatcgtatccctgagcaacccaagtatagcactgctgtcacagggttgatcaaagatatgctggaagcctctccaaattcccgaccagacatcacacaggcaagagtttgattgattggccattcatctccatggtactaggtctggtttcgtgttaatgagctactgccgcttgagttacaaaaaagtttacctgacggaccttcgccagccgtttccttgagtttgcaagatgaaggtgctcataaaagggcacatgtgatgcctagaaggaaccctcctccacctccaagagagcaatctaatagttctctatcgcatggaagctcaaaggcaggagatgcacccttaggtgcattttgggcaacacagcatgcacaaggtgctcaagctgcagataataggaatcctttgtttgacgaggagccaagtaaggtatcattgtcatcaaagcagaaccaaagtcgggtggacaccagcatcagtattcctggtgataggcatggtcattctggtcagacgtcacgaataagcaaaacaccgaataactccttgtccaatgatggtttcagaggtgtctctgacacggagatacataattctgtgaaaactaaagtgcaacaacctcaacccaagccaaaatgtgataaagatccattcaacatctttgttgcagattttgacactcacaatctcaacattgccgttggtaaggcatccgaacttgaacttgaagtgtccagtctgaaggagcagttgaagaaaaccacattagaaaaggctgagatgacagccaagtatgaaaagttatctgcaatctgccgatcacagcgtcaggagatccaagagctgaagcgcacccttgctgaggcaacgcctccctcaaacaaagtcagctcaaggacacaagactctggatctcagcgaaaggaaaagatccaaggaaccttgtgggagcttgaacaagggatgcttgctagcaatacctcatcagccagttctgacgtcaaaacatggcaggctttccctgatacacagactcaggcccgaccaaaggtcgatcatggaactaacggaagccaaaacataaccaagaacacaacatcaggtgcttcccccgacgcgtggggttttggtactgatagtttcagaacatcgtcagcaccagtaaaggctgctacacagatcaacagggctgcccaagggagctcatcccaaagatttaattctggtgtggccaagaaggtagagcaaccatctggatgggctggtttttaactccacatcgacatgcgttaaccatcattctggtcaaaatttgcaatctgcgttacgcaacagttgccgacggagttgtgatccttggccggcccctgggcgtcaaaatcggttatcttgagcgtgttcatcattttggttgaaccaacttagacattggttcatgggatcactttacccgttaataagtaaatgtgtattgacagtattgtgagtgtttctgtgtatggtgattatgaacatgaacggatgaatgtaatgtctaaatgccaagatataccgtctcataacaaagacttgagccttctgagctcaaaacagagagctagtcatatttgtcttttttggaaccagtccattttaaccattatcattgacgcccaattttattccttgagcttgaaaacaaacattactttggtcacacaacctttgaaaaccga

SEQ ID NO: 37166 - DNA, 3118 bp, Zea Mays
catcaacatcccctccgtgctccacctgcacactgatagactcagaattctggttagtagcatgatcatcaacatcccctccggcccaagcctcccggcgacgggcctccgcttcgctcgccaacttggccgccttcttcagaatttggatcacaaactcaacacaagacgtcacgcctaaaaagacaggtaaacggtgctacttcaaatggcccacctcttagggtgtcaaaaatggagctcagtaaaatcctggagaaaatagaaaatattgtgactgaagcacacaaaattttgcagcttttgaacttgccaagcggcagtaatgttgacaagagacaaattgttgctgagaattcacgcggtgcagtcactactgtggcccctccacgtttagtaattggccgcgacgaggatcgcgtcaaggtcatatctatgcttcgtgagacacttgatgatggtcaacaggatcgcagcggtgctaaaccatactctacaattggcatttatggcattcctgggtctggtaaatctaccctcgcacagtatgtttgcgcccatgaggaagacaatatccactttgacattgtcatctgggtccatgtgtcgcagaaatttagtgtgcgagccgttttgagggagatgatcgagcagggttttgagggagaaagcatcgagaccgaggagagtttcagatgtatttttcccaggaggcattggctggaccctgagtatttagtcaggttgtgggtggcagaaggatttgtcaccagccgcaatacaggggaggaactggaggctgttggtcgaggctactttgatgagttagtgtcagcctcatttctgcaaccagtagatggtgacaaggaacgctatacgatccatgatctgttgcatgacttggtaagtaaagtagctggaagtgactgcttcagagctgacaatggctgggaaggagaatttcctcaggatgtccgtcatctttgggttgagaactgtaaactagacttgattgcccacaagattaccagactgaaaaagctacgcaccctgatcatttctgctggtgagaatgacacgccagttgaggaaaaagccttgttggaaaatattttcacgggtgtgacgacattgcgggtgctccagataacaccctggacagcaggaactctctcattcccagcatctgtcgggcggctaaagcatctacgctatctttctgtcggtaggcatattggcggtactaaggtgattctgccaagtacggttgttttgggactgtaccatctgcagcttttggattgcccttctgtagccttctcctcctgcgaagatattgttaagggcctgttcggttgtaccggaatgagccaggattcattccagctcatcaaaatctatataaattagagaagtaatccagctaggaattaatccggggctccaatccgaaacaaccgaacagggcctaagctggttagcttgaggcacctactgtgctcatcaggatctctgaatgtaccaaacataggcaggattgtgtcactccgaactcttcgatgcttcagggtaaagaagaaggcaggctacgagttgtggcagctgaagcacctcaacaagcttgagaagaagctagtgatccgcggccttcagaacgctggacgcaagggagaggctccagaagccaatctagctgccaaggaacggctcacaagcctagcccttgagtgggacagtgatgcgccgctgagctgcggcgcggacctccaagcagaggtactggagggcctctgccctccgttgcacctcgaaaaactgcggctctgttggtacggcggctcgaggtacccagactggattgttggtgtgcgatgcctttgtctctaccggtgcagccgactaggcgcctttcatggatgctccccccgtcttgtcaaactgaaaattttagagtgcggctgggatgccttgccagataacatggagcacctcgcctcactccggaagttggttattgacggctgcaaggatctacggtcgcttccagagctgcctcgctctctgctgcaccttaagatctccggctgcgatggcgaggtcatgaggtcatgcaaaacggttggacatcccaatcgcaaaaggatacagcacgttcgcacagtaatcatcggatgggaatcacttcccagagcagagctattagatcactttgagagcgagcctgtggtgccggagaaagagaaggagatcgccgcccttgttaaaaagttgctcgtgatgcttggccttctactactttgcatgttcagtgtgattgcaaggttgcttgtgggctctttcctgctcccagctccgctggtcgtcgtaattttgctgcttgtggtatggataattttgacactctagaggcctgtgaaatcggttatgcctggtgccgttaaacacggacactactctctatcaattttcttctcttctctatggatattatgtttgcttgcctatatctactcgaccagtctgagaaaagatactatgtagttgtttgtatggaaaaaatgttgtataagataaaaaacgaatataaagctatgacctttttttttgtttttggatgagtatacttttagtgtttttgtttagctagagatgctagtgtgtttgcttgttgttgtgcacagtttgtggtactgtgtatggcctaacgctccggcggccctgaagttgagacggaaagggtggttgcggacagtccgttcttagaagcggacagtccacgattagatcagacggattaacttctatctccacacatgtttatctctttaaatacgtgtgagttattagaagtgctgagctagctctgcatgtacatacataaataaaaaatctcaagaaagtccctagatcaaacaaataaataaacaaaggaaacaaagagcagaaacgaatcaaaggatccagatccacacctagatagatacaataatataggcaatcagatgtattggtgcgatcgtgcaattaaacaatctctacgtttgatcctatatatatattattattaagatattatcaccgcatgatttataatcaatgacacaaattgcttgatcct

SEQ ID NO: 37167 - DNA, 2380 bp, Zea Mays
tcacacggcaggacgaggcttttgggtccgtcatcaatctccatccgtggcagcggcacgagaagatgccacgaggccatgcctgactggagggccaacgccaacccgacgcgaccggcaggcagcggcgcaccaacgcaaaggttaacccacccgcccacccagcagcactcactcacgagaccgtccaccgcgacgcgctctcttgcccgtgcccccgtcctccccttccccctccacctccgcggcgcccgcggtaacctcgccacgccacatcgcgtgcgagcaccaaccgtcgccggccctctaattaagctgcccgcgcggcgcgatccggtgtccaccgctgccccgccggaggaggaggaggaaggggggcggggggtggagcacagggggatgctagaggcgaagccgccgtcgccgggctcctccggcgcggccggggcggcggcacacatccacgctcaccggcggtgggcggcgccgctgctggcctcggtcctgctctcgtcgatcctcatctccgcgtcgctcttcttctcctcctcccgcgcgctgctcctctccttctcgccgctcccctccgcggcctccgccgagcccctcttcgtcgaggccaagctccgccagcagatgcgggccgaggagcgccccgcgcgcggcgccgtgcccaggatcgcctacctcgtctccggctccgcgggggacggagccgcgctgcgccggacgctcagggcgctctaccacccggcaaacacgtacgtcgtgcacctcgacctcgaggctcccgccgccgagcgcgccgagctcgccgctgccgtccgcgccgaccccgtctacgccaggttccgcaacgtcaaggtcgtcacacgggcgaacctggtcacctaccgtggcccgaccatggtggccaatacgctgcacgcggctgccatcctgctgcgcgagggcggtgattgggactggttcatcaacctctccgcctccgactatccactcgtcacccaggacgacctgttgcatgtgctctccgagttgcccaggcagcttaacttcattgagcataccagtgacatcggatggaaggaagggcgaaaccggtgatcatcgaccctgggctatacagcctgcagaagtctgacgttttctggataacagagaaacggagtgtcccaactgcgttcaagctcttcactggctcggcatggatggtgctcacccaccagtttatcgaatactgcatatggggatgggacaatctcccaaggacagtcctgatgtactacgccaatttcctttcctcgccagagggctacttccacacggtcatctgcaacgtgccggagttccgcaacaccacagtcaaccatgacctgcatttcatttcctgggacaacccaccgaagcagcaccctcactacctcacgctcgctgacttcgacggcatggttaacagcaacgcgccctttgcaaggaagttcgggagagaagaccccgtgctggacaagatcgaccaggagctactgggccgccggcctgatgggtttgtgcccggtggatggacgtatctactgaatgcgacgactgaggaagggagacccttcgccgttgagcgcgtgcaggatctccgcccagggcctggtgtggacagattgaagaaactcgtcacgggcttgctcacacaagaaggctttgatgacaagcactgcctgtgagactgccccccagtaagatgattctggctgggggcggtagattacacggtcaaatcttgagggcattgaagccattttctgggaatatgcctactggctgaagaagcagcacatagtatcatgtgatgtacgcgtggatgcgagcaacggtaagataggtgctcttacagacagccgcctgagttgagctactaccgtacagcaggaggccacggacgtagccggcggagattatacaggaatagtagctcattaggttatgttagatgactatatcagccccttcccaaccgtcaataatgttgggaattttgacatctccgcggcgctgcgggttgtgcaaggcaggcaggcagtccattctttgcttggatgccatggcgcctggtgtaatcaactggtagcgtgtgaggaggcttcgttgtattgactagtgcatatttctgggcaaaacagatgcgtttggttgcacacatgtattcttttatcccttttcctctttgatgatgagtatagcagaaatgatggtgctgtttcctctcgcttgctgcttgcatttggtaagcgcctgcgccctgccgtccagtttcggttgggttagaaatgctgttgcgattttaatatgtgtgattgcatcgctttttggagtctggatcgttttt

SEQ ID NO: 37168 - DNA, 2031 bp, Zea Mays
agctattctacgctttgagagttctaaccaattaaggtgaatctatcaagaccaaacaagaaataaatggatcgtcctattaatatccgtacatcaccaaggacgcccttgtcgttgtccgagcaacaaacgataaaagaattttggaggaagaaacaagaagaaattgaggcaattgaggactttggagagcacacaatccccgtgacctgtctcaaaaaggttatttgtgctaagaagggtaaaatgatgatgacgtctgacaccccaacattcatgacaaagttgaaacggaaacataacgacagaacagaaaatgaagctgccgaatcaaatgactggatgagccctggatatgctaatgctggcagcagcccagttcctacacccccttcagggaaaggtttaaaagcatccaccaagcctaaggctacgaagggccagaaatctggtcctcagacccctttgggttttggttctccgggcaatccttctactcctgttggtggctgccgctatgatagctccctcgggctcttgacaaagaagttcctgaacttgctaaaaggtgcacctggtggcattgttgatctgaataatgctgcagaaactctagaggtacagaaaaggcgtatatatgacatcactaatgttcttgaagggataggactgatagaaaaaaagcttaagaacaacatccgttggaaaggagttgatgactctcgacccggagaagttagtgatgatatgtcaattttacaggcagatattgatgctcttacactgcaagagcgcaatttggatgaacgaataagtgaaatgcgggacagattaagagggcttactgaagatgaaaataatcaaaagtggctttatgtcacggaagaagatatcaaatctttgccatgcttccagaatcagactctaattgctataaaagcaccgcatggcacaactttggaagtcccagatcctgatgaggttaatgattatcctcaaaggagatataggattgtcctaagaagtaccatgggtccgatagatgtgtacctagttagtcaatttgaggagatgagtggcatggagactcctccaaggcctacacagacaataagcatggattctctagagaatcctaggacgcctttggctgcggattgcaacaaagtcacagggatggaatcaaatattcacggaggactgatcctaccttctgatgcacctagtagttcacaggacatttcagggatgatgaagattgtcccttcggagcttgatgctgatacagactactggctcttatcggacaacacaggagttagcatgacgaacatgtgggagacaggaccagatgagtgggatgggattgagaaattcaacgcggaggatttcttggaagtgggcactccccagcagcaggataaaccagccgatgtcgtggatgacgacccctcctgtataatctgaagcccgccgaatcacggtggcgaaacctttcatagttcagcgcccgctccgatcaacctggagcagtagatggctgtgactgatgtacagatgccagatcagtattaataacttactaactgtctagaccatggcatcatccagaaatgtcgatcataaccgagagttgatggtgcaggcagtccttgtcaggttcaggctcaaacattgcagatgcaggctgaggctgcattagctgtgcctggtagttggtgcatgctgtgtatcttaagggtcacagcactagtagtgtacaactaggaatatgtgtgtcgaatccatttgtaaaatagcagccgttattgtttgtgtggtactgatccagcttttttttagaagaaaacatgtgttgccatcccgagatggctggacaggtgttgctactattcgcgccgttgccgggcaatatcgtgtgctatctgcatcgttatttctgccactacgtgacgttgtctgtaatagaggatttgtactacattgtttatatagtgaagtattgtttatataatgaagttcaaaatagag

SEQ ID NO: 37169 - DNA, 316 bp, Zea Mays
caggaattgttcacaatggccggcgtgtatgttggcaacttggattcacgggtgacttctggggaactcgaagatgagtttcgtgtgtttggagttctgcgaaggtaagaatggatggagagttgaactatctcgtaattccagtggtcgtggtggtcgtgatcggtatggtggatctgagtcgaagtgctatgaatgtggtgagactggacactttgcacgtgaatgtcgtctgcgcattgcctctggaggtctaggcagtggaagacggcgcagtcgcagcaggagcaggagccgcagcggcagccctagatac

SEQ ID NO: 37170 - DNA, 2037 bp, Zea Mays
cggatgggccgcctataggcccttccggccttccctgttgccctcccattttccctgtgtcattcgttgtcttcggttcatcctctcggccgccgtctggactgtagcaagcggtgctgctgtccgccgcgctccggagccatgcgggaggggatgaaggagagggacagaggtgggagcccagatgcctcgggccctcctcccttccgcggcccggcgtacaagacgaagctgtgcgctttatggagaggcaggggcggctgcccccgccccaactgcgggttcgcccacggcgaggctgagctccggaggccgccccctcgcgcctccttccagcctcgccctcggcctgatgattggtattacaagtactggatctattctaagtggtgaatcatgacgtgtaatcatgtattggcatatactctttcattagttgtattggctcgtctgtgtttatggtctatggtgtattggtgttattgtggaccctctaattcttgtagctaattgaataaccatttggctcaaggttatgggagaagggattacagagataatgactttagagttaggcctgagagaagacactcaccctatgggaggttttcccctgaaagagatatcaggcgtcgttcatttcgtgataagagacagagagcaagttctgaagataggggatctagtcattcaagatcacctattaggaagagtgagagaaaacatagcaaaagtcctgatggtggaaaaaccgattcatccgtaagttttagaagttcagataacgaagacaaaggaaaagatgaaaggtacttaagcagtgatgagaaaaatggccgtgaagaacaattgaaacaaatgcatctggacatggaagcattgcgtgaagataaatcaaagctggaggcgatattggagaagaagactgatgaagagcgcaaactttgtagcagagtagaagatcttgaattgcaattgaacaaagagaaagatgatttccaaaggatgacctccaaaaccaaaaagctaatcaaagcacatgggcgttatataaaagcacaggaggatttaaagaggtctcaggctcgctttgagaggctagcagatttgcttgcttcagatattttgaagccttataccaaggagcagggttccatcggtattactgccaatgacgatccatataatggtaatgaaatgagcccaagcgaccaaagacaaaaccatgtttcagcatcgagaaagagacctatttccctcccaagaagtgaagaagcaaaaactgggaagagacagagagagaatggtgatgatatgattccaacaccagagaactatagacctgaagatgctctagaacatgtccaagatagcaagggaactgatcgactagaatcatttacagtgaagaagttaagagtgggtgactacgatgatgaaggaaacattgtttcttcaagcaatatttttgcggataggttctagaaacgaagtcctgacactacgccttctgtttttccttcagtacaagggcgatgatgaggaagttgatgttgattagtgacccgatgccgtcggtcgctgataacgatttgagctgtacgaagcaatttcagcagacgacatcgatgtcagcttctaaaactacttgtatgccttttgcatcgggtaatagggcctggtatatttggtagctatttatgtgcttagactgagttgtgatgctgtcaaacatgattacatgcgatgctagaattttcttcttttctgtgtttcctgagactcgaagaggatattaatctgtattcgcctcatgtattattcttagccagtttgagtatgagatttttggactggtgttattctcagcctcaggttagaaacaccatgcatccatgattcatttacctatcatgaaatgcatgtgtgatcattaagcttactaagggtgtgtttggttgaggagtggagaagaatatggtggatggtggctttatttctattttttggatgttaagggcctgtttgtttacccca

SEQ ID NO: 37171 - DNA, 1841 bp, Zea Mays
tgcgccgtgttctgccgcgcctacgctcccaccgcgtgtccgcagctctgccccacctcacatctgcgcccgcaatccacgcctccgtcgccgcagcccttcctccacgcagcgtccgtccatccatggctctccctacacgcagcgtcgtgccgctttccgcaatccgtgccttaatccccttccttcgcgcagcacccttccatccatggctcgcttccagaaatccccctacctacggcgcagcgtcgcagtccggaatccacccccaaaatcactacccactctgcggcgatggaagggaatcgaaacgcgtgcttcccccttccatcctcggcgttgcgcggattgcatggccatcgtttcgcgcccccaatccgtcgatgcaaggaacacgtgcttcccccttccatcctcgacgctgcgcgaattgcagattgcgaattgcatggtcatcgtttcgccccagttcattgcccgcatcagatggaagggcgccccgatctgcctcacctccatcaatgaggtgtctgcctttcttgcatggagacgccaaagagaaggaaccagtcactaagtcggcctctgtacggtccatgaacacacatcaacggagcgtgatgtccgctccggttcagacttcacctccttgaatgtttccgacatgagcgccgagtcgataaggaggacacagtaccccagcttcactgaccgcccatctaacctgagggtgttctcctttgctgaattgaagagtgccacccgcaacttccgccggtctctcatggttggctagggtggctttggctgtgtgtacaggggtgtcatcaagacctccgacgatctgaacgaacgaatcgagatcgctgttaagcagttgaatcgtaaaggacttcagggaagagacgacgacatggatgtagattccattctttgtgtgagcactaccgccatatagttgacaacgatgaccgacactgtagattccattctttgtgtgtacaccaaggtatcggtgtctacgttgatctggcgatgcgcttttcacggttactgcgaccgtgatgggcatctaggtgctcaaaccattagttggactgaggaacacggagcagcagcaacaatatcgtaaggagagtgcagaagttggacaaatggagttaaagtgcacatacctaatcaagtctgtgggtctccaattctgaaatagaaagataatttatgttctcatctttctgaaatgaacaagatgactggcttctgggttaaggttttttatagagcaccatgacttatcagttttgtgaacaaccctaacttatgtggtcctgacaccacaaaaccttgtcctgatgctcctcccttttctccacctcctccatacaaccctacaaccccgatgcaatcaccaggtgatttatttagattgtccagtgaaatccttgagttcaataggacctttccttccttactctttcatctaaatgacatcctaattgggaaaatgtatacctccaaaacaagcataatgttgtcaaggctggagagcggtaaggaataactgcacgttttcctgaaaattaagttgaaaataatttgtaatcaggagctagagcgttacatggtactatgactatgtgctgctattagtctgtggctcagcggtatgtgtgttgtactgctattaatttgctatactagaatactggaatacaataggaagctactaacctgtacctcgtgggatgcaggaatgcagaataagtcaataactaccttgtccttttggttttccctaccctacattagtacgggagtgattaagggtatggaacatatgg

SEQ ID NO: 37172 - DNA, 847 bp, Zea Mays
cccggtttaatctgcactctctatctgtcatttctgttccaagatctctccggtgtgatttgactttgctctgttcgcaactgtttcaatgtccattgaaagagcacctacagccaggacactcgatcgatcgctgcttagagcgagagcacatgatatactcgtcatttcgtcgccgttgtactcgtgtagctacaaattatggactgtaaagctagcgcaacaagagaggacctggaattcatactacttaatgaagatgcacagccaaaaccactgcctttgtcgctccttgcagacatcacaagtgatttctccgacaagaatattattggaaggggtggatttggcatagtttataagggattcatcgggaatcgcacggttgctgtgaagaggttgctgcgtgtactacattttgacgaggatggattctaccgagagattaaatgcctgatgaaggtgaagcaccaaaatgtagttcgatttttaggatattgtaacgagacacgaggggagatggcagggttcaacggtacacttgtcatggcacaagaagaagaacgattgctttgtttccaatacctatccaaaggagggcttaacaactatatcaatgcagatgcatcttctgcgcttgaatgggaacaatgctatcgaataatcaatggagtttgccagggcttacatcaacttcatcagcacaatattttacacatggatctgaaaccggaaaacatacttttgggtaacgacatggtcccaaaaattgctgatttcggcctatcaaggcgattgcatgaagaccaaagctacgttataactaaaaatttatgcggaacacggt

SEQ ID NO: 37173 - DNA, 3259 bp, Zea Mays
ccgacctcacgtcctcaccccacgccaatggcggccgctctggcgagccgcgtggagagttgggtgcgggaccaggcggcgcggctgcagccctgggcggcggcgctgccgcaggcgccgcggtggccctggcccccgccgcggcccgcctggccgtggcccggggaccgcagacgccagcgggaacgcatgttccgggaggagtacgaacgtcgtagcagacagctccgcgagctctgccgcgctgtccgcgtcgacaccgtagccgagctccaggagttgctctgcgccatggtactcgccgagtgcgtctacaagagacctgtttctgagatgatgagatatatcaacaagtttaagtctgattttggtggaaatgttgtgtccctggagcgtgttcaaccatccttggatcatgtaccacatcggtatctgttagcagaggctggtgacaccctatttgctacatttattggcacaaagcagtacaaagatattattgctgatgtgaacatattccaagggaccttatttcatgaagatactgctcatgatttagctcctgatgttgaccctgaacaaaatgatacccaaaagggtgaggaaagccatgggaaatcttaccgagaaacatcaaagaagctaagaaaaccaaaacctgcagtgcaccgaggtttcttggctcgtgctaatggaattccagcactggacctatacaatcttgcacagaaaagaaacaggaaacttgttctttgtggacactcacttggtggggcggttgctgcattggctactcttgcaattttgagagttattgctaccacttcatctgaagaggataacaggcttcatgtgaagtgcatcaccttctctcagccacctgttgggaatgctgctttaagagattatgttcacaaaagaggatggcaggactacttcaaatcctattgtattccagaagacttggtaccacgcattctatctccagcttattttcaccactacaatgcccagacacctgaagcatcttttacaaataaaactgatgtgaaatctgaagaagttatggaggcaagtggggaaaggcccagaggaaacaacagggaacacctcgttctcggtgttggtccagtgcaaaagtcattttggaggctttcaaaacttgttcccttggaaggggtgcggaaaagcttaagtgcaattcaaaaacaaacaaatgtttttgggaaggcaccatcacaattggatagctatttgcaatcaaaggttgatgaatcagaagaaccacctcaatctcttgagattcaagaaagttcacaaggaattgctcttacccctttatcggataaagatggagggaacactgaagataataataggactgagaaaataaatgcatctgaagcaggggggtctaaacgctggagcagggtaccttctttgccttcatatgtgccatttggtgagctttacctattgggagattcatcagtcaatacactttcagattcagaatactccaagatgacgtcgaatatatgattcatgcatgtgtgcaaatgctcccatttttactggcattgagcaattgccacaattttcacatctacaagaattaattggtctaacagctactgattctgttgaacttggagatatcgtggaccctcctgttatccgaactgctacttctatccttcctcttggatggactggactccctggtggtaaaaatgctgagccactgaaagttgatataattgggcatgacctacaaatgtgcactcttttccaggcacaaataaatggaaactggtattccacagtaatagagactctaccatcagctacttcatactcaccaaatggagaactgcaacccacattacagaaaatgcggattcttgttggacaaccactaaagcagcctccaaattacattagtggggatttcatgattcctgtgatggcaggtgctgattcaacacccgactttggatttgaatcattttttgaagataaagattgctgcaagggtttgagtggatttctaatatatgggacaagtgattttgtaactgtacgtaaagaggtccacgttaggactcggagagtgcgattgcttggattagagggggctggcaaaacatccctgcttaaagcaatgttaggacaagttaaagaaagaaatagcactgttcttgaatgcatacatgtcgatttgcatggcaagggaatatcaaatggattgtgctacatagattcgacaacggtaaacttgcaggagctacctttggaggttgggcggttcaaagaagaactgttgttaggactccatgatatcagcaggaagactgaccttgttattgcggtgcataacctagcacaccgaattccacagtatcaacggtccaatacttctcagcctcagcctgctctttcacttctcttggatgaagctaaggcgctaagcattccttggattcttgcaataaccaacaaattctctgttagtgcgcatgagcagaacagattgatcagctcagctatggaagcatatcaagtttctcctgagatgacaaaagttgttaactcttccccatttctgatgccaagtgctagaaacagtttgcagcagatcagatcagctactgggaagttgaagaaggatccagcaaatagatctggttatcttcctgtaaactttggattgtcatcatttcagaggaaggacattgttatgcatgtggagggtgttagttcccttcgtcaacttgtacatcaagtagtcctcaacaatgaagaaacagcatttgaggaacttgctcgtgagagattgttgaaggagctagcgtcagagaaagcagcgtccctgcaagtgaagcagaagccccggaaaagagatggctctgttacagctgctgctgtaggtgcatctctgggcgcgggcctgggaattgtaatggctgtgataatgggggcagcatcagcccttcgaaagccgtgattcatgtattcttttgatccattatttacttcttgatttaaggatgtctgaacaaaagcactagtgtaggcatgaaaaatgaaattttagggcagaatagttagctgataccgtagtgccacattttggctgtgtatagaatgtaggttgagccttttttttgctgatctgaattttgttgtgttactggagtatggcttggatatgttctacatcatgttttaatttagttataaatctgtatcatgtcta

SEQ ID NO: 37174 - DNA, 1438 bp, Zea Mays
aatgatctacttgagtacgaagacgtaagattttgaccccttttcaaaaagaacagtgagccactcattgatcatgtttaatatcttacattgcaaacaggctattcgagttgctcaggtgatggatgaatcccttgataataataaaatggacttggtgacaagatgcatcgatttatctgagaatcgattatgcattatgccaaaacgagaaaacacaattacacctgaacgtctccgatcattcttttctcgcttttcagcgtcctgggtctattcgaaaatactcacattaggtgtctctgtttatgaaagagaccgcagacggcgaggatattgggcattgaggctatccattgatttggagcatatgggtcgtccaaatgagagcctatccacagctgaaggaggggcaactgatccatgggtccgtgctggttcaaagttcgctctgcaaaggagagttctgcgtttaagcaaacctccacgacgctggaaagttcccagttacgctgattatgttaagagaaatataagagaggtaagcattgaaggaaggccattgaattgcgagacaggagcaaagaatgtattttacggttacgatggggaactttgtggggtagaacagttggctttacaatattatgctgatgaaggtggtggttggcaaggtacccattcggaaggtagcatttggatgactatctttggccttctaatgtgggatgtgatgttttcagacatacaagatgttttccagtctaaattccagacagccccccttgatctgggaacagacgatttttacaaatctagagagaacattgcagaatctcagttgaagaggatacgggacggaatggccgaagagatgctaatcagctcatgggagctacatcaggggacatcctgccagggtgttaactgggcccgttattcgttaactgatctacgggctgttgttgcatgcgttggtggccaccgtttggcatcgctcctccgccatctagccgttgattacaggagctggtcgagtggaatgcccgatctgctgctatggcgtttccttgatgaaagaggtggaggtgaggctaaacttgtggaggtcaaaggacccagggaccagctgtcagagcaacagcgtgcatggattcttgttctcatggattttggatttgacgtggaagtttgcaaagtaagcccggtcaccaagcggagatagttcgcttgctaaatttattctgattattacgatgcaaaatgtatttggttgattagatagaagggcaaatctgtaacgcataagcaatggcattgttgtcgtgttgcactgaagtaacagtcaagctctacttgacatgctatctataactttgagagggaaggatgcatttaattgtctgaatcggcacaagttagaagaggaaattctgat

SEQ ID NO: 37175 - DNA, 1267 bp, Zea Mays
gagattataacttatgataaattatctagtaagtatgcattccagcgtcaccagcagtggctacagcatgcaaaaactcgcagtgctagacacaaaattatgaaattaataattttgttgctgatcttgaagacgaaagtgatagtgagctctcacttccaagcaccaagaatgaagatagtaaattcaactgggagaagatattaagttctgataaattattctttgtcaacaaaagtagtgatggctttttacctgttaataatgtccatacgaaggtcaatgggaagcaaaacaaaactgttaaggatttgggcatcaaaatcaatggtcattctacaattcgaggtgatagcttcagtgagttaatgcaccctggcaattctacctgcaaggaagttttccctggtttggatcactggaaatctggtaaaatttctggttggcataatacggaaggcaactctgtccaatggctttgcatagcctgtgttgaccgaaaagggatgatggcggaggttacatcggctcttacagcttgtggaattaccatatggtcttgtgtggcagaagtcaataaaaggaggggaatgggtgtgatgctgttccattttgagggaagctatgagaacgtggtcagtgcgtgttcaagtgttgacatgattcttggtgttcttggttggtctgtgggatgtagctggtgtccattgggtgttcttgagtgctaatcggtaccaagagacgtgtaccacaatagttcaccactgtcttctccaagatggagttaattttggaagcactaagacatcggtggctcaaaattttgttggtcagatcatggttggtgactggtgagcgagtggaaccctttacttctctgtcaaatcagaaagtgggggtgatcgaagtagaaccagatgtcattctgaaagtgagtgtacatagcagagcgagtagggtactgttagtgcagggattgatttgattgtacagaaggccttacaaaagattgttaagggcagttcgttcttctccccactttgtggttcgcatatactagtttgcttaaatgtgcagctagaattttgacctggacactgatcccaaattttgcctgtttaattttctcactccgcctgtaaatgttattgtacagcttcaattttgccagtgaaaatttgaacaaagttaactggtagatgcacgcctgaattacttgccattttccgcagtatgaatggtaacttaaactggaggtttggctctg

SEQ ID NO: 37176 - DNA, 7162 bp, Zea Mays
aaaaaatctcgttaccctcacactccgggtccgggggggcctcgtcttcctcgctccgccaccgccacgctgaaaacccacgcgctaagcgcaccccgccaagtctaccagacgctctccggagcggcacgcgcgcgccaatggcggggccttgaggtgctcgtggggtgagggagggaggacggcgctggttagtgagggcgttaagcggcggctcggcgcggcgggcggggaggatgatacggcaccagatacggaacgagtatgggctggcggatccggaggtgtacgcggccccgggggaggaggatgacccggaggcgctcctcgagggcgtcgccatggccggcctcgtcggcgtgctccgccagctcggggatctcgccgagtttgcagctgaaatttttcatgaccttcacgaagaggctatggctactgcttctagaggacatggtttaatgctccggttgcagcagttggaggcagaatttccagcagttgaaaaggctattatatctcagacggagcactcaaattatccacatgatgatggagctgagtggcattctaatgttcaacttaaacagaatgtgatcacacaaggagatatgcctcgtttcattatggattcatatgaagaatgtcgtggtccgccacaattgttcacattggataagtttgatgttgctggtgctggagcctccttaaaacgatattcagacccttctttcttcaagacagaacatgcctccaacatgatagaagcggatgttttaattgaaaataaacctcgtagaattaagaagaaggccatgcgttggaggaaaggggcaactcttgaatcattactcactgcaaactcagagtctcaaattacccccaaggatcgaacttctagaaaagttccacctaggacaacaaagttgaaatccaggcaaccacggagtcctgatcataaaaccactagcagaatcttgagggagcatctgcaagaagtgattttatcgcagaaaaaaatcatctccagatattcggtgaggcattactatgtgaaatttggatcgcctgactcaagtgaaactgcacctccttttggagaaatggacagttttggcgcccttgttcaatcttctggtaaattggatctgacaaaagttgttccagtaaacgaatctgatgctgtggatactaaatctgaacccattgatggatcggcttatttggagctaggtgataaacggaatctggggaaacaacatgaaccttttcaacaaaatggcatggtccatagctcagaaaagctgccggattgtccatacttggatattggagaaagtaataacagatcacatttgacatgtgaagagaaaccccgattggctgaggttcctgctgatcagaaagatgttgatggccgcaggcctgatgacatcgtgagtgatcaagacaacttcattggtgcttctaatgacacggacatggaaaacaaagaaggtcttcaaatgaaaactgaatgtgatcccagtgccagtgttgaactggttgaattgaaccgtcacaacaaggaaggtgacaaagtattgtatgccgaacctccagaagtaggtcctgcaatagactcgtcattgggattggataatgcaagcagtggtgaagaaccaacctgtgtggacttgccactgtcaagtgattctgctcccacagtgtcagccaccaatggtccaaactctggttcacaatctggcagacaaatgaatggtgttgactggtccacagacgaagagtcttctaacgatgtggatctaattgacgtgagctcatcttctagtgtagtttctgaaaatggtgacgtacaaaacaatgattgtctcgttagttgtctacaacacgaggaagcgattcactctctgagtgatgatcatgctggtgctatccataattctgatgaacagtcaccgaatacgtctagcaactgggatgatatggctattggctgcaacaattacaccgagaaagtacatcatccagtggagcatgtccaggatgttgtactagatgatatttctatgatactgagcaaacctaatgatgtttcagaagacgaagataaaatcagttcagggaatgctgatgatttgtctctccaccctaccaaattgaaccaagaggaaatacaggagttgaagacagaatcggaagaaggcagatctctagaatcaggaagttcacctagcaaagcatcattgccaaataaggatcatgtgtcgatgaatgatgtagaagccgacactgttacaattcctaaagaaactgttgcagatactgcaccaacaggtttggatcctgatggcatcgacgagcgtcaagatggagttgcaccgaaatattcaagcatccacaatagtgtactgtatgaatcatatgatgacaagattgctgaagacacacactctttactagatgatggcctatcaactactttcgatgacgataagcatgttgcagaggatcatcaatttgttgttcttgaacaaaggacttgtccaactagcctcaacacatgcaaggatgattctatgcaaggatgtgccgtggccagggatttcactgatgctgaaaagcttccgggagtcgtttcaggtgtattagcttctcaactggagacagaatctcatgtaggagagacacttgcatccacgtcctatgcattcagtgatgatactgaagcactagagattggtgtccctctagcccctggtacttcctttctacctaacaccagtagttccttggtagaaaaacatgaattgactgaaacagaagaaattgcagaggttggtgaatttgtggttgcaaaagaatcaactactagcgtatttgcagttgatgtggtacctcccaaagagttcattgatgctaacatacatcctgaaaaggtagaggttctggctacaagtttgactgaagaagccactaggctggatttacaactacagtctccttccagggaagttttggaaacaacggaagctattcacagaaattttggggcagtagatgaatcaagagaagatatctctaagaagagtatgttgcagacagacaatagtcctcttattgtagagactacaagtgaaaaatgtagtgacagggatggtgatacacaatttctagtaaaatctgattatcaagaggaattactaaaagagggcagtcataatgctgaagatcgatctctctgcgatttgaacaaggatggtgcagtaaccttgaaaagtaatgcagttgagaaacaaccagtgaatgctggtcaagatttggcgtgggggatgcacgctcaagattctagtagtacaaacccgttcctggatcctgcctacttgatgagccacactcaaatttattcatcttccagtatgagtagccaaccatgtttccctgaagaagaggatttcctttcagagcttgtaatacaacatgacaatatgggagtaactgctgatgccctttgggaacctgcaactccacctgatgatgcgccattaccatcagaaattatgactgaagatgatttcagatccttctgccaagaatatcatgagatagatttttcatctgtcactaactgttctcacagtgaaccagcctcagattctaacaaaattccaaatgcttttctgatcagagagtcagattttccatgttataactctgccttgccagtgaagttagatcaggaagcctgtattcattctaagttctgttctgagtgtgtcgaatattcatgtgctgtggaaagacaaggcactacatcaatggttgtttctggtaaagaagatcgcgtgggcaaggacgagacaccaggagtagatttccatttaaattttctcgagttttccaatgataacagaagtcctgaattaaatatgctctccgttccagtggatttacggcaggaactgcatggcttgcctgaagttgattctcgtgatagttcccctttgctgcataaggagaagactagtgaagaatgctgcttttctttaagcaacaacgttgttgaagtgaaacaagagctggaaatccgtgctgaccttgttccacattcttctattaatgaaaaagtagatggattagatgaggctgtaccggtggaaccagaggcccatgcctgtgccttggatgaatatgacaaccaagatgtcccacacatttcaactagtgagaagaatgaaacccttactttgggcaaacctgttttagtccaggggccagaagtttgtgcctttggtggatttgaatgtgatcctccaatcattccatcaccttcagttgatgagactaaggacaatctagaagtcagaatgaatatgatcctccaatcattccatcattctttgaggacttcttttcaagcagaacagaagtcagaatgctacacctcaggtgaacatgattctcaaaccgttccatttcctttgcatgatgagaatatcaatgaactggatgatcctcctttgagcaatgctgacgaactggaccgggaatcaaaagcttgtgttccacatgaatgtgatgctcaaatcgctccatgttcaactgatgaggatatacatgaattggatcaccctcctttgagcagtcccgctttagtggatcttgaatcagaagaccatgtctcggatgaccgtgattccgaagtcaccccatgtttggttaaagataagattgatgaatctgtagatgctcaaccaaacctgcttcctggggagctagagcaggaaactcatgcaccccctgaattagactttcgagttgctccacaatcagcgaaagaatctgattgctcaactgaatttgattcccaggccgcaccatgttcttcaaatataccagtactagctaacacaacagtgtcgacttgtatttctgccatgcctagcagtgaggaaacgtatcagttgtctcctgttccaccacctactgtacaatttcaaaatgattcctacaaagatcctcaagctctactcgctgattcctacaaagatcctcaagcgccaccccctctccctcctctccagtggaggcttggaaagcctcggctaggacttctgagtagaaaaggctgtatgactgaacctgcaagggtaatagatcctgttttgcagatatcaagccaagagatggatattaggccaggtttgcttgatccaacggatagatctatagaaccagtatcctgtcaagaaatcaaagaagatagatgtgagagttctttgatagatcataatgatcaaaatgtggattttgatagattatcgaccagggttgcagtaactgatgttgcaaggactgaacacaggctatccttagagacttcagaggacattaagcaacaggggcatatttcttcatcggcaacaggagttggggaacacctggatgctgggttcacatcaacaatggcagatgaggaacatctggatgattctgggatgacacatggaacagctctatacttatcagaccctctgtttccattacctacatatgaactgcaggaccctcaaccagatactcgagaaaatagcgagcatcccagtcaaacacatggagctgcatctggggatgataagtcaatggatgctgttggcagcatggaaagcaccctaacaaaaggacatgtttctggaaataggtgctaccagcaacctcagcatggtgaatcgtcctcagagacttcagaccataaagagcatattacaaatgcatcagaggatggtgttaagcatcagtcaggtacaagtgaggcaccttcagacacagcaaagcattctgcaccaggcacgctgttgaaagggaatgtccaagagagtcaaattttacaggaacataatgtggggagttccgaggacgatcaaccaggaggcctgttgtacagcttagaaccagtggcacctcaaggggaaaacaaaaaccaggttaacaacccaggcctgttactggaatggcctggagatacaagtgagttggtcactggccttgaaaaaagttgctatgcgcatgctgagcagccacctgtgatgggatggactgttggacctcagatgcttcatcctaaatatggtattttagaagaagagagccaatttgagcctaatatcgccgacaatcatttaatcaggaagcctatttcgataaaaaacatcccaaggaatccactggttgatgctgttgctgctcatgatagaagctcgatgagaaaggtttcagagcttgcaccaccgactgacaagccgaagcctaacgagagaaacatgttgctagaacagataagaaacaagaccttcagcttgaaacctgttgctccagctcagcaaacagcaatgagatcccctgctagaaccagtactagaaacttgaaggttgccgctatcatagaaaaggcaaatgccatacgacaggcagtgggaagtgacgacgaagacgcagatagttggagtgatacataaatcccccaccgtttgccctaccctcttggtgcttctttccatggcagaaagaaaggtaccgattcatcaagagcattggggacaggatggggatgcacaaccatgtcatcgtttttgttagtaatataatgctagtcttgtgtatagtatacgcccataatccttttcattttttgtatgtgtattctttcgaccgattgtttgtatacctgcctctctctcccacagcagcaaaggctgttgcggttggcatgatcctaggatagcatgcatggtctatgtaaattaaacagtagtagttaagtaaagaattgttccatcttttctggaaaaaaaggtgagataatggcatcatcgattccacacagcaagcatagcagaccttgaattgcaaaaatatgaaaaccaatacacccgcttagacgaatttgttgatccatggcaggtcaaactaacaaactaactattggaggcaataactaaacttaacaccaagatttagtttcaacagtagccgccgcggcggaggcggccgacgagggtcgagcagatgaagccggttgcgcccgtctcccccgccatctcctcgcgtccttcccgtgagctgactagctgagctgggtctcgcgtcactccgagtgtgctgcggc

SEQ ID NO: 37177 - DNA, 3097 bp, Zea Mays
cacatattaactgctagattttgagggtgtctaatcttatgctgaatgtatcgttgtagttttctcattttctagtagggtggcaactcattgtgaatttagatcatttgtataatcatagtcatggtttgctgggatcttcagtcacaatttttattggatgcactagtgtttcttctgaagtctgaacatttgcattgatgttgatatttctaaacaaagcctatttttatgacttacagggctgtagttcctactatccagggctatgaggacgcaggagacttcactgttaaagaaaggctgaaaactagcattcatatgaacctacttttttattcaattgtgggagccattggccttattggtctcatactactcttaatcatgcataaagcttgggatggtggtattgtgggatttgcaatggcatgctcaaatacctttggattggtgactggtgcttttcttcttggttttgggttaagcgaaattccaagaaacatttggaaaaatgcagactggtctcaccgccaaaaagtactttctcatagagttgccaagatggctgtaaagcttgataatgcccatcaagagtattcaaatgcaattgttgttgctcaagctacatcaaatcaaatgtcaaaacgtgacattttgaggccttacatggatattattgataacatgttgtctcaaatgctgcgggaggatccagcctttaaaccttctggtggtagattaggtgaaaatgatatggactatgataccgatgataaatcgatggccacacttcgtcgccaactcaggagggctcatgaggagtactataggtgcaaaagtgagtatatgacttgtgtcatggaagccctcaaactagaggacacaataaaaaattatgaacgccgtgatgctaatggatgtgctgcatttgtcaaacaagttatgccaagtgatgtatgttcatcatgagggaggatttaatgtgtaaaaagagcaaattttgtgctgcctgtaccgttattagttcaacaaaagttttatactgcaagcaatactgctgaccaagaatacttgaatgttggcgaattgtgcaattgctattgatgcttgtgcttgtcaacttcaggaacttcgcatatatcaattatattcttagtaactgcttggaaaactttgagcaatttgtactgcaaacaagttgtgctcatccaggaactttacagacatcaatattgtgtgcacctagcacttcaatcttatagtatgtagtattggtttacttcttttaaacaggaaatatgtatcaagttttagtgaaagtcgctcgggcacacttggatcaattttggacactatcgagttcatttggtgctgtatactgagaaagcagcttcaaaaagcatttgctgttatccttggctgcatgtcagctgctatactgctggctgaagctactttacttccaagtggtgttgatctatctctcttttctattcttataaaagctgtaggaaaacaagaggttttagttcaggttgctgcttttgtccccttgatgtatatgtgcatttgcacatattattcattattcaagattggcatgttgatgttctattctctgactccaagacaaaccagctctgtcagcttgcttatgatctgttcaatggttgcaagatatgcacctcctatttcttataactttctgaatctcatccgccttggtggcaatgctaaaactacatttgagaagagaatggggaacattgatgatgcagttcctttctttggcagaggcttcaacaagatctatccactgattatggttgtttatacactattggttgctagtaatttctttgttcgtgtgattgactttttgggaagatggaaaaggttcaagttccaacgtgaagaagagaatatagatggtttagatccatctggaatgattattctacaaaaagagagatcttggatcgaacaagggtgcaaagtgggcgagcaggttattccattggcaaggaatttcaatggtgtgaacgctgatattgaatcacaaaatgtgccattggttgaaaacactgtggagatgaaagtaggggcaacttcttccagaaatgacgggagagctggccagttgaagtatgcaaacaacagggagactatcgccagcaaatacacttctattagagaacagaaccggcagtcagggaaggtagtgagaaaggaaatttcaccgaactctatatctttgctcgaagaaagaaattcagagcaggggtccaatgctggtgtaccaccaactggtgtgtctgcaacatgggcctcgatgaagattggttttcaaaatttcaaagcaaatatgggttctaagaagtttcttcctttgcgccaagatccaggatttgttccaaatttgaatgtctcttcaccagaatctcttgatgacatattccaaaggttgaaacggcggcctgcaaatgtgcctgtggattaccttgacgatgacgatgatgacaacataggagatacagatcttcatttccaagatcaatgaaataggttgtgatattcttttaggtttagaatatgcatacacagaaaaactaaaagaattggtagcaatagatgttcaaaggaagatacaggatgtatagatctgatgatggtttggtgtgcttcctggaagctcatgacgcctgtccatctggaaaactgcaaaatgtaagtacgatatgatgacagcctttacagaaaggtttggaattctcccgccgaaaagggttgggactaatctactacgtaccactatattcaggtaaccttgttggtttctctcaccttttttttggaactgtattggagatgctgatatgtgatggaagccaaaaattgtaaatgtgtacctacaataccatatgaaaattaacgtgcttgagttgtaaccagtaaaaacatactattgaatctatacttgatcgggaggatacaacccaaagtgtttgtgtgtgacgtcagacatgtatttgatggtataacttgtggacacttattgtctgatgcttgacctaaaaatacctatctgtactgc

SEQ ID NO: 37178 - DNA, 1149 bp, Zea Mays
gtccgtttccttcctctctctctctctctctctctctctctctcttctggggcttgcagcagaatcgcagcgaccgcgtcgtccccacgcggtgcggccgctgcgcattgcgggccgggagagcgagaacggagtggggaagatggagacggtgaagagccttctgaagccgaagccgacgccgcagcagcagctgcgcgagtggcagcgccgcctccgcaacgagggccgcaacatcgaccggcagatccgagatgtgcagagggaggagaagaaggtggagaaggccatcagggaggccgccaagcgcaacgacatgggatccgccaaggcgctggccatggaggtggtgcgctcgaggaaggcagtcaaccgcctgtacgagaacaaggcccagctcaactccatctccatgcaccttggcgaaatcgttggtactaataactaactatcccacccgttggtactaggcaaacaagctacagctaggacagtaggccacttgtccaagagcactgaagtgatgaaacttgtcaacggcctcatgaaagcccccgaggtcgcagccacaatgcaggaattcagcaaagagatgacaaaggctggtgtgatggaagaaatggtcaacgatgctttagattcaacgctggacagcgaggacatggaggaggaaattgaagaggaggttgacaaggtcctcactgcaatcgctggggagaccgcctctgagctcccggatgctgtcaggaaggaaaaggagaagatgaagcagccttcaacaagtgtacctgaggagagaactgctatagcagaggctgttgatgacggtgagctagaccagataagggaaaggcttgccagagtgaggtcatagaagatagctgaacaaggtcagatcattgaggtgttacggcacatgacatctcacttgataatgtatacacgtatcacacacaatcactgtgattagcagaccgatttccccacatccagcaatgtgattttgtccaggccctgttgtaacctgtatgggtcatgatttctaatatatatcacgtattatatgtttggaagcaccgtgtttaatactctgaataatccatacatttcattgcactgcgacgaagtggaaagagaagagaagtgggg

SEQ ID NO: 37179 - DNA, 200 bp, Zea Mays
accatctcctcgatcgagtccaccttcatgttcctttcttcctccagggtcctccctcttcgttgtcacccctcttctcctccaagtctggagcctggacctggactccaccatcataaacgttcgagcatgcatgtcctccctcttcgttgtaacaaactgctgctgctcccaggcgcccttggcatctgacaatgctg

SEQ ID NO: 37180 - DNA, 4241 bp, Zea Mays
ccttcatcctagccgtccaccagcgcaccgttcttgccccgcaagcctccgcacgaggcctggaactttccacgggtccaaaaccttctctctctctcctctcctcttccctttctctctcctccgcctcccccgactcgcgagtcgcgatctccacctccctcgaccaccactcccgtaacccacttccgggtgggccccacgtcgccgccggcgaccagcacctcccctccttgactccctcgctacccgccgcccgcgtcccgccggccatgacgacctcgccgccgcccgccgagcagcatgaggaagaggaggtgctggtgccgtatggcccgcacctggagttgcccaatggagcgcagccaatggaagttgtgcctgctgagccagctgctactgtggaaaaccaacagatagaggatccaccaatatcgagatttacttggaccattgagaacctatcaagagttagcacgaagaagctgtactccgaaatctttgttgtcggaggctacaagtggcgaatcttgattttcccaaggggaaataatgttgaattcttatctatgtatttggatgtggctgattctggggtattgccctatgggtggactagatatgcacaattcagcctctctgtggttaatcaaattcacaacaaattcacaataagaaaagaaacacaacatcagttctctgctcgagaaagtgattggggtttcacttcatttatgccgttgggtgaactctacaaccacagtagaggttatcttgtaaatgatacttgtatagtggaagctgaagttgctgtatgtaaagttgttgactattggagttatgactctaaaaaggaaactggctatgttggtcttaaaaatcaaggtgctacctgctatatgaattctcttcttcagacgctgtaccacatcccatatttcagaaaggctgtttatcacatgcccaccactgagaatgatatgccctcaggaagcatccctttagctctacagtcactcttctataagttgcagtataatgacagcagtgtctctacaaaggagctcacaaaatcattcgggtgggacatgcatgattcatttatgcaacatgatgttcaagaattgaacagagttctttctgagaagttggaagataagatgaagggaactgttgtagagggcacaatacaacaattgtttgaagggcaccacatgaactacattgagtgcatcaatgtagatttcaaatcaacaagaaaggaatccttctatgatctccagcttgatgtcaaaggttgtcaggatgtctacgcttcatttgacaagtacgtagaagtggagcaattggaaggtgacaacaagtatcatgccgataagcatggtctgcaggatgcaaagaaaggagttctttttatcgacttccctcctgttctgcagcttcagctaaaacgttttgaatatgatttcatgcgtgacacgatggtgaagataaatgatcgctatgaattcccacttcaattggaccttgatagagatgatggaaaatatttatctcctgatgctgacaggaatgtgcgtaacctttatacccttcacagcgttcttgtccatagcggtggtgttcatggtggacattattatgctttcatacgacctaccctttctgatcaatggttcaagtttgatgatgagcgtgtgacaaaagaagatgcaaagagggcactggaagaacaatatggtggtgaggaggagctacctcagacaaatcctggcttgaacaacactcccttcaagtttactaaatattcaaatgcatacatgcttgtgtacattcgtgaaagcgacaaggacaaaattatttgtaatgtggatgagaaagatatagcagagcatcttcggattagattggaaaaggaccgtgaagagaaggaacgtcggaagaaggaaaaagctgaggcacacctctataccataatcaaggttgcaagggatgatgacttaaaaactcagatagggaaagacatatattttgatcttgttgaccatgataaagtcccaagcttccgtatccaaaagcagatggcctttgctcaattcaaggaggaggtagcaaaagagtttggtattcccacacagttccaacgattttggctgtgggccaagcgacaaaaccatacttaccgacctaacaggccattgtgtcctcaagacgaagcgcatactgttggacagctaaaggaattggtgaacaaggcccacaacgctgaattgaaattgttcttggaagttgaacttggactggaccttaaacctcttcctcttccagacaagactagagaagatatatttcttctcttcaaactctatgaacctgaaaaggaacagctacggtatgttggtaggctctttgtaaaggcttcaggaagaccacaggacattctgccgaagctaaagatgttggcaggtttttcacaagatgatgatattgaactttatgaggaaattaagttcgaacccaatgtgatgtgtgaatacattgataacaggcttctgttccgatcttgccagcttgaagatggggacataatctgttttcaaaaatcttcaaaggcagatagtgctgaccgatatcgatttcctgacgtaccatcctttttgacgtatatacgtaaccgacaggtggtccactttcgttcactggagaagcccaaggaggacgattttttcctcgagatgtcaaagattttcacatatgatcaagtcgtggaaaaagtagctgaaaaacttggcgtggatgacccatcgaaaattcggcttacatcacataattgttattcgcagcagcctaagcctcagccaataaagtacagaggcgttgaacgtctactggacatgctgattcattataaccagacttctgatattctgtactatgaagtattggacataccacttccagaattacaagcgctgaagacattaaaagttacataccatcatgccacaaaagatgaggtgtcagttcacagtataagattgccaaaaaacagcactgttggcgatgtgctaaacgatatcaaaacaaaggttgagttatctcatcccaatgctgaactgagattacttgaggtcttttatcacaagatatacaaggtgtttgcaccaaatgaaaagattgaaaacattaatgatcagtactggacactgcgtgcggaggaggttccagatgaggaaaaaaaccttggtccctttgatcgattgattcatgtatatcattttacaaaagatactcaaaaccaaacgcaagttcagaactttggagaacctttttttatggttattcgtgaggatgagaccctatcttctatcaaagagcgtatacagagaaagcttaaggttccagatgaggatttctcaaagtggaagtttgcatacatttcacttggtcgtccagactattttgaagattcagatactgtagctttaaaatttcagagaaacatgtatggagcttgggagcagtatcttggactggaacatccagacacagctcctaggaaggcacacacaattaatcagaaccggcattcatttgagagacctgtaaaaatttataactaggcatgatagaaatttgagcaatgagctgccaagcaagggctaaaattgctgtcctgaaataaagcgtgccggggcatgttgctcaggtttttcgtggagctggtgagctagttcatgagactccaagtatgatcggggcggcttctcatctttccctgcttttccccggatacatataaagttgtgcagagatgaccccaccgaacaattgtctttagtagataagccagtacttcccgttagatgactttatacagtcgaatagccggcattttagtcgatctttccgttctccagttgctgttggtgctaggaggccttgagctgttgagggtacttgccctgctgtatattatgacgtagagtgtacaagtctttgttgttgacaattacacggtgttttgtaatttcagtgatacacttccaggtccttcagtacgtacttgcctggatggtgtcaatttggcattctatgttagatattgatccatctgttctaaattaaaattataaggcagtttgacttttttaagatatactgcctccgattttctattagttgtcgtttagaatagtgacacggtctccatattataacgtgtctccatattataactt

SEQ ID NO: 37181 - DNA, 1997 bp, Zea Mays
gcagtataatacttaatctttatgtttttgatgcacctgctaagcgctaccagtaccaaaaaggggttacattaaaatgtgatgtatcatgtatatattgttgggtctgcatgttgtgatcttcaagggcacaacaacttagatgaacccaagtcgaatatgattatgtatcctcttttactgttctatattagattacttcacaattgttgaatgatatttcgatggtcatatttgaatgttgtttgttatggaagaaagatgatattttggcactatatggtaccaagtttttattatcttgcaaaaaaatatctaaatgttactgacagatttcccatcagtctgttttggatcacttttccctttctttgattgtgtgccaaaagaggtgccatctttcaccatgaggccttacattttctgatggtgacaaactgacaatccattccaagtctatatgctcatattatttttagtatctttgtattttacttccgaaggggcgtgtttatatgatagaaaaagtattacaacactaagtctttgccaccagagtttagcagcaaattattttttgccatcatacatgcttagattttggaggcccaagtgagcaggccttcctgttatctagaacacaaaggccatttactccattgcagtggatggagttggagcaccaggctctcatgtacaatctcaatgcaatggccccggtaccgtaccttccagcctgctcatttcaatcagcaagaacttcatatcatccaatagagatatgcatattctgaatcataaggctaaggttctctacttcaaaactactagcatttgcaataaaacaaaaatagaagataaaaatattatttgcacaaatgaatgcctttgtaatgttacatggtaaataataatgttggcagctttgtagtatcagaaactacatgagccatttgctcattgtattggatgtttctatatctggagttgtgctgttagagtattaaagttctacactttacgatgtaatagtttgtagattcctctattcatattttttgagtttaggtaattaactttatggatcatcttaagtcctcatggttggggagtatgtactaacaactaaagtcaagactaggcaaaatgaatcaaacaagtaaagcgtgtggctgcctgtagcttactgacaaataaaaacgaatcaagttggcaccatagtaacacaagagaagctgtcattctccttttattccatatgattatgtgttatttcacagtttatgatggtaacagaacacttgagggagggggaactgctgaagcgtgtttcatcaagatccaagcagcacatgagctattgattcatgatgaaaggagaagggcatatgatagagaggatcatgtgaacccaatgaagattaccaccgtatcatgattcatcaactctaacatgcgtgagccaacactatgcttctccacttcaggacatggatatgactcttctatgtttaagccactacaacttggtgtatttatgccaaagattttttgagcactaacacaccaaaccagcgcctatgaagtgcttttgaacttcagacatgatgtaaagatgaaccggagcatcaagcagcagctgggtgcctcttcactgatagtagatctctaatatagtgatgtatgttctatactttgaggttagcttttcccctctggtcccctttgttggagaaactgttgtacttcagttaagagataagttttcagagtaatttctcctaatcagtttagtagaggtttcaggttcactaacctgagcagtgatcaggcttttagcttatttatttatgttgtgcaacgctggaatggtttcgaatgcaaaattgtcgctgctgttgccgcattgccgtcttaactcgcaggggctgcatgctgatatcggtgtttgaacggaaagaggactcacaacaagaaatgaatgaacgatgttccat

SEQ ID NO: 37182 - DNA, 3939 bp, Zea Mays
ctcttcgttagggtttcgcgcctcttctcaccgtctgcctactactagggatagacctccggcaaggcctccctcgcgccggcggcgtcagcagcggatatgggtgttccggcgttctaccgatggctggcggagaagtacccgatggtggtggtggacgtggtggaggaggagcccgtagagatcgagggcgtcaaggtgcccgtcgacacctccaagcccaaccccaacagcctcgagttcgacaacctctacctcgatatgaacggaatcatacacccctgcttccacccggaggacaggccctccccaacaacatttggtgaggttttccagtgcatgtttgattatatcgacagactattcgtcatggttcgcccccggaggcttttgtacatggccattgatggtgttgctcctcgtgctaagatgaaccagcagcgctcaagacgattcagggctgcaaaagatgcagctgatgcggctgcagaagaagaacggttacgtgaagagtttgaaagggaaggcagaaagcttcctccaaagcagcaatcacaaacatgtgattcaaatgttattactccagggactgaatttatggctgttttatcagttgctttgcagtattacatccatcgtagattgaattatgatcctggatggaaacaaattaaagttattttgtctgatgccaatgttcctggtgaaggggaacataaaatcatgtcatatattcgtggccaacggaatctgtctggttttaacccaaatacgcgccattgcctgtatggcctggacgcagatctgatcatgctagctttggcgacacatgaagtacacttctcaatactgagagagtttatacacctggacagcaggataaatgcttcttgtgtggtcaggtgggacatctagcagcaaactgtgaaggaaaggtgaaaagaaaagctggggagtttgatgagaagggtggtgctattgttcccaagaagccctatcagttcttgaatatatggaccctgcgggaatatttagaatacgagttcagaatgccaaacccacctttcaagattgattttgaacgcattgttgatgatttcatcttcatgtgcttctttgttggcaacgattttcttccacatatgccgacgctagagatccgtgagggagctattaatttgctaatggcagtgtacaagaaggaatttccctcaatgggtggatatttaactgattcttgcacgcctgatctgagcagagttgagcacttcattcaagcagttggttcatatgaggacaaaatatttcagaaaagagcacgtttgcatcagcgtcaagcggaaaggataaaacgggaaaaagctcaagcaaagcggggtgatgatctggatccccatgttagggatgaccttattgtacctattcaacgttttcaagggtctcgcctagcctctggggctgtacctgtgccatatgagcagaatggatcccataaagacaataaagaaaggaatagtcgagctcggaaagctgcacgagtatcaacgtcaggttccagcattgcctcagccttagttgaagctgaaaatgacctcgaagcccaagaatgtgaaaacaaagaagaactgaagtcaatgcttaaagatgcacttcgcgagaaatctgatatttttaattctgacaatccagaggaggataaggtgaaacttggagaaccaggatggagggaaaggtactatgaagagaaatttggggcaagaacacccgagcagattgaagaaatacgcagagatgttgttctcaaatacacagaaggattgtgttgggtaatgcactactattatgaaggggtatgctcatggcaatggttctacccttatcattatgctccgtttgcttcggatctaagtggattgggccaacttaatattaaatttgaacttgggacaccattcaaaccttttgatcaacttatgggtgttttcccagctgcaagtgcccatgcgctaccgctacagtatcgacgattgatgaccgatccaaattcaccaataattgatttttatcctacagattttgaagtagatatgaatgggaagagatattcttggcaagggattgcaaaactaccgtttattgatgaagatcgtttgttggctgagataaaaaaagttgagcatactttgacgcctgaagaagcaaggagaaacagtatcatgtgtgatatgctttttgtgaatgggtcacatccactttcgccttatatctactctctcaacagcaaatttgggcatctgcctgacaaaaggagaaatgaaattaaagaaaaacttgatccttctgctagtggaggaatgaatggatacataacactttgcagtggggatccatgccctcctatctttaggtctcctgtggacgggctggaggatattatggacaatcaagtgatatgttcaatctacaatcttccagaccatcataagcacatagcccagccgccagttggtgttatcatgcccaagaagattgttgaagccggtgatctgaaaccacctccagtgctgtggcatgaagatagtggcaggcggcctcatgataatagcaacaggcaaaacccatctggtgccatatcaggccgtcaacttggagaggcagctcaccgacttgtcataaacagcttaaatgctcagggtagggggcaacatagtggcacatcaatgccatatcgaactataatgaatggcttgcatcatctggatgtagcgtcccctgtcagcaatcaaggcatgcgtccacaagtggggcagtctgccggacctcctggttggtatgttcctaggggtagtgtatcaaatggtcaaccaccagcttatgcatcatcaggatcaggtcattatcagtatgaaagttcggggcattcacaatatgaacaaggtaaccatggaaggcaacaatctcacccatatgcaagagatggcttccatgatacacgaggaagggttccacctgcatatgggtaccagcagagcaacatgtatccatcgggtcctggattgtatgggcaacctccatcagcatatcctggggttcatggtggaggctaccaaccccctccatatggcggaggccagcagtggcagcaacaatcatatagttcgtatgccgtgcgaggcccctacggaggcaggccaccacccacaagggctgattcagggtcacagcaaccacagaaccgttatggtgctttagacagaagtaacaaccggaggccttcatctggatacagaagataatagtttgtgacccagtttatgttataactcaaagtttgttatcagtaaagcttcgagtaactcagctaaagcataggcggaatagtctgctaagtcttgtgaccttcaagcagttagggggtggccatcaaagatattgggaggcaaaatttgtatgctagtgcagactttcaggtactagcggttttgatcgccattgaagcagctaggtttgcggcatctcagaggttttgtgaagcaagatttgtatactactgttatcaacgggccatcaggtactggtggctggtcgccattctttatctgtagctgccatttgtttagaagatgtcataaacggccctggggtttaaataggtcccattgagaatatttttgaaggacgtttactctgagacttgacaagttttgggggcattttgatatcagataaatgtatgcaggagtgcagttttgatgatgtgtgtattccaagtcattaattaaagtgtgacgtgtctattgccaggcgaggaaggaaacgttacgctttgcacttatcccgttccaaattacaagtgatttcaagaaaaaaaattcagctttcttggagagtcctaaattactacctccattctcaaatattatttgttgttcgctaatt

SEQ ID NO: 37183 - DNA, 2957 bp, Zea Mays
cacattgctattgtgtattgcaaaattttggaggctttgactaaaaaagcttcgttttttcgagcttgctcctcccccgaaaaaaaaatcggggcccaaaaagttcgcaattctgggggctcccgtggccgcaggtccgcccgaattagcgcgcctctcggagatgatcctgcgccggcaaaggcaatgaagatctctaatctggatgcacacttaatcttgtccagctcttgatcagttgatcttgtgctttgctgctcctgctcaagttaatttgttggccaatcaagttcagaggcgcagatgagtgaggagtacaatatggatgatgccctaaaagccaaaaatgttgctgagaccaagttccatgcccgtgacatcaggggtgctcggaagtacgcactcaaggcccagaatctctgcccgacacttgaaggcatattgcagatggtctcaacgcttgaagttcatcttgcagctgagtccaagattgatggagagagtgactggtatcggatattgtctctaggcgcctttgcagatgaagaggaggtgaagaagcaatacaggaagctagctctgctgctgcaccctgacaagaacaaatcagttggtgctgaggaggccttcaaactgatctctgaggcgtggagtgtgttgtcagatactagcaggaaggtggtttatgatgagaagagaagaaatcattctgttgtcaatgtaaccaatggtatctatacttatgataagaaggcaaacaagagggctcgaaagaatgccgctgctgcagctgctgccgccgccgctgctgcagccgcagctgagactaccactcatcctgttggggttgatacattctggacatcttgcaaccgctgccggatgcagtatgagtacctaagaatttatcttaatcataacctgctgtgcccaaattgccataatgcattcttggcagtggagactgggttcccatgcaacggaagcagttcatcattctcctggtcaaccaagcagcagccacagcagaaccacaattcaaccaagcattcatatggctcaacaagcaggacttctagcatccctgggacagggcatggggggtaccagcaagataatgcttatgattcctacaacaatcaaggcttccagtggaatcagtactccaagacaacacctgcagctggtaccaatgcttatggtacacatgccttggagaaacagagaaagaagcatgatgagagctacagctacaactattctgaaagcggcaacttatatgtccatgagaaagctgcttcaaggcgtggtcgcttctcaaagcggagaaggcataattacgatacttacactactgtggattttggtggcgataacaaagaaacagttgccgcaagcacagaaccaactgctgttttcactgatgtgggacgggtcaacggtacttcagcggaaaggtttagatctgcagtgagtggaagaagagcaaatgttcttggtgagattacccagattgatacacgaagtctacttcttgagaaagccaaggcaactgtccgcaaaaaattgcaggagttaaacattacatcatcttcacgatttgcagagagaagaggatctgaaggaaagctaaatccttgtggcaacaacataaaggtcaatggtgtcctctctgacaaacctggcaagggagtcaagctatgtagctcaagaagcatagaaatccaagtgcctgatactgatgacaagaatccagagcagcgccgtgtacctgtgtcaattgacgtcccagaccccgacttccatgatttcgataaagatcgaacagagaaggcatttgacagtgatcaagtgtgggctacatatgacagcgaagatggcatgcctcgcctatatgtaatggttcagaaagttctttcgatgaggcctttccggatccgcatgagctttctcaactcaaagtcaaatatcgaactggcacctataagctgggttgcctccggtttccagaagacatgtggcgatttcagggttgggagatatcaggtcagcgaaacggtcaacatattttcacacagagtgagctggactaaaggtccccgaggcgtcatcaggattgttccccagaaaggggatacatgggccttgtaccgcaactggtctcctgattggaatgagcttacacccgatgatgtgatatacaagtatgagatagtagaagtcgttgatgatttcaccgaggagcaagggctgaccgtcatcccgttgctgaaggttgccggattcaaagctgtcttccacagacacatggatcccaaggaggtcaggaggataccgaaggaagggctgttccagttctcacatcgagttccttctcgtcttctgaccggtgaagaaggcaacaacgccccgaaaggttgccatgagctggaccccgccgcaactccagtggaccttcttaaggttatcacggagctcaaggaagatgcggtgggcgcagactgctaaataggagaagggggcaactctgaacactgaagataggtagctggatgtctggacgatcagatcccacttggttaatgacacggtgcaagcacatgatggcatttctaacatttgatttcatctctacacgaactgattaaatggccattgggaggagactgcacacggcatcatcggtgaggaggttagtcgacgggaggttgtttacttgtttgtgttgccgctctgtaatgtactgtaggaggcaagtctgagtcgagggacaagagctgcaaggcttggcttgcccgtgtaccccgcatttgtgtaccctgtttttttacttgtgatgttgtatttccttcggttttatagtaattcatcgccatgatgttgaacctgataaattgtagactctgaactctggtaaccatgtcggaaaatctagcggctttatctaaaaaaagaaa

SEQ ID NO: 37184 - DNA, 1685 bp, Zea Mays
gagcggtctcattctgctctgctgctgcaactgcaagcgcggaatctgttcgatgatggcgcggggcgccgtgctgctcctgctcgcggccgccttcgccgcggcgctcctgccggacgccgcggaatcccgcatcctcctcacgctccacgacttcggcgccgtcggcgacggcgtcgcggacgacaccaaggccttggccggcgcgtggacggccgcgtgcgccgccgcggacgacgtcatcctcaacgtgcccgccggcgggacattccggatctggccgctcacgctcgccggaccctgcaggagcgagatcaagctgctcatttccggggacatcgtcgcgccggaaagcccccaggactgggggcaaggccagagcgaccagtggctccacttccacaaggttcgggacctcacggtcaccggcgggggcatcatcgacggcagagggcagcagtggtgggcgcagtcgcttgcgcgcgcgcagcccgctcccaaggctgttcacttcgaggactgccaggggatcagcgtgaagggcatcaccttgcagaacagccagtcgtaccacctgacgttcacccggagctccgacgtcgaggccaattacctcagggtgacctcgccggagcacagcgtcgacaccaagggcattcacctcgttgactcgtacaatgttcacgtcatggataacctcatctccacaggttcagcagacgagtttggttttcagaaaacaatctcgcaacaatgtgatgactgcgtctccatagtgggcaactgcacggatgtccgtctaagagccatctcatgcggacctggccatggtatcagcatcggaaccttaggagtaaacagctccgtcgattacgtggagaagatcaaagtcgacaccttgttcatctcaaacgccgagaacggcgtgcgcgtgaggaccaccgagaacggcggcggcggcggcttcgctcgcaaggtgaagttcgagagcatcgtcatgaggaacgtcaccaaccccatcatcgtcgaccaggggatctcctctgacgatccgccaccttcatcgcctgaagcagtagcactggccgcgacggcgtcggcggcagtgcaggtggagaagatcaactacatcgacatcacgggcacgtcggcgtcggagcgcgcggtcacgttctcgtgcagcgacgcccggccgtgcaggcgcctgtcgctcgacaacgtgaacctgacccaggtggacgggagcgaggcgtcgtcctactgccgccaggcgttcgggaggagcgtcggcaccgttgtcccggagtcctgcctctccaaggaggacttcgtccaccacgtcccgccgcagcgttctgaggaagacggagaagactcagaatcgtgaatctgtggcggttcctgcttggctctggccagattagttttgtcaagggatctctgatactactagttgcttcggatttttgttggaactataggtgttgttggggcttttcccctaggcctagtcctctagtgcagtgcagatctgtctgtgtgaactgaagaaccatgttgctgcccaactttggtttccagtattcctaaacgtttccagcctttctgtgactaatgacgctaaacaccatttctatgtatgattcagattcttttgatatatagggcatatatacacgttcaga

SEQ ID NO: 37185 - DNA, 1021 bp, Zea Mays
ccttccagttcccacgaaaaaggaaaaaagaaaactcaagagcccaggcttatctagaaacctcgctaaccctcgaggcctcgagtagctatgaagcagcgaggcgacgacggtgccgacggcgcagctgctttcgccggctgcctggattgcaggtcctccgaccattgctttttgcggtaaagagaccctttccatactatccttcgcttttcgattgtgtcgatgttgtagctttcgtgccggcagggaggcaacgccgccgccgccgccgacagtgacgacgctgctgccgccttcggtttctaactccttcgatcatcgcttttctgaggtacaaacttagttccatggcttccgatgacactgctgaaatgtgaatgttctgtttcgacgacgttgccaagaaaattgttgggaaatcatacaactctcctatcatcagttacagggacttcaactatcctactagatttaacattgatcgtatctcttaaattcacatttgtagttgtgtacaaccaaatatcatttgtggatttagagaaagaactcttcatgaagtcattcatagcatcatatggaagaaatgtcattgccatcacccagatgaaacattccactatctgtcaactccaacaaaactattgtctagaccaaaacaatcattctccaaatgatagtcctggagatgaaggccaggacctaccgtcgtttgagtcaccataaaaaagaagcaacattcgattggttggttggctaacggacccagcgcattgtccaaagctcaaccgcagcatggcgggaggcagctcatgcacatcagccagtcaccgatcgagcatcggcttgcggtaccggatagagcaagtgatacatttggcggatagatagccagcttttgtctaatactatagtttacaatgttgtatctaaacactatttatcaaaaccatggtatgtttggagctaccaaaactacggtattatcatagcaattgcaaagtataatattataaaa

SEQ ID NO: 37186 - DNA, 3128 bp, Zea Mays
caatcacccacccccaataaaagcgcccacaccctcctgcacctcccttcctcaacctccgccatcaccgacgctgactcccacaccggccgccgcgcgagccccggcaccatctccgcacgaaatgggggatgcgtgtttctcaacacagctaattgatggagatggggtcttcaacgtctctggattggagaacttcatgaaggatgccagattgggtgaatgcgggctctcctatgctgttgtatcaataatgggcccgcaaagtagtgggaaaagtacacttttgaatcatctttttggcaccaattttagggagatggacgccttcagaggaaggtcacagactaccaaaggtatatggttagcgaaggcccagaatattgaaccgtgcacccttgtaatggatttggaaggaactgatggaagggagaggggagaggatgacacagcatttgagaagcaaagtgcattgtttgctttggccgtttcagacattgtgttgattaatatgtggtgtcatgacattggtagagaacaggctgcaaacaagcctcttttgaagactgttttccaggtcatgatgaggttgttcagtcctcgtaaaacaacattgttgtttgtcattcgtgacaaatcaaggacacccctagaaaatcttgaaccaattttaagggaagacattcagaagatatgggatgctgttccaaaaccccatgcccataaagaaactccacttagcgaatttttcgatgtacaagttgtggcactgtccagttatgaagaaaaagaagagttgttcaaacagcaggtttctgatttaagagataggtttcagtattctatcgctcctggtggacttgctggggatcgtcgtggtgtcgtcccagcttcaggattctcgtttagttcccagcaattttggaaagtcattaaggagaacaaagaccttgatctgcctgctcataaagttatggttgctactgtacgttgtgaggaaattggtaatgagaaagtcggcagttttacatctgatgaggaatggcaacaattagaggaggctgttcaacatgactttgttcctggatttgggaagaagatcagcagccttcttgatagatgtttatcagagtatgacatggaggctatttattttgatgaaggtgtcagaagctctaaacggcaacagcttgagtctaaactcctacagcttgtcaatcctgcctatcaatctcttctaggtcacttgcgtactagaactttagaagcatttaatgagtcctttgacaaggctctagaaaaggagggatttgctgcagccgctcgcaattgtactcaaactttcttggagaagtttgataaaggatctgaagatgctgctattcaacaagtgaattgggacacctcaaaagtgaaggataagcttagacgtgacattgaggctcatgtagcttcagttcgagctgctaaattatctgaactttgtgccaaatatgaggcacaacttaccaaagctctggcggaaccagttgaatctcttctagattcagccagtgaagatacgtggccagctattagaaagcttcttcaacgcgagacaaaaactgccgtttcaggtcttcaatctgctgtgtcagcttttgaacttgatgaagcaactgagaaagaactgcttgtgaagctggagaagcatggaaggagtgttgttgagtcaaaggcaaaagaagaagctggaagggttttgattcgcatgaaggacaggttttcaatgctgttcagccgagatgctgactctatgcccagggtgtggacaggaaaggaggacataaaagctataactaaaaccgctcgctcagcttccatgaagttgctttctacaatggctgcaattcggttggaggaggatggtgataacattgagaacactctttccgttgctcttgttgacacctcaaaacctgggactactgataggagtatccaattgaccgatccacttgcctccagttcatgggaaagggttggcgaggagaagactttaattacccctgtgcagtgcaaaaatttgtggaggcaattcaaggctgaaactgaatatacagtgactcaagccttagctgctcaggaagcaaataagaggaacaacaactggctaccacctccatgggcacttgctgcaatggctattcttggattcaacgagttcatgacattactgaggaacccgctttacctgtttgccatatttgtgatttatctcgttggaaaagccatttgggtgcaatcagaaatcggcagggaattccaacacggatttcttcctgccatcctttcactgtcgacgaagtttgtgcccactgtaatgaacatcctgaagagattagccgacgagggtcaagcacctgcagccgccccagagaggcagagagagatggagctccaaccaaaacccaccaggaacggttcttcatacaccaacgcgacgtcggcggggtcatccagcgtaaccacttcggagatcggacctgagtattcgagcccggtggcgcaatgatttagctgacctttagcctttggctggaagcccactctagcgcagttgagggaaacagggtgcctctcgagaacataggaacttaggaagattttaaggacagtcaggtgccttgcagttttttctaagcctgcccttcccccaaactgatgcaaggtggtgatggggtggcactgcccatcactattatttaaggatttttgggggctgggggggttgtttgtaagagcattgtagaatgatttcgtttaatttttttggtttctgtaacatgaatacatgatatgtgatggttgtatagaagatctggggggcgtagtagtgcccattctacacagcttatactgggcagggggttgcatagttgccagaagcttgtacatgtctttaaaccgccatcggattgcgatggagtagtattactggtgttctggaataacacggaggaacgtgttgtgacttggcaggccgttggtaactggctgttctcattcggtagttttgacgcgtgcctcgaaccgattcatatttgagccccatctggcgcagattggcagcgtttttaagaggcaga

SEQ ID NO: 37187 - DNA, 4840 bp, Zea Mays
atgaaaaaacgcaacgaaaccaacgaagcacaaataataggattttcaaaaaggaaaaagattagcaggaggactggaggagcgcctccgcacgggcacgggccggcagcccggcacgaagcggaaaacttgaaaactagccgagcgaactgccgtctcaattcaaaatcccgtcaactctcacccccatatccctccccgtcttccttccccccatttctcccacagacttcggcctcccgaatctcgaaccctaacctcatcggcgacgaggggagccccgcctccgcctcctgcttctctgttatgaacaacttccatgtctacgaggccattggccgcggcaagcactcgacggtgtataaggggcggaagaagaagaccatcgagtacttcgctgttaagagcgttgacaagtcgcagcgctccaaggtcctcaacgaggttcgaatgctccattccttagaccatgccaatgtcctgaaattttactcttggtatgagacctccgcacatttctggttagtgttggagtattgcgttggtggagacctgaagggcttgcttgaacaggataagaagcttcctgaaaattctatacatgacctggcttacaatcttgtcaaagctcttcagttcttgcattcccaaggaattatatattgcgatctgaagccatcaaatattctgcttgatgaatttggatgcatgaagctttgtgattttggattagcaaggcgcttaaaagacatcgagaaaactaatcctggagatgtgccacaacccatgaggggaacaccatgctatatggctcctgagttatttcgagaggcaggagtccactcatatgcttctgatttctgggcacttgggtgtgttttgtatgaatgctatacaggaaggcccccttttgtaggcagagaatttacacagttggtcaaatctataattttggatcctacaccgcctttatctgataattcatcaaggtccttccaaaatctgattgattgtttactcatgaaagatccagcagaaagattacagtggtctgaattgtgtgaccacaacttctggaaaaccagtatcccaatgatttctttacctcctcagcctgcttttgacaacatgattgaactttctgctacaccatatctagctgagagaaatggtgacaaaccttccagacagctgacaccacccaagcaccgtgaatatagtggccttcggaggaaggatgaaaattctactaagccatccatgacacctgttaaaaatgtgcaaagtgtcaagaaaaattgtggaaaaccaaaagctgagggtttcaaaggtgtaaatatcctcagaatgtctcgcattgctaaattgaatttgcaaagggaaagggacaaggagaactacaggcgtcctcccacagaaacaactgagaatgagactgaagttaatatagataataatgacatggaacttgattttggtgaaaatccagaggctgatgcacctgatgacacatatggatcggataatcctggatctgcaggaaatgaaaagcctcaaagcactgatgctaatgaagagaattgtatggcaaatcaggttgatatgcttacagatgagggttcagttaagcctgatatcatggtgaaaactgagcagaattcttgttcagataacctggatgtggaggctactccacctagtagcacgcgaaaagcacaacgtgcaaaggtaactccatgtcctggaactggttctgagccatctaacatctttgaagcattctggcatccaacagatcttgcagttaaaccagttatgcctagtaggaaagcagataaagctgtggacatggtccccacacttccttttgaagcacttacagcaagtgattatattaagttaccactggaacagatgaatgcattcaacagtcagatacttcagagtttaagtggaacctatcaggtttcagaaaaacaaaatactatcagatacctggagatgttaagcatgaattcagatgctgcgaacaaaataactaatggaccaattatgctgctactaataaaaatgcttcgactgtcaaaaacttcagtcttgcgtgtccaaattgcctcacttatggggttgctgatacgatattccactgctcttgatgtggagctggcaagttcaggaatttttaatgcactatcagatgggttaagggataaacatgataaactcaggcgattctgtatggcaacactaggagagttattattctatatttctacccagtctgatcaagataccaaggaaataaatacccaagaataccctttgaaggataacaggtctgcaacatcttggcaggttcctagtgctgtaattgcactggtgtcatctatcttgcgaaagggagaagatgatctagctcagctatatgccttacggacagtcgataatatatgtagccaaggaactgaatggacatcccgttttgcatctcaggatgcgattggacatctgtgctacatctataaagcaactggaaagcaggagagtacgaggctcattgcaggatcttgtttggcccgtctctctcgcttcagtccatcatgcattcatttaatattggaaaagatatcattcaaggatatagcatgcacacttatcaagggaaatacacgtgaacagcagattagtcttaatattctcaattcggcattagttaatagtcacactgtgacaagcatgaaccggtatattctttcattatcagatgacaaacaattggtccccgggctcatttctctaatagaacagggaactgatgttctacgtgggaagacccttttgtttgttgctctgctttgcaagaatagtcgaaggtggcttcctcatttcttttgcaatgcaaaattaatctcagctgttgatagactgggaaaagagaaggagggttttattcatcaatgtacagaagcatttgtgcagttggttgcttccttggtccctggtattcttgacactgtctccagtgatatacaacaggttatggttggcaaacgccatggacctgttactgctttagctgggcgagctcatccaaagagcacaattcatctgttccctgttattcttcatcttctgggaagtgcatccttcaagcatagagttgtgacaggccatgtattgcttcagttggcaaatcttattaagattttggaggcaccgtttcaggctagggatgatttccaaatgacattgttgcgagttcttgaggctgctacagaggagccttctgttatacttaatgaacacacagtattcatgagtcgtatcattccaagcttatctgtcttatacaagggcaataaagatggtgatgccagatttctttgtttgaagatactcgcagatgttatgattgtgatcttcagtgattcttcattaacttctgacgaacaaacaataactgatctgaaatcaatctctcagaggcattttctaccactgtacccttcttttgcagaggatgaagatcccatacccatatatgcacaaaaactgctagtaatgctaatggaacatggttgtgtaaaagtctctgatattctgcacaaagcaacagtatcccagtgctttgaatttttgctaggagatctttcaaatgcaaatgtaagcaatgtcaagctttgctttgccctggtatctgcacctgagatggacacctatattctttctcagcttcaagttgttagaagaatagggaacctactcgagtttgttgctgcaaaagacatggacgattttcttgaaccaaccctggaactttgcagagcttttattattcgtggcactggcagcaacagaagtgtcgccctctccaaaaacccggcacttcttcttgacagtgccttcagcatgagtattgctgttgatcaacaaacttgtgtcatggatatatgtgacttcggtggcaacatgggtatttttcttgagctagttggcaattcagatccgcagataagtgatttagcatcagattgtgtagtgttgttgctcaaggcagcacctcgagaggctacagtgggcttgttgacaagtcttcctaaattaagcactgtcatggacttgctgaagcatgacagccaccgatgtctgattcgcttattatatggcctagccttctcatgcagacaatacttagcccagggaatgatcctgtcaatatcagtgccagctttgatgcgagttgaagcacttgtttcagttttcaagggctccaatgatagccttcttgctgatgctgcttcttatttgagcgccgaactgcagcgcttacctcgctgtggttgaaggtgcaacttggccaaggaggcaggttggctgctattgttcaaggatgcgcatgtattccttcatccttcgtgcaccatgtacatgatgagctgagcaagtgagcaggacgtcatcaagtgaagatgtgcagggtgcgagggtgttttatgctatcatttatgtgcatttcggggctgctgtatatggcgcttttgaacaataccttgaaggtggctagaagcaaaagaacacttcgttcccccgccaattttggttggcaattacctcagtttcatgtaattctgtagtacctgtaattttattgagaatactgtagtccaatttcatgtgtacatttataaattcctgtgaagttccatgtagctgttaaagagttccccatagctcctgaatctttggtactattgtgtatttttttttactttttacaatagtgataacgtggcccatttcgaagcattttcctatcttattttgcgcaaattcgtggtaa

SEQ ID NO: 37188 - DNA, 2075 bp, Zea Mays
ttgctagttcgcggtcggaagaagccatagccatccaggaagaagaagccatagcaaaagcagctgaggggggattagagaagaacagcagcgcatcagatagggagaattgaagctgatcttttgtatcatatatctttcctgcatgcttcatcagtccgacacttgagagaggttcgagagagaagttattaagctgcctccacactggtagcaagtgattgcatgcatgggggataggacatggcagcagccacatgcgcaggcttcttccccagacgcagggaccaaggtccaagcttcatcatcgtccgtccatggcaacatcattgcagcagaaaggagccagctggaggcggcggatacgacgacatggccgagttcgatcaagcgctcttcctctatcttaacagcagccaggatcaagcatcagttattcaagatcaacctcaaactctcaacatcttcccttctgaaccaatgcatgtcgtcgagcctgctgcaccaaaggaatctatgggggctacgactaacaacacggcgtggaacaacgccggcgcaggcccatccaagcagccgccatccaaccttccgtcgaggacgacggcgactccggcagggccgcgaaaggacggcagcaaaccgccggcagccgtcaagagagaagggagcagcagcggtggcgccatgggaagcggcacaccgtcgacgtcgaaccaacaggagggccccaccaggacctcagacgccaagacgctgagaaggctcgcgcagaacagggaggcggcacggaaaagcaggctcagaaagaaggcgtacattcagaacctagagacaagcagggttaggctggcccatctggaacaagaggtacacagatcaagaactcagggagcagtatttggtggtggaggtctatctggttccaatggcggactgctaagcccaggcacatgcatgcattcaaattaaccctagctgaactgctcgcatgcatgcaatggcgtacttgtacatgcatgcatgctagctagctctcctctttgttatatctcctgcatgcattccgcgcttacacacgtttgctccaagttaagttaagttgatgaatattgcgtccatgcatatgcatggtcgagcagaggcggcatggttcgacatggagcacgcgaggtggcaggaggagcacggcaaggtgatgcgccacctgcgggcggcgctggaggcggagtacgccgcgacggcgacgacgccagcggcggcggcggcggacgcgcagctccggcagctggtggacgcggcggcggcgcaccacggtgcgctggcggagctgaaggccgtggcggcgagcgccgacgcgttccacctcgtgtccggggcgtgggtgtccgccgccgagcgctgcttcctctggatcggcggcttccgcccttcagagctcatcaagatagcggcccggcacgcggagcccctgacggagcagcaggcgatgagcgtctgcggtgtgcagcagtgggcgagggacgcggaggcggcgttggaccacgagctgcaagcgatgcacagctccgtgtcggaggccatctcctccgacgcggcggcgctgctctacccctactccgacgtgcccggcttcatggccaccatgtccctcgccatcagcaagctcgcctccctcgaagccttcgtcagacaagtaagcaaagcttgggtgtgtcgtgtgtgtgtttctcatgaaacgatacgagtaacaatagtcgccgcgtacatgggttacattgcaggcggacgcgcttaggctgcagacgctgcaccggctgccgcagatcctgacggcgcggcagtcagcgcggtgcttcctcgccatcgccgactactcccaccgcctccgcgcgctcagcgaactctggcacacccggcaaggacatgagcgagcggcgagcacccaggcggccaggcccagccagacaccgccctaccaaagtagagacggtttactatagacgttacaaagtagagatagtttcaaagatacagatagaggtgatcactgatcaggaattctgatgacccat

SEQ ID NO: 37189 - DNA, 393 bp, Zea Mays
ctttaattgaatccccaaatatatacatccatcgtttcagatttatcggtagcgaaggacagtaataacgactattatgacctatagaaaaactgttgaaaggtagataaagaaagcaacttttattctaaagcaaatttaagaactctttggacattcggtatctatcgaggttcaggcacgcaagaaaatcgaaattattgatggcataacgagggagggtaccaataaggaaaggaaaaaaattactggaacggaaaaagaatacaggaacgtatgtaggacaccttggagaaccagggctcgtcgaacagctccgccgcggcccctccaaatccggggaacgctgcctaatcgtaaccgtcctcctcctcctctagagaagaggagccg

SEQ ID NO: 37190 - DNA, 450 bp, Zea Mays
gaaggcactagccgaagccacgctccccggaacgaacgacgcagcccaacccgttcccaccaaaccagcggcaccacccatggcttcggcggcggcgagatccggtctccggtcgctggcggtgcgcgccggcccgttgaggcgccgcatgtcctcctccgtccacgacgacgcctatgagacggccaagtgggagaagatcacctacgccgggatcgtgacctgcaccctcctggcggcgtacaacctgtccaagggccaccccccacttcgatgagccgccggcgtacccctatctgcacatccgcaacaaggagttcccatggggattatcgtcttggttaactaattgtatgcatctgtctgatagctctacaaataatattaagggtgcacattggtatcttatatttttcccttattcttggttgttttgttttgcacaaatat

SEQ ID NO: 37191 - DNA, 317 bp, Zea Mays
atcgaatatgattgtacctaaatataatgatcgagtagtacgcatgatggagtaacgatggtcaatcttttcccgtgactagcagtttggaaccctggtccggactggaattaatattaattgcctctccaaatccaacaaggcatgcaaaaaaaagtgtatcgcatgtggaaaaacctaggttaaaacaaatacgacctcgtcgacgacaggtttagtggctgctgctggtgcgtattattggttcggcgactgggacgtacgcgtcgtggggttgaatcggagtcattagagcatcatatatatgccaattaaaa

SEQ ID NO: 37192 - DNA, 1984 bp, Zea Mays
aagtcccaaccgaacctaaaccaaaagcaggcgagagtctagaccgcagcggaaggggagcaggcggcggccccgattgcggtaatggagctgtcgatgagtggcagctccctgcgaacgttcggccggtgcgtgaccttcctcgcgcgcgttgcctccgagctcgtgctccaggcgcaccccgccaagctggagatgcacacgcttaacagctcgcggtcggcgtacgcttcgatctccctagcgcgcgacttcttcgaccagtatcacctcgacgccgcggcttcggcaccgtcttccacgccgctgcagtgcagcgtcctcctcaagtccctgctcgccgtcctccgcacgccgcacgccgcgctcgaccgactcgccgtatccctcccagaacccgacgcacccaagctccagatcaccctccactgcctcaatggtgtgaggaagacgtactggatcgtgtgcagcgcagagcccgaggtgcagtcgctgtcgctagaccggggacggttcccgagccgcctagccattcggccgcgggagctggcgcggctgttgtccaacttccagtcctcgctgcaggagctcacaatcatcgctacagatcctgcttcagggttacctgatgctagcggtgacgtcgggggcaaggctgttgagctccggagctacaatgacccgacaaaagatgactgtgacactagactgcacacacaactgtggatcgaccctgccgaggagttcgtggagtttgttcatgctggtgatccggtggatgtcacctttggggtaaaagaactgaaggcttttttaacattttgtgaaggatgtgaggttgacatcctcctattctttgagaagactggcgaacctgttcttttggtcccgagattcggattggatgatggagcagcttctgattttgaagctactctagttctggctactatgactgtatcacaattatctgacagcgatgatgcccaacaaccagctacatcagcacaaaacgcgggagaaccaggggctgctgcaccaacactagttcctgaaaatgtctcgaaccatactaaaatatggtcggagctttcaggtagtactcccaaaagcattgaagctaacagagaaaatcatgcccagaagaagagaaacgcaagcactaatatgctgaacgacatgtcaatgctgcccaatgttacaaatgctccaagcaagccaccagttgcagataatgcaaacaatataatgcagcctttgcaaatggatcacatggaagaacgtcctggttaattatcaaacaaaatcatccattacattattgtcattagttactgatacgtctctacattgactaatgtttagctaacttgcttttttatgacgttgcagaaggtatcagtggtattcctcgatcacaacaccacccgagcaactgggtcggtgctgatgataacgacgatgacaatgaagacgacgaggagcttttagtccagacaacaccctactatatggactgaggataaatgctgattctaaaatatcggctgccgccagccaagcagccggtgttcctgcagcagcgtgactgaacaatgtggttctttcactttatctggccttggaagacggtgaaaagaaaccgagatctggcatggaaactgcttcctttaataatagaggttttgcgtcttccgagcaccctgcaccggcggtcatgctggttcaggcgtgcagctcgcctggctatcattggaatctgttgtcccgctgctagtccgatgtgaattactgtatgttagtctttcatttgcgttcatgaactcatctagccatgtcatgacttacaactgatcagggtgttttaaattttccgctgcttgccctggatgttctaaagcaaatgttttttcaagagcttttggagagctgtttcttctgtgtggcactgatttgtgcataaaaaggatgcagctatttcgtc

SEQ ID NO: 37193 - DNA, 465 bp, Zea Mays
cagctgctctcaacctctcgatttggtgggaggagcagtggagcatacgacttagcagactacaggccagacggccaacgacgcggcgcggagcagccgcttccagcacgaccacgacgcttgcccgggtgctagcgcagtccctctggccagtgacggtctcgactaggtgtgactttggcgtagccccgtctcccggcgaggctccgacgcgaacgcttccggcgtaggcgtggcctgaagcgaacacagcacatcgatgacgatgacaagttcttggcgcatggatcacaacgcgcacacattggcagatcaagaatagtatattcaatttaaacataccgcataattgcgtagaggaaatcgaagcctgtcgcataggacagttcggctagatcgaagacctgccggcttgacggagagttgatgcagatctgatctcgcagtaacgtcgaggtagagcgt

SEQ ID NO: 37194 - DNA, 3782 bp, Zea Mays
caacattctgttccattctagtagtaggcttttccttgttttatatcgatgcgtaaaccgaggaacacaaacacgcctcgcttcccccgccgtttccgcgaccgcggcgttgactcgctccgccccatctccactgccagaccggcccctcccgccccgtcccgcgcgtcagtgacggtagcgcggcgagcccaataggagagaaaagcgcgccagcggcagtgtcccttccggctccggctgagactgcggcgcgggcggtgcggctggaccagttaggattcggactcggtccgcgctgcggcctgtgtcacctgtgtccgggcggctcgcagtctggttgggctcggatggtcggtgccggacgccgggcgcggaaccctaaccctaggggccggctacattagatgctggggggcggcgccggaggcggtggcgcgggcgcgggcttgggactggacctttcggcggtgatccaagcggcggtcgtcgggctcgtgctcttctccgcggccgtcgttgccgtgcgccgcgccgcctcgcgctacttcgtcgtcgacgccgcggggttcgccgcctcctacgacgatcaccaccacagctcgcccgcctccccgatgtcgtccaaggggaaccggccggagcaggggggcgccgcagcggacctcacggggccctgcgccgcgtgcggtgtcgtcacctccaagaagtgctccgggtgcaagcgcgtgcggtactgttcccaagaatgccagacaaagcattggcaaattgatcacaaattcaagtgcaaacaaatgaaatcattggatcttgccgacaagttatcctgtggaggtgaggccaacagtaagaaaacatcaggtttcggtcgcatctcattggtgcctgcctgtaaaaagataagcaagggtcaggtcctctttccttatgatgagttcttaaagttgtacaactggaaagaccttgatgttgtaccttgtgggcttatgaactgtggcaacagttgctttgctaatgtggttttacaatgtctctcatgcacgagaccacttgtggcctatctgttaggaaaggaccatagcagggaatgttctgtgaggcatgaagattggtgttttttgtgtgagctacaatgtcatattcagagagctagtggaagtttgcacccatttgctcctacaaacattctttctcatctgccaaatattggtggcaatcttggcgttggtaggcaagaggatgctcatgaattcatgaggtttgcaattgataagatgcaatctgcttgccttgatgaatatggaggtgagaaggctgtagatcttagcatccaagagacaaccattattcagcacatatttggtgggcggctgcaatcacaggttcaatgcaccacatgtggaatggtctcaaaccgctatgataatatgatggatttgactgttgaaattcaaggtgatgctgaatcattggaacggtgcttggatcagttcactgctgttgagtggcttgatggggataataagtacaaatgcgatggatgcaacgactatgtgaaagcacggaagcacctttcagttcagcaagctccaaatatacttactatcactctcaaaagattccagtcgttcatctggatatgctgaacgcatcattctttggacattatatatgctatatcaaaggttatcaaggaaggtggtataaaattgatgactgcaaggttatggttgttgatgaggaggaagtacatgctcaaggcgcttatatgcttttatatagcaggagaacagctcgtcctaggtcacttcttacagttgatgagtccgtgaaacagcaacaacagtgcaaatcgctcctttccaatgggcaaagccacatgatactagcagatacaacattgaactgtgaatcatctttgaagattccagaagatatgttacaacaggattgtgaatccaataatgaatccttgcatgaaatgggtattaaggaccaggagtcagacatggatctacgtacaagcattgaagatgacaaattcattagcaatggaaatctacgtttaccaggttcactagtatcacatgttcttgaagatactagagctccagattctgtattagaaggctctgtgcaacttggccctcctttagaaggtggtcctactacgatgagctctgtgcagtttggcaactgcacaagtgaagcatcttcggaacattcctttgcagagcaatgtgaggtgcctgcctcatgtattgattcagttgactatatggatgttgatactgaagctggtgcagaagttgagagatgcgacgaacaaagacctgtcttaaatgattcagttggaaggccgaataataacacagcaaccccaactgcgaatggggtgccaggagaacccaaaccatcattttcctctggtttttttgataagccctcaagaaaaagatcttcctttacagaagaggctagtgccggttctcctcgaaagttaaatggctattgcaatggacatatcagcagtctagagcaagaagttctttgcaactctggaagtgaaaagtgcaatggagatgcacccgttacatccagtaatggcaaattctgtgcagctaatgttgatatgcaatctatcgatgattcgttgcatgaagacaagcgagatgtgccttctgtttctcatggctttgagccaagaccttacaagctacaatcagacagcaacaacaattgcggtaggacatgcaatgggaaacctaaagcttgccaaggggacatgtcatttttacctcggggcttccttggaaggcctagttctagaggaatttcagtcaaagcagatgatagcttgccatttagcactgacgcatcatcatcctttgggaatggaaacagtaagtcaagtaacaactcatcttctatgggtggcttgtctcctggtttccttacaagacaccgcagggaatccacagtcataggcacaagctctgacattccaatggataaaaaatctaatggcgccacagtagtgccagatcatgcagaaaaaaaggtttcagattgtacgacgaatggctcttcattccaaataagagcagcctccgaccaccttgattgaaatggccttgcaattttgaccacaaaaaacaacagctgtggacaagaaaatgacagtaatggagccccaggcatgagttatgatgggtctgaacatgatggactgagccgacgaataacctcaatttttttagctggatggtattgatgcccaataaaagcatgactgcattgttatagaatagaggccatttcgagcacacaagtgagaactgagagcctgtgtgatcatgtcatggctggtatataaactgatgaagggctgtgagctacgaagtaaatgctatgcaattagggcaagcattgtttgcttgatagaaatttttcctctttcgccacgtggctccctcatatcagatgggtagaggggtatctgggtttccacacaatttgcagaaacccagatgctcccctaatgccacgctattttgttggcattagcgttaggtacatagctgagcgtaggcctactaccgtccccttaattcatagcttaaataaactggaactgctgactcctccggtgtcctgaaagctgaatcaattgcagagtgataagaggaaattctcatggctttcacctttatattttacattcctttgcctcgcatgatatattttgctggtgtttactgtgcgatgatggatgaaac

SEQ ID NO: 37195 - DNA, 2439 bp, Zea Mays
cgttcaggcgcttctcttgccttgccgtaacggcttttaactatttcctcctctcctcccgatccagctagcctggcctcccacctcccctcccctctcttgaactgaatcccccactccgtcctccagttcgatcgcgttcgcggccccccactccgtgttccggaataagtagccggcggtttcctcaccccaggttttgcagttgctggggagtgggaaattcgtccggctccggtttggccaatgctcctgcggtttcttggagaggccgctgaagcagcagcccttgcctgagggattctccttttctcgggcggagagttcggttgcggcggaaaaaaaaaagaattctttcgtcggattggcccaagttcttggttgatccgttacaaagcccccactgtacgctgtgttagcctttttccacgcgtttctttccttactctagatccgtgtccccgcccgattatttgggggaataggcagcccatcgatcgggggaagagggatttggaggcctgacctccgatggaggtgcacgccgacgtcgatgggtccggtgtgcccctggccgtgctcctcaagcgggagctgtgcaaccagaaggtggagaggccggacattctgttcggggaggccaacaagagcaagaaaggggaggacttcacgctcctcttgcccaggtgccaccgcaccacaggcgaaggcggcggcagtggcggcggcgagaatgcaggcggcggcgacgacgacgacaccatttccgtgtttgcgatttttgatggacacaatggctctttagctgccatatacacacgggagaatctaataaacaatgtgctggctgctattcctccaaatctcacaagtgaggagtggacagctgcgttgccaagggcactagttgctggttttgtaaaaacggataaagacttccaaacaaaaggagcatacagcatttgctgtttaccatggatagaggatgattttagcctcctatatatcatggagtcctcagactgtttcactgtgatgtaaactgactataatgttttcagctgcacgttcagggaccactgtgacttttgttataatagatggatgggttgtcactgtagcatcagttggcgattcacgatgtattctagaatctgctgaaggttcagtatattttttatcagcagatcatcgcctggatgctaatgaagaggaggtggagcgtgttacagcaagtggtggtgaagttgggagaataaatattgctgggggtgctgggattggtccgctcagatgctggccaggcggattgtgtctatcaaggtcaataggtgacattgacgtcggggaatttatagttcctgtcccacatgtgaagcaagtaaagttgtccaatgctggtgggcggcttgtcattgccagtgatggtgtgtgggatgcgctgtgttttcaagaggctctgaactacatcaggggtctaccagccgaagctgctgctaatcgaattgttaaggaagctgtcacttcaaagggattaagagatgatactacttgcatagtagttgacatactacctccagaaaagttaagccccccactaaagcgacctggaaaaggagtcatcaaaactctgttccgtcggaggccctcggatgaaatgtctgaagatcagatggacagaggatgtttagaacctgatgtcgtggaggaaatatacgaggagggctctgcaatgcttgctcgaaggttgaatataaattacccatcgggaaatatgttcaagctgcatgattgtgctgtctgccaattggagatgaaacctggtgagggcacctctgttcacggtaacatgcccaagcattcaagagttgacccctggggtggtccttttctctgttcctcctgtcaattgaaaaaggaggccatggaagggaagctacattcaagaacagagtgacactgcgcgccctcttgcatatcgaatttaagctatggcagccattgttttctgctgcaaggatgagttcattacttttttggccaaggcagcaagattctcaatacgggagtcatttgtatagacgttcctaatttcctactcatctttcccatgaaagagcccatacagatacagtcttccaccacgatttgaagccagttgcagtacatgtgggttgctttttactaagatgcatgaagtttagaataatgtacgtagatgctaatgcatagacatggcatggtattcttagcatcattttgctaaggggtgttttgaatgcagagtaaatacttagagcatatccaagaggcactttatttttgtctctctgtttaactctctatttaatttttcataatgattacactctatatgtagcatttcacttcaacatactatctatttagttttgctagtcagatgactagccaaattta

SEQ ID NO: 37196 - DNA, 2618 bp, Zea Mays
cagtcgtcttgtccccctcgccgcctccgtgctcgtcttgctccttctcggctccccaccccgccacctcgtcccaccccgccccttgggttgagttgagctactcaaccgtcagtcaattcctgcacctggcgttgggcgggttttcatgggggcagcataaaagcctcttcggttcttcccctagctctgcctcgcggcaagtccccctccgctacgttcgccatggctcgcaacagggaacatgcaatgagcttgcaaaggacattgggggctataagcatgtgacggtcatacatgatattaaagttgtagatgaaggaacggcacaggctctgcaaaaccttccattaggatctgcccctggtgattttctggattctattgttgttggcttggatatggtgattaggaaatttggtattaccaaagggaagcggcggctctgtctaatcactggtgcacaagaactgttaagagatccgcctgaggggaccaaagaagatcaggtggacaccattgcaaacatgttgaaaaaacacaatatcaagatggagtgcattattttcagagaaccgggagtgcatcataatgatgtaatggaagaaaatgaccgactattgcatcagttcagaaatagatcagtagcaaaggtagttcaggttgacaacccaacatcactgttgggtgctctcaagacaagaaatgtgctcccagttaccgttttcaggggagatctggaagtgaactccaattttaaaataaaggtgtgggtttataagaaaacagctgaggaaaaattccccactttgaagaagtattcggacaaagctcctccaaatgataaatttgcttctcatgaagtcaaagttgattatgagtacaagagtgttgttgagccagacaaagttgttccaccagaccaaaggattaaggggtatctctatggtcctcaagttattcctgtatcaaatgctgaatgggaggcagtcaagttcaagccagagaaaggtgtgaagcttctaggatttacagatagatccagcgtaccacggcaccaatttatgaaagatgtatgcctgtttatacctgagccaggtaacatgaaagcaagtcttgcagtttctgcgatagcaagagcaatgcatcaaatgaacaaggttgctatagtgcgatgtgtgtggaggcaaggtcaagggaatgttgctattggtgtattgacgccaaacatttcatcagtgaacaatatccaagattcattttacttcaatgtgctcccatttgctgaggacatcagagagtttcagtttcggtccttcagcagcctgccatcatcatctcagcccactgaagaacaacaagaagctgcagataacctagtgaagatgttagacctagcaccacctggaagagaggtcctcaagcctgagtttacgccaaatcccatcttggagagattttacagttaccttgatctcaagtcaaagcagccagatgcaaatgtcccaccgcttgaaagatctctaaggaggataaccgaacctgatcctgatgtggttggccaacaaacacaattaatccagaatttaagcaaagcttttgtgctgaaggataaccccaagaaaaagaaagcacgaacacaggacatgttggcatatactggtgcaggtgatcaagctaaatctgtagaggacagagttctggaaaatacacatccttcaacagagaatgttgtggcaatcagagattcaaatccagttcaagattttgaggccatgctggctaagagatctagctcaacatggactcagaaggctattggagatatgcagaattacatagcagctttgttacagaactccagtgatgggggcaactatcaaaaagcacttgaatgttttgcttctctgcggaaggcctgtattattgaacaggaaccacaggaattcaaccagttcctaacgaagatttacgagagattgaaggaaggtgatgctgccaagttctttcaacttctctcctcaaaaaacatttcacttatcaacaaagaggaagcgcctgacagtgatgtgactgaagagatggcaagaagtttctacctgaaacgagaaaaggcgtctcagtaggagctggaagaagccggtaactcgaagcgccttgggtttggagggtatctgcatgttttgaaactgggtatctgggtggaactggaactaatactcaaactctctgggttgagtcactgttttgctgcacaatctgctgcctactacgtttcgactagattcagctttgggtactactgtatgttgtttgactggagtagcatgtccatagatcacatacttctgcagtgttcattggagtgaatgcatgcatgcggtgaaatgcagcatggataggtctaggaagaaacattaccatcatttcctaatgttggagcgctgcctagaaaaggatctttttctgtaagtggtctggtgcgtcaaaccctccaaagtccaaaataatcctttctacataacaagtccgatgtgtcattggactgtacgatgagccaggttcggtacaccatggtacaacagactaattctaaacttgggcttcttttctttgtc

SEQ ID NO: 37197 - DNA, 2842 bp, Zea Mays
cccgtccccgcccttttccttctcttctcccactctcactatacccatttctcgagatctcggcgaaaccctagtgaaacccccgccgtgggggcaccaagacgccgcaatgctgcacgagctcctcctcgcgctgctcggcttcaccggcgacttcgtcctcgacgtctctctgccgcggcgccgcgccgcctcccaggacgccggcgaggatggaaacggagacggtgaggtgggcccctccttccgcctcgcgccggacctcaccttcctccagccatcagagaggactgctattgagaggctcatatctctgggattttactacagagaactgaatcgctttgcaaccgagtcccgcgacctgagctggattcagtcttctatagatgtttcatcacctcattctgataatacccagaaggggaaagtgagaaaagggagtgtgtacaggagggcaattgccaatggtatcactgagattctgtcagtatacagatcagctgttctgcaggttgagcaaaaccttttatcagatccgttgcctatcctcgcgacagtaactcacgggttgaacaagtttgaagtccttctgcctccactgtatgagcttgttatggaaatccagcataaagacatcaagggtggccagcttcttaatcttttgcacaaacggtgccattgtggggttccagaactgcaaagctgcattcagaggctactttggcatggacaccaggtcatgttcaaccagctgacatcttggatggtttatgggattcttcaagatcagtacagcgagtttttcattagaaggcaagatgacagggatgtggagaatgaatcatctcagcgtgatgtttctgataagttaaagcagaaattagctaaagacacatccctggctagttggcatacgggatttcatgtatcattggacatgttgcctgagtatatccacatgcgaattgcagagtccattctcttcgctggcaaagcaataagggtgcttcgaaatccaagtcctagtgctacattgcaggatcctgtaatcagaactgtaggatctcatggaatgcaaagctctgtaggaggttctggtgtaccaaaagaactggcaaacttctctaacatcagagcagaagaactactgccacaagcagaagctgataaaattgattctatgctcaaggagctaaagcattcttctgaatttcacaaacgaccttttgagtctgctgtcggctcaatacgtacaattgcagctaatcatctctggcagctagtggtggtacgtgctgatctcaacggtcatttgaaggcattgaaagattattttcttttagcaaaaggtgactttttccagtgttttcttgaggaaagccgccaattaatgcggttaccacctcgtcaatctacagccgaagcagatctcatgattccatttcagctggctgcactgaagactatcggtgaggaagacaagtactttaccagagtctcattaaggatgctatcatatggtatgaaaagtagcacgtctcagaaagatctccaaaagcctaatgcttcagagcttccttcacaaggaaaagctgcatcagaattgacacttgatgggtgggatagtattgctctggaatattctattgactggcctctgcagctcttcttcactcctgatgttctgtccaagtatcgcaaggtttttcagtatctcatccgattgaagaggacacaaatggaacttgagaaatcctgggcagctgtaatgcataaagaccatgctgatttttctgattattgcaaggatcggaaaaataactctgcaacacaactgcgtcgacaacggtctaagcctttgtggcgagtaagggagcatatggcattcttgatcagaaacctacaattttacatccaggttgatgtaattgagtcacagtggaatgttttacaatctcacgtgcaagattcacatgattttacagagctagtgagctttcatcaagagtaagcaacaaatatttgtcagcgctggtttcccaatccttcttggacatcggatcagtctctaggatactggatagcataatgaagctttgcttgcagttctgctggagcatagagcaatatgaaactcggccaaatatttctgagattgatcacataactgaggagttcaacaagaagtccaattcgctgtacactatcttgaggagtagtcgcctcgcgggtagtcagagagcacctttcctgaggcaatttctgatgaggctaaattttaactctttctttgagaccaccgcaaggggagtgatgaattcaggaaggctgcgaccaatcactgcaggtgctcagctgtaacggtgatggtatgtttgggggtagtgctgcagcaagagacaagggaggagtttctgtagtttatgtaaattatgatcggatggtggttgtctgtcatggaaaaatcgattgcaggtgattcatgcttgtgccgttggtattgtgtttttctgtgcttccgtttgttaatgctatccagttcctgtggcctgaactgtaccttcgcaaattatacgctcgttcaccgtggggatctggctgacagatagtgaactgctgccactctttttttttttactaaggccgctgccacttctgagctgtgagatgccatgtctatcaataataacggtaaggagtattctaaaagattttgagctgtgggcagatgaatgtttaggacatatggattggaggggattgaagattaaatcctctcctatttaattttaactagtaaaggattttatccatttaaaagcctttagattagatggat

SEQ ID NO: 37198 - DNA, 3077 bp, Zea Mays
ctggcttaattcatactccctgtaccgagtactgtgagcgacagcatcagcccagccatcaggtgtgccagtgcagtggtctgggccggaggagagcagcagcccactggattgcaggaagccgaatgcattgggccgggcctccatcacaacgtctcatctctaagcgcgcttgtctgtgctccaaatacacacacaaaaaagggaagtatcagtttctctgttcaaaaaagaagaaaaagaaaataaaaggaagaaaactcgagttgccgccgtcaaccaaacaagtcggagaagcagccctcgcaaaaccctcccctcgatggccggtgtgccaccgccgccgcggcagctcgatgtgcggcgcttcgcggccgcccgcgccagcgaactccgctccctctacgcagccgtatcgtcccgactcgacgacgccggcggccggcatcagccccgttcggcgcgccgccgcaccacagggcacctacccagcaagcgccgccgccggggagccggagaggtgggccccggggatgacgatggcctcccggcgcggaaacagtccaggagggtgaggcggcggcgggagctcgctgccaaccccgcggaggggttctcggtcgccggcgacggtgcgcggcggctgcgcacgcacctgtggtatgcgaaaaggttctccatggagaggcggtggacattcatcttgcccgtcggcgcccaggggaggggtaagggctcaaggagtgttctcaagcgtctgaaaaatgggacaactatccatgatgctggctacttcattccaatagagctggatggtccagaggacgccctgttatccgttctcagaatggttctgcgcccatcgcctgcagaaaaaacacccgatttgaagcatctacaggatcaagttatgcgaggtgtttgctatgagaatgctatgctttgggatgttaggagtatgcattctcaaattgttggaccagtaacatatatgtggcgtccattctcaagagcagatgacaaatctgggattgaaggagatcagtgtacttctcactgcattcacgatgaaagcggcaattcctcacgacgccagttgtggatatggattcatcctgctgcacttgatgatggaattagtgcaatacaatttgcatgtgagagacagattcaagattctggtggtgtggtcaaatgttgttcattagagggaaaaattggaagattggaagtcaatggatgcaaggctatgcaatctcttaagaagattttgcatccaaccagttcaagtaagatcaacacgatatcaacaagtgatatctccgcatcaactgatactctcctggattcctgtattgcccctcatcttttgaaagcttctgtcattagtaatgctgagattcttcaacctggtgctatactatccatgagcgaagtttgggagaaagatgtagccccaaatgctaatgaggcgtcatcagaagttgcaaatatattgccattgatgtggatgcaccctgggaaacatgatatactcctttctgactgtagggaactgtgggactccaggcaaaccataaatcctcctgtgtcagatgaggttctctgtaaggagaagcactctgaacgtataaagtttttctgcttggattcaggaaatgatcaagagcaaacaacacaagagaaggacaacttcattcgatcctgcccggttattcttttgaaacatgccagagaaggaataccttctctagggtggtccatcattctacctttgagttgggtgaaacctttctggctctttctagtatctcatggtgcccatgcaattggcttaagagagagacggtggattgcagcaaagttgagaatgccatgctttccttatgattatccagatagcaaagcgtatgcatcatacatgtccaaagaagctgctggttttgataaagtagttgagcgccgccctgttgccaagagaccaccaagagttcctgtgcctcctttatggcactgtatcatgacttgttttcgtaaagattatgatggcatattgggtgttcttgaagtagacgacttggtgcgggctaacatggtattacctaaaaactcttctgcacattgcgaatctggagacgcagaaccatcgcaagcaaatgttgcatccttgcaacttcatgtgccaagaaccacccaaatgttgagacagtatgtggaagaatttgataggaagtatctgagctcatcatctgacatgaaagtggattctgatgaacccaacctagcttctgataacactgtcggcatgacacggttcgcgagtgaattatgccttacaagggttctgatccgagctttcaaggaaggttcttttgaagagggtgcagttgtttgtgccccattacctgcagaactttcagcttggaaaatcagatcaaaggaagaagaggaagaatgcgtagaaaaatgggagctccagcttcctcagtcccatgttagttcctatttctcgtggtttgatcccagcacgagcagcctccagttgcctacggatggcgtcgcacgggaggcgttcaggtggccgataggctttgtcaccagtggtttcatccatggaagtaacgggcaagacgcagtggcggtcgcattctgcgaggcaaagcttctggcagcgttgaggcgacagcaatggacgcatggaaacttgcagagccgggaggtgtgcgtccttgtcaggaacgcgagatcggctgcctaccgacgagcgctggccaccaccgtcctggagcatcaggaatcagacctagcgtttctgtagtctagtcgggaacctgttgacgttgattttttctctctctctcccttttggagttccatccatcctccactcatccgttgatgaacctaagtaatttactggtgattacagtttatttgtgcgatgcaaaatcattaaacagaagaagtaaatgcatctatctcatttgacggatttcaatgatttactgttacatagtatgaataataataaagcagctcgtccggaaaaatgaatgagtagctgttgtttgaaggcc

SEQ ID NO: 37199 - DNA, 1243 bp, Zea Mays
gatttaatcggtcaaaactgatagtattaacttagataaatctaatatgactaaattacgtgaacgtaagacggaaggagtaggaaaaaaaaacgttggtggctttttgtgccgcatcgtacaaacacagaagtaggacaagcagttggggagccgtcgtccgggactccgggctcgcctaaaaagccaccaattgatgagagttgaccaccgttcgtttccactccgcccgccttctcagaatccgatggcccaccttccctcctctccggcggccgctgtacccaccggccaccgcgtctcgccctcgcctcattcttgccgttccctcccgcagctgaagaccgtactgttgtcgataggagccgccgcgggtccccctaggcggtcatggaggggaatggaatcggtggccgcggctcccacgggctcggataacgccgtcatgaaaagcgtgaattacttgcccaatgcactcaccaaggtggaaggagaagagaatggtgcatttactggcatttggctagacgatgagggcttcgttgcagagggttcgaacatgaatgttggcttcgtgacaaagaacaaggagcttctcatgcctcgttttgacaagatcctgagtgggtgcacagcaagacgggttctgaccctcgctgagcatctagtagctcatggaaagctcagcagggtaatatcaaggaatgtgagtgttgaggaagggaagatggccgatgagatgatgctcatcggtagtggcattcttgtcaaacctgttgttcagtgggatgataagataattggttctggacaagaaggcccgatagctcaagcgctttatgaccttattctcgaggacatgagatctggtccgccgtctgttcgtatccccatcccttactaaaactgtttggagttgtgcaaatgattacaagggtgaacactgatttgttggttgtcagagtttggtcaaaacgagaggttggacgaactcatagaagagaacaagtcggcaacagccgaaattgtcaaagagattgatatcttaatttgatgtacaataggacttaagggcctacaaacatttgtgaaaatatttgtaatatataactcgggaatatgttgcaatgatgtttaccgtttgttggttttgcatgcactgactatatgcccctccgatccacatgcatctaaacatgcccttagattgactttcattgggacttgttaagcacaagcgaca

SEQ ID NO: 37200 - DNA, 2123 bp, Zea Mays
gttgtgtggtttgcgagcgcagagcagttcgtggacgtggagccaggtggtctgctgcccgaagaagccacactacgctccacgcatcgcgtagacggcgtagttggctcgcgggaccccggagtcagcatcgcgccgctctctcccgaagctcgcgcgtctcctcggcgcccggagcgagcctgaggcgcgcggacaaacgatgtcctcgccggcggcggcgacgctgcacccttcccccaccttccttgcctccggccctcgctaccgccgccgcggacatccatcttcgaaggtcagcttccgaaggttggcgccacgattaaaggtcaatgcactttttggatggcctaggggggacacgacagcacgtgaactgatccctcctgctgaatcctatacgctctcagggtcagcctcagaggtaggtgcaaaaccacgtgaggtgtctatatctgttgcttcttcaatcatggacattcctgctgcggattgggatgcctgtgcgtgtgatttagatgatcctggaaattttaaccctttccttacttatgcattcctctcaagcttagaagaatcaggttctgcggtcaaggaaactggctggttaccttttcatattgttgcacgggatgagaatggacatattatagccattctaggggagagtttgtgtttgatcaatcatgggcagaagcttactacaactatggccttgaatactatccaaagctccagtcttgtgtgccttttactccagtaactggtcaaagaatattacttcgaaatacatcataccgtgatcaagtttttgacgcactagtcaaaggtttgatgagcctcactaccaagatgaatgtgtcatcattacatattacgtttccgtccgaaggtgaattcagtaaactgaaggatagtgggttgttacaaagaatcgggttgcaatatcactggagaaatcggaattacaagagttttgatgagtttctgatggatttgaagcagcctaaacggaagaatatcagacaagaacgtaaaaagattcctgcccaaaatttgcaaatgaagcgacttcgtggagacgaaataaagagcagacactgggacaccttctataaattctaccgtaacacaactgataatcagtttggtttcgcattcttcttaccttgtattttttatttattctacacctaacgttatcccatgttgttcttgaaatggttgttgatctactgtcggcattcatacatatcatgatgcagcaccattcttgttgactaactctcaacatgaattctgttgttcatttcttcttatttaacatagtttccctagttggggcagaccatacttgacaagggatttctttcacctcttgggagaaaagatgggggataatgtgatgcttatagttgctgaaaaagatgataaactagttgctggcgctcttaaccttattggaggtgatacactatttggccggttatggggatgcctgccagatgcttactttcccaatttgcattttgaagcttgctattatcaggcaattgaagcagccatagagttaaacctgagtaaggtggaggcaggtgctcagggagagcacaagatccagcgtggttacctcccagtgacaacttacagctgccactacttttcaaatcctggttttgcggcagctattggaaattatcttactcatgagacggctcaggttaagcatgctattaaggtccttcgtgattccggaccatacaaggaagacatactgaaagagttcgctgctcaacaagacgacgacctgtagaatacagaagggacttaaactatttgcatactgttttatagaactaacatcttctatgtagcaacagggatacaggtcgtccaaagtgttaccaaactacgaatcccacatttggacactgctaggactgtaaatatttaacattgtaacatcagtcttacggcgttgagttgggagctatagctatactcagttgtctcgctcttacttttccccaacagaaggacttgatgcttcctgtatattgcgctttgactttgattagatttataggaaaaaaattacataaatatctgcagctgtcattcag

SEQ ID NO: 37201 - DNA, 149 bp, Zea Mays
tgcaactatggagggggggcaccgacgatgcgcggggattgatgtggggcgccgacgacgaacgggcgcgacagatgtggatcctcatcggatgcgccgatggaaggggatcgatacagagcgtggatgggggcacgacgcgtggatgg

SEQ ID NO: 37202 - DNA, 155 bp, Zea Mays
tactcaatgacagggaataggatgcaaagcaaacggtagcaaccaccactatatttacttgcctttaccggaagttcggtcaaatccctaagtacgatccggaagtccaccacctgtttttttgacacacaacttagtgcaccaatttcacataa

SEQ ID NO: 37203 - DNA, 1309 bp, Zea Mays
tccttaggagactctcaatcatctctgttcgagcctctctgaacattaagcgtggtggagagagggatttctacatgtgctctctatcttctagggtgtggaatggatccagtttgtcccagttcggaaatcggaatggtgaacacatatgagatgagcttcccggatatgtattatcaagaaaataagaagaaaagaaacagatggctactttgagggcgacagtgggcatgctgctcggcgtcgaggacatgcacaggttcccggtgcgctccccgtggatggaccgcggcgacctcatccgcagtcccgccgcgcgatagatcgtgtccaactacttcaggtacccagagcacacgccgccattattggcacccctgctccgctcgttccattttgtttccactagccgtccaataatgttgccccgccatcgatggaccgagcagcatgttcgggccggtgcaggacgtgcgcatcccgtatcagcagaagcgcatgttcggcttcgtcaccttcgtgtacgctgagacggtgaaggtcatcctgagcaagggcaacccgcactttgtgtgcgacgctcgcgtgctcgtcaagccctacaaggagaagggcaaggtccccggtaggtttaggaagctgcagcacacgcaccatggcggagccgagttcgtcggttgcgcgtcgcccactggattgctggattccagggacccctacgccctcctgcttctttcaggtgcccagaatttctccaggttttctcctgggcatgaagccattgggctatgatgtgtgaggtgcacagagcaaaaaagggggagggcccccctccattcctctaatctgggagggactactaatatggctacatgatggccggtcccatcaaccgagcatagagaagctttgataaagaaaaaagaaatacctttggagaggtgtaatcttcttcagagtgggagaaggaggggacagtgaagacaacaacagagaagaaacaagtccagtttgttttttagctcttaggcctatgataagtatatgatagtaagtgagtgagtagtaggcataaataatagtagtagtagttaattagtagtcgtttattagtagctgctgccagtgtcaagaaggtgatgaaaaggcacactccagctctctcctatgctcgtttgtggcatggatggatctctcactgttgctatgatatgttgttttatttataatatcgtgtgtataaatatttcatgtttttcactttgtttgatttgcggtaccacatatataacgatttcatgtgttttcc

SEQ ID NO: 37204 - DNA, 2640 bp, Zea Mays
gccaaactagcccttacatgttggattttccccttggatgcaaagttgctgttgagctgcatggttcagtttttagcacacttctcaatactctttatggatttattatgaggatttattatgaactgatagatgtaaacttctctttggaagtcttcaagttgatacatttaaggaattcctgaatttatggaggcaaaatttttattgccaacatctctgacttttatgtacctaacaattttctgttttagcgcattgcacaacgtattcggcaagatggtgggactgcagatgcatctcttcgtcgtgagatccaaactgaatcggttcagctaggaatttcgatgcaacatttgggtgctatgttctttgagcttggtcggacgatgatgatgcttcgcacagggcaatctccttctgaggcttttgtaaattctgggcctgctgtttatataaactccacaggaccaaacccaatcatggttcagccatcttttcaaaacacccctccttttggtgtatctaatataccagttctgggtggaatttctggtgcttttggtattgttgatccttctcgacatatgaatatcccaagtaacggtgcatctgcaacaagtggttcagctgctggtactaccaccggttctgaaggagctatccacgggaaccgccaagatgcggcaagaactcaaggaggtaacccaccaggtttcctggctgcaacacgtggattgccaaccagaacagttgttgctgctgttccagcacggtcctcagcagtgggcaatggagctcaaggaaattcaacatctgctattccacaagcttctgttggtggtgtttctggtgttcctcttatagcggcacaggtagccaatgcattggcaaatgcaccaagccaggtttctttatctacacaaagtgcagcagatcagggatttcacctgactacagacaacagagctgatgttctgagttcatcaacaccagccactacaccacagaatggtccctcaggtacttccggttccagtttgccatctcaagacaggaatactttaaatgttcccagtcttgatagtatacaacagcatccacaattgggagatacttgtgcagatacagctgacttatcaggagacgccacagccatcagtactcatgatgctccttcgaacccatcagttgacagttctgtgctgaagaacaaatcctcggatgaagtaggttcacagaccactgagccttctgcaagtggcagtgctgaaccattaggtcttggtggaggtctgattccaattccaaagaggcggagcaaagcagtaaagccatctgggagcacaactgatcctagtagggatttgtcctcagtcagccaaaaccaagatcctatttcagtagcccagcagtttctggaaggttttgcttcccgaaatactaatggtagcagaagcaacaccctctcctctggtcctccatcttctgtgccacaggctactgaagttcctccgagaagacagggtggtggacaacctgatattggcagcatgatatctggtatgctcaacaacccagttttcagcaacatgttgtcgaatgtggcaacacaggcagggggctctagtgctgatttgaagagcgtgatggaaggattacaaagccctgctattgtagatacgataagcaatatcgtgcagaatgtggatgagcaagacctgggggccatgtttggttcaggcagaggacaaggtggcatggatttgtcaaggatgttgcagcaaatgatgcccgttgtatcccaggctcttggtggtgcaggggggcgttctgctggtgcaaatggtggacagcataggtcgcggcctcagcgcattgacggtgaaggaaatgcaccagccagcagttctcagattgatctccatgaagctcgtcaaagcattgaacagcatgaatccccagagaatatcttccgcgctgtccttgaaactgctgctcaggcccatggtgaagataacagcattcagggcatggtcgaagaacttgccactgatcaagagcttgccgatgactacatgaaacttttgatggaacaagttcggcagaggatacagtcagagtcgcagtcggggagccagccttgaaggattgggcggcagggtcgtgtagccagccattcgctctgcgatatttatctatgggaaagaacagaaccaaagctgttgtctgggcgtttttcatgattaggtgcccggtgtacatgtggcgttgtaattttccgagataatgtatctgcagcagcatatctcgtactctggttagaactgtttttttttacgaattttgctagaggtacatacaacgagttttaaaggtggtgacgtctgaatttcgtggaattgacaatgacatgtctgtatgattggtgtcgcaactctccagttcggaaatttgttagcacaggttgtccttgttcctggcatgtgtttcaccttttagccattaaataccattttggttcatgtaaggtagtaaccttgtgcactgggtccggttataaatgattccttaagggctcatttgagatcaaaggtaatgaagaggaataagggatcaaaattccgtactatttaaaat

SEQ ID NO: 37205 - DNA, 4270 bp, Zea Mays
aacgtgaaaaatccacaaaaatccaaccaacaagctcgtctgccccccccactccacctcttttttttcgatgacatgccgtgtataacctcaatttctgttcgcgtataatcgtcggatatctccctctcctcaaaatactcacaacccagagatctcacacccacgaccaccacgagggaaaaaaaacaacaacagaggagagagactagagagagagagagagagagaggagcgttggagtttggaagcagttcctgcgacctgcggccggagccccggggcatattcctcgcccggagatcccgtacccgaccctcccctgataaacagacgcaagcgtcagggagggagggagggacagagagaggtagagagggccggggcgaagggggcaaagatgcgttcttgaggagcctgtgcaggggaggtccaatccagaggccgccattccttttcttttccccccaacctctgcaggctcttcagatccagcaatccggcttgtttcttttgctgatactgtgtgtgttcctgaaacttcatggagacttccatatctccaccaggcacatcaaagcagtcagctgtccgcaaaccttctcctggaagctctcttaaggatctgtgccttgtttccaaacaagggtcaatagctgaagtagaatctgctttggccttgttgaaaaaaagtggtgggaacattgatggtagaaatgcatttggtcttagtgccctccaccttgcaacatggagaaatcatctacccattgtgaggcgactcctagatgctggcgctgatccagatgcaagggatggagaatctggctggagtagcctgcatagagcacttcattttggtcacctatgtattgctggtgttcttttacagtttggtgcttccctcgctttggaggacactaagggccgtacacctgttgaccttatctcctgtccagtatcacaggccaatggagattttccagatgcagtggacagacaactgctgtgattacccctcgccaggtgacagtaggattaggccgtaaacgagttaatgctgtggctgcagccaaacatcatactgtgattgctacagagctgggggaattgtttacctggggatcaaatagagagggtcagcttgggtacccttctgttgatacccaaccaacaccaaggcgtgttggttcgctcaagcaaaggataatttcagtagctgctgcaaacaagcactccgctgcagttgctgatactggcgaagtattcacctggggttgcaataaggagggccaactaggatatggcacttcaaactcagcatcaaactgtatcccaagaatggtggagtacttgaaaggaaaagtacttagaggtgtttctgcagcaaagtatcatacaatagtgttaggagctgatggagaggtgttcacttggggccatcgccttgtcaccccacggcgtgtcgtagtagctcgatgccttaagaagggtggaaatacaaatctgaagtttcatcgtatggaacgacttcaagtgatttcagtggctgctggaacaacgcacaatactgctttaacagctgatggtgctcttttctactgggtttcatcagatcctgatctaaaatgccagcagatattttcaatgtgtggaaggaatattgtgaacatctcggctggaaagtactggaccgctgtggctacatcaactggtgatgttttcatgtgggatgcaaagaaacgtaaggacgaaacgccaattttcactcgggtgcatggtgttaagcgagcaacatttgtttgtgttggtgaaacgcacatgcttgtgctctcaagtatataccatcctgagtatccacccaagcctaaaagccaaggcttaaaatccatgttagaatggaacggtggaacagaagagctgggtgaagatatcctgtttgatgatgttcagcccaacagtggtttatcaggaagcagtggtgaaatgagcaaaggtgtgcctagcttgaaaagcctctgtgagaaggttgcagttgagtatttattggagccaaaaaactcaatacagcttcttgaaattgctgattccttggaagctaaggagctcaagaagcattgtgaggatttagctattcgcaacctcgattacattttcacagtgggagcttcttcaattatgaatgcttcttctgaaattcttgtgaacttagagaaattgctagatgagaaatcctcagagccttggagtcagcaccgtcttcccacaatgacagctacctatcctgctgtcattgacagtgatgtagaggaagatgaagcaagagaattccccaagacccgtaaatgtgggaaatctgcatcaaggccatctgcgatgtctagtgatgacagcttccttcagaaagactgcaccgctgaacaagccgtctctaagcagatcagagcacttcgcaagaagctgcaacagattgagattctcgaggctaaacaacttgcaggtcatcagcttgacagtcagcaggtagcgaagctcgagtctagggctgcccttgaaggtgaacttgctgaacttggcattccctcagagatatactcaacttcctctgcttgtccagcagaaggtaggacaaacagaaaacctgaggtttctaagaaacagaagagaaagaacaagcagtcaacacagaccccgtcagtgaaaaatgagcctgggcaacaaatccccattacggaacttcaagttctacaagtcaatgtctctgctgaaaaggaggcgtatgccgctgatccaattaaacctatggaggctgccgcgttcagcaacacaaaggacaccgcttctccaccggagaagaaaccttcccaaccaactccatcaaagaagaagaacagaaaaggcggcctgtcgctgttcctgagcggcgctctcgacgacaccccaaaaccaagcctccctgcccccgctgtgcctgccacaccgaagcccgaaggacccgcctggggcggcgtgaagataaccaagggacccgcttcgcttcgagacatccagaccgagcagagcagaacaaacgagcccgcgtcggccaaggcgaaggaccgccacgagaactcgccggacagcgccggccgcgcgacaaggctctcctcgttcatccccgacgcgcgttccagcccagtagccgtcgtggcgcctgctcgcgcagcggcggcgccttcttccgaaggtgacaggagcacgccgccgtggtcgtcctctgccacctcgcccaacgtgtcgcagccttcgctcagggacatacaacagatgcagcagaggcaccatggcggcgtctcccacagcccgaaaacccagacatcgggcttctgtataccgccccacggcggagcgccagaggccgctggcggtggcggcgtgaaggacaacgtgcccaaccggtggttcaggccggagaccgacgccccgtcctccatccgctccatccagatcgaggagcaggctatgaaggacttcaggcgcttctacagcagcgtgaggatcgtcaagccgcaggtctagtagcactggcggcggcggcggtggcggccttggcggagagtgactgatggcacaacaaccccctttaggctcaccctcccatttgacactggctcgttgtacattcgagtgtacagttggttctgttcgccataggttccttgagctgaacaataaacaaacaccctttgctgctgttgctgctgctttcgcagtgagtggtctcgtttagttgtaacagaagattgtacaggccatgtgagatcaccaccccccggctttggcttaacagtttaacttgagccaatgcttctttttttttttttggcgccaaaatgtctttggttgttccaagcagaggtcataaaaactgtgtggtgcgtctgcacccaggtacccaacatttttagcttcgatcggacatgatctcactttggggctgtagcctagtgcttctatatgctctcgatctgcttgactggtcggtgtgagaatttggtagatagcggcatacttgtgctgttgtgcaatagtagcactatgcatggtcatctgctaagatcgatggcagctcgtaattaatggagctagtctgcctggttcagtagcttgtcgcctatggctatcggtaataaggccggttgcaatatttttttgtttggtgagcactagctagccatgaggcgatcaaatgtcatgtgctcccatgaaccctgatgacatgtatcttcac

SEQ ID NO: 37206 - DNA, 2304 bp, Zea Mays
cacgctctcatcccctccacgccgccgccacccgacccgcgccgccggaccgcgtcgacgctccctcgccgctggggttaaggcgatcatcgatcgatcgagtttctgtgcacaatcgtggcgctgctgtacttcaccttcggcgaggtggacctctgccacatctcgctcccgtccttacccgtctccggctcgtcccccttccgcgcggctgccgtggcggcgcccttcgtggagcggcgcggggcttctttctattatctagcatgccctccgccacatcgagtttcagtgaagatttgttctcaagttgatctgtgcaatccagaccaacgctggaaaggcggtgcagtgtctttacacactcgctcaactcggacggcttgtactgcgtgtagtgagcaagcgtggagttctacttccagatgtaacgagtgtcgtcagccaccaagacagcatcattctcatcaggcaacaactgctacacaaagaagatatgatgccaacctacccaaggatacttcgttggctggagtacaaatctcgccaagaaaatagctgaggcagcgattagtgatggagagtaagacagaagactgtactccagcagggatagctcagcgatgtaattggccaggaactccagatgcagagcaggatcctgtacaaacaaagagtaggggcattatcacagaatccctgcctgccacatatacatgtaattcctggcagcagtacctcatcacacgcctgcatccgtgtccaagactccaactatcatacgcctgcatcctgtacaaaaaaattgttggatacttgaatacttgaatccaagctgccaagttggatacttgaatccaagctgtattcttacacctgcaaaagactccaactatcattcttgtgtcaaaaaaattgttgaaccggacacccatgtccacatccaagcagcactggtttagcatccttgtcctctacaactccatttggacaacattcatttatgggatgatggttcgtttcattatgatcaagatttatttaacagcaaaattacagtatattgaatgaagttgatatcaagcggcgccaagaggatgacataaatagggtttcaactgttctttcaatttccaaaccagaggcatgtgtcttctccgcaactataactggagtgttagtaaggtgcatgacgaatggtttgctgatgaagagcgtgttcggaaggtggttggtttaccagagaagcatattgaaatgccaaatgacagagaagtattcccatgcttcattagtttcacttgttcttccagttgcctaagcatgtttgctctagagatagaatcacagctcctaattcgaatctataatcctagtatataagttataagttgtggtgatctgctggagatgaatacagtattatcatcctcaaacttgtttctttcaatatcctcaccccacttataggatgggtattggatgatggaaaaaagcccgtctgtatagtacatcagtaccacagtgcataaaatatagacacatgtattgcatttgtagacctgtagtcactcatattatttgacccatgcgtatttttagtggacaatcattaaattagcaacaatctatgtctggacaatcattcgtttatttcagaatatgcaccagggctatcccaaagaaacactggtgcatttccttaaggctagagagtggaatgtagcaaaggctcataaaatgattgtagaatgtttgaattggaggattcaaaatgaaattgatagtgtgctggagaggcctatagccccagtagatttatacagatcaatatgtgattcacaacttattggcctgtcaggatacacaaaggagggtctcccaatttttggcattggtgttgggcatagcacatatgacaaagcttcggtaattactctgatgcttgctatttgtttggtaggctacaactacagccaaaatcataaaagtgtctggtttgaagctatcagcactaagccaaataaaggattccggctctcatcaagtgactccccctcacgttgactttgcggatgtctcaattctagtggtggagctacgaacaacaatccgatgtcctgatcgagagcgatggagttaatgtttgaacttgtgtgtttgaacttgtgaactaaaaatgtgaactatgtatgtgaacttgtgtgaatttgtgaacttatgtatttggacttatgtgaatttgtgaacttatatatttggacttgtgtgagtttgtgatatgaacatatatcaatgtgtttg

SEQ ID NO: 37207 - DNA, 2698 bp, Zea Mays
cgcgttctgcggcgcagcggctgggctgaggacggcgatgctcacacacatgcttgaaacaggtacacattgggaattcaccaacctatagacttgaaaggaagcttggaaagggaggatttggacaagtatacgttggtcgacgtatttcagctcctcgtctcagtgaccgtaaccctggttcaaatgctttagaggttgcactgaaatttgaacaccaatccagcaaaggttgcaactttggagctccttatgagtggcaagtttacaacactcttagtgggaaccatggtgtcccacgggtacactacaaaggaaagcagggagagttttacatcatggttatggatattttgggaccaagcctatgggatgtttggaataataattcccactcgatgtctgttgagatggttgcttgcataggtatagaggcaatctccatactggaaaagatgcactctaaagggtatgtccatggtgatgtgaagcctgagaacttcttgcttggtcctcctggtaccccagaggagaagaagctttttcttgttgaccttggattggcaactaaatggaaggatgctggtacggggcaccatgttgaatatgatcagagacctgatatttttaggggaactgttcgctatgctagcgtgcatgcccacttgggaagaactgggagtaggagagatgatcttgaatccctcgcatacactcttatttttcttctccgtggccgcctcccttggcaaggataccaaggagagaacaaaggttttcttgtctgcaagaaaaagatggcgacatctccggagtctctgtgtggaatctgtccacaacctttccggaattttgttgagtatgtcgtgaacttgaaatttgatgaagaaccaaattatgctaggtgcatctctctttttgatggtattgttggcccaaatccagacataagaccgataaacactgatggtgcccaaaagtatatcaggttgggcagaagagaggtcgcttaatagtggacgaaaatgatgatgagcaacctaagaaaaagatcagaatggggatgccggcaactcagtggattagtgtctacaatgcccgtcgacctatgaaacagaggtcagcatgatgcacatatctgcataatggcagtaacatgaattttccattgtcttgccacatttgtttatcaggtaccactacaacgtagccgataatagattggtgcagcatattcaaaaggggaacgaagatggcttgtttattagttcagttgcctccagctcaaacctgtgggctttaattatggatgctggcactggttttacatctcaagtatacgaactttctagttactttcttcacaaggaatggataatggaacagtgggagagaaatttctatatcactgcactggctggtgcgaataatggaagctctttggtgattatgtcaagaggaacacaatatgcccagcagtcctacaaagtaagtgatacatttcctttcaaatggataaacaaaaagtggaaggagggcttctatgtcactgctatggcaacagctggaagccgatgggcagttgtcatgtcccgcaatgctggtttcacttctcaggtagtggagcttgatttcttatatccaagtgagggcatccacatgcgttgggacaatggctatcgcattacggcaacggctgccacatgggaccaggcggcctttatcttgagcataccaaggagaaagcctactgatgaaacacaggagaccctgagaacatctgcttttcctagccagcatgtgaaggacaaatggtccaacaacctatacctagcttccatctgttatggaagatcggtgtcctgaagcccgttttcacgatttggtctggttgctgagaggtatattgatatcaaatacaggtggttttatgatatcaatggggcattttgaagctgaaaactctgctaacctacttacctgcaactaacaaaaggtaacctatatatgaggaaaaaagaaagcaaagtctgttgtgtttcgctaatctctaccatggagcaaaagaacattgcggtatgcctttttttttaattgggctgtgtataaattatccaaagtattaggttgtgctgtaaagaatgtagaagtgtacctgctggacggttgccatgtatataaagtcgaattttttacaatgttgtttcgaattacaaagatggaatttgtagctttttcttcattcatctattcaagttacagatcaatagctactcccctccccccaaattataaaaggttcttgtcttttgaagatcattgcttttgtaatgtatctagatatatgctatgttgagatatatagcaaaaaactatctaaaaaaagtagaacgtcttacatttttaaaaaaaagatgtggtatgatgtagttcgtttgggtacatcacccaggatacaaaaaaatgcttgtatgtatgtcgttgatggtccgacaagttcgctttctctcttcgatcccagaactagagttggactgctatagcaatacctaaaagcagtatgatagcaacacacacaaaaggaagtcttgtttttcactatgaatcaattgtcctgttgttccattggacatctacagtgttgctgcatttgctgcaaaacacagaacagtcagaaagaaaaaaacgaagaaacaag

SEQ ID NO: 37208 - DNA, 2823 bp, Zea Mays
ccggacgctgacaccgacgtcgtcctccccgcaggccgcaggtcggcaggcggtcgcctccagggtccaggctctctcccgctcacggcagcgccgtccttcgacacccccctccccgctctagttctggcctgctgaggactggaggtccatccatccggactttgttgatttcttctgttggcattgtggtgttcagctcaaaatgaaaggagtgcttccgattaagggggcatcaggccgtgaaaagaaagcgcctaaggagctcgagagcgtcttgaaccgatatttcgggtattcgggatttcgaggaaaacaactcgaagctatagaagctgttctatcagggagagattgcttttgtttgatgccaactggtggtggaaagtccatgtgctatcagattccagctctggtgaaaacaggcattgttcttgtcatttcacccttgatagaatttacaggagaaccaggttgccagcttgaaaaataaaggggttccagctgaatttctctcttcaacacaggcatctcacactaaacaaaggatacatgaagaccttgatactggtaatccttctttaaagttgctatatgtgactcctgaacttgttgcaacatcaagctttatggcaaagctaaagaagctatacaacagaggtcttcttggtcttgttgcaattgatgaggctcactgtatttcaagttggggccacgatttcagacctagctaccgaaaactttcatcattgaggaagcagttcccagatatccctttgttagctttaactgcaactgctgtaccgaaggtccagaaagatgtggtatcatcattgtgcttgcaaaatccagtaattcttagagcttcatttaatcgacccaatatattctatgaagttcgttacaaggatcttcttgatgatgtttactctgatatatcaaatttgctgaaatcaagcgggaatgtttgctcaattatatattgccttgaacgggcagcttgtgatgatctaagcatgcatttgtcacagcagggtgtctcttgtgctgcttatcatgctggcctaaatagtaaagtgcgaagttctgttctcgatgactggctttcatcgagaactcaagttgttgttgcaactgtagcatttgggtaggtattgatagacaagatgtccgtattgtttgccacttcaacttgcctaagtcaatggaatccttctaccaggagtcaggtcgagctggtcgtgatcaacgaccttcaaggagtgttttgtattacggattagatgaccggaggagaatggaattcattttgagaaaccccaaaactaagaaatcacagccgtcttcctcttcaaatgagctttctgagaaggctctagctgacttcagtcagattattgactactgtgaaatttctagctgccggcggaaaaagatcattgagagctttggagagaaagtacaaccaactttatgccaacgctcatgcgatgcttgcaaacacccaaatttagtgttgtctcgtctggaggaactccgtcgtgtgcccaactgtcgctttaataagatctctccagtgtttcaaagctcagttaaagaagcacacttggacacagaattctggaatcgtgaagatgaggcgagcttatcagctgaagacatatctgattctgatgatgggaatgaggtagtgagtaatatagccatttcaaaggttccggcaaaagctggtctggatgcaaaatttaaagcactggagcgtgctgaaaatgcttattaccaaggcaaaggtcaggcgaagcagcagggtggcggccttgctgacaagaaaagcatctctgagacgctaagagatgcatgccgaaaaagattgttggatgctcttggacaagcaaagttgcgactcgggaatattccgtgcggagacgaggcttctgctacacaccttgaaacagagtgcttcaaaaaatatgtgaaggcgggcaagacgttctacaactcacagatagccgccacagttcggtggctgtcatctgcaacactcagtcagatgcgtgaccgcctcgacactctttatcgaccgaaccaaagatgatggtgcgtcaggctgccccgacattgtcccagagtcacctccagcatctcctgaaatcgtcgtcggcgcaaggtcaggagaaaccagtaacgacaaaccgcagcatatttgtgagttgaagagttcagatgagtctgcaaagggtgctgcatcatcgactgggaacatggtgctccccgccataccgacgttcagagaattcttgagccaaaaaggaagggatcgggcgaagtgctattcaaattctaatgcgacgaaccagccatctggtattcgtaggaagtttagtggtcaccttgataaggaagaagccagcaagaggatgaaatcatgaatatctgtcgggcaacttgattttttttctgccttttcgttgtcactaatcaaacattgcaaatctacgttgtagtgaaacgttcctgaatcagaatctccatgatgattttcttattatatctagtttgtacagtgaaaaggggtgttctacgcttctcgtgcaacatgaaggatctgcctcccaatccctatccaccctctataggttagtcatctcatgtggacacagccagaagggaagcggtaaacttaagcaagtatatacacatgtcggacctataacaccctatttgatcagctcttacaacggtcaactacacctgacgcaccctatttgatccgaggaatccttctcaagctccgcgatcagctgctcaatgtttcttctgtat

SEQ ID NO: 37209 - DNA, 3209 bp, Zea Mays
cttttcagttttctccgtgcctcttgctccctcctggctccgcgcctgggccaccgagcccgcgatcggattcgctccctcttcgccgcgccccaccacccatcgccgctggggatccctagggtttagtgcagtcgctcggctccgcgccgtcctcgccgctgctgccaccatgccgctcaggttggagatcaagcggaagttcgctcaacggtcggagagagtcaagtccgtggacttgcaccccacggagccatggatcctgtcgagcctgtactcggggagtgtctgcatctgggattatcaggcacaggcaatggtgaaatcatttgaagtttcagaactgccagtgaggtcggcaaagtttatttcaaggaaacaatgggttgtagctggtgcagacgacatgttcattcgtgtctacaactacaataccatggacaaagttaaagtttttgaggctcatactgattacatcagatgtgttgcggtccatccaactctaccatatgtgctgtcatcatctgatgacatgctaataaaactgtgggactgggataaagggtgggtgtgcactcaaatatttgagggacattcacactatgtgatgcaggttactttcaatccaaaggatattaacacctttgcaagtgcatcccttgaccgcactacaaagatatggagtttgggttctccagatccaaacttcacacttgatgggcatcaaaagggtgtcaactgtgttgactacttcactggtggtgacaggccctatttgattactggttctgatgactccaccgcaaaggtctgggattaccagacgaagagctgtgttcagacacttgaagggcatacacataatatttctgctgtttgtttccatcctgagctccctataatcattactggatctgaagatggtacagttcgtatatggcattcgacaacttacagacttgagaacacactaaactatggccttgagagagtctgggctgttggatacatgaaggggtctagaaggatggtgattggttatgatgaggggaccattatgataaaaatgggccgtgaagtacccatagcaagtatggataccggtgggaaaatcatttgggcgaaacataatgaaatacaaactgtaaatatcaagacagtcggtgcaggttttgaagccacagatggagaaagattacccttggctgtaaaagagttaggaagctgtgatttgtacccacagagcttgaagcataaccctaatggacggttcgttgttgtatgtggagatggcgagtacataatttatactgccctggcctggaggaatagatcatttgggtctgcactggaatttgtttggtcatcagaaggagaatatgcaattagggaaagtacatcaagaataaagattttcaataaatcgtttcaggagaagaaaactatccgcccttcattttcagcagagcgtatttatggtggggtattgttggcaatgtgttctagtgacttcatctgcttttatgactgggctgattgtagactaatacgccgaatcgatgtgaatgttaagaatgtttactgggctgatagtggtgacctagttgcaatagcaagtgatacatcattctacatcctcaagtacaatagagatattgttgcttcttatctagaaggtggaaagcctgtggacgaagaaggcgttgaagatgcttttgagctgcttcatgagatcaatgagcgagtgagaactggaatttgggttggagactgctttatctataacaactcatcgtggcgcctaaattattgtgttggtggtgaggtcactacaatgtatcatttggatcgccctatgtacttgttgggatatattgcgaaccaaagtcgagtttatcttattgacaaggagttgaatgtcattgggtacacattacttctgagtttgattgagtacaagacccttgtgatgcgtggggatttggatcatgcaaacaaaattttatcatccatacctaaggcgcaatataatagtgttgctcattttttggaatcgagaggtatgttggaagaggctcttgagatagccactgatgctgactacaagtttgacctagctgtgcagcttggaaaattagaagtcgcgaaggctatcgccatagaagcacaaagtgaatctaaatggaagcagttgggcgaacttgccatgtccacaggcaagctagagatggcagaggaatgccttcttcaagcaaaggacttaagtggcttgttgctactgtactcatctcttggagatgctgaaggaattgaaaagcttgcttctttggcaaaagaacacggaaaaaacaatgttgctttcctctgcctttttatgcttggtaaagttgaagattgcatacagttgcttgtagacagtaaccgtatacctgaagctgcattactggcgcgttcatatcttcctagcaaagtaccagagatagtggcaatttggagagacgacctgagtaaaattaatccaaaagctgcagagtctctagcagatccttctgaatatccaaatctatttgaagactggcaggttgctctaactgtagaaaaaagtgttgcgtctcagaggggcaattatcttcctgctgaccagtacttgaatcatgctgagaagtcagacatgactattgtggaagctttcaaaaggatgcaggttgttcagcatgaggaacctgaagatgtggctgaggaaaatggagaacttgatcaacaggcatttgaagagactgaaatgcagaatacagatgatgatgctgatgaacctgaagagacagttttagtaaatgggaacaagggtgaggaacatcaggtgctaactcaacatgaataggggctgaaagaagcacagctcattggctgcaaatttttttttctgagggtaacaaatgtgggccccctgttttactctgaagcaccggaactggtgatgctggaccgcctgatgcttgtcatatagaaggtcgctatactttttggtgtcaatctgcccatccagtcatgcttctttttgtaaacaacgtaggcaattctttcttcttggaacgtttgcagacccaatttccatgccgtgaaatcaatggatcgggtgtggggccagctgcaatgaatagtgtttgaataattggtatagagatgtcacagactccacaggaatcggc

SEQ ID NO: 37210 - DNA, 2743 bp, Zea Mays
ccgttttccggtgtccccggctccctgcggccgcggcagcgagcagaactggcggccggcccggctctcatatggcggagccggagcaccctcccctctcccgctcaaaattagcgccaagcggccaagccatttgcttcccgctgggtattatagctaactgaaaataaaataaaatgccttcagctcgtgagacgccaggggcattacggtaactgcgcactaacgctcacccgcgcctccgggttctgggctttagcgctcgctcgccggtcggccccaccattccgcgcagttccgcgtgcgaggaacaggaaccgctgctgctctctgcctccgctccgatcctgcttgcgctcgagaaccgcgacgccgacgcccttccttgacgcgttgttgatctgcgagctcagtgcaggcaagagtgcaagaccaactctgttggctagagtattgcatttatacagatctgcatattagagaagatttttcgtatattttggtgaacatgaagagaaaggcgcagtcaggaaaatctcgctcatggtggtgggacaatcatattagtccacaaaattctaagtggctctctaaaaatctagaagaaatggagaagcaggtgaaacaaatgttggggctcattggcgaaggagagttttctgcagaaaaagcggaggtgttctatgagaagcggcctttacttattactcatgtggagaacttctattgcatgtatcgtgctcttgctgcccgatatgacgatgtaactggacaactacgcaaaaacattccatcatctcttcaatcatatggctcggttggtgtctctgaatcagattctgagacacaatgtttcacatctccagagtttgatatgccacagcaaaagcaaaagcctggaccagatttccttgatttttccattggctctggtgttagctctgatgtatcaaagaagggtagtgaaaggtcttcatcatcttcagattctgattcagagcttgatgaggccaaagaggaaaatggcagtatgttttatgccttgagccaaaaaaatattgagctagaagatgagcttcaagaagtaaggggaaaacttgatgctttagaggaaaaacatgctcattgccaaagagatttgagtaccaactcaaaagatactgaacatgaagaaaacctgcacacttcagatgtggaatccaacacccttcagaaggatgcagaagaaacagattttgctttagagagctcaacagaagtcaacagcgaaaaggaagcattggaagctgtgctgtttgagcggaaaaatgagattgaaatgctgaaaggtgcaatggcctcagctgctaagcagtttgaagttgaattggcacatcgtgatcttgaaattggtaagtgcaagcatgaacttggagtactctcggagaagtatttgcatgataagtctactctcgaggatgagcttagaaggctccatggaataatcaagaatatggaaggtgacttagaaaaaatttcacaggagagattgcagctcaggtctcggattaaagagctcgagcaggcagctcacagcttagactattcagcttccgagatagttgagctacaagaagtaataaggaatacacaagcagaattagaaaaggtcacaaaggagaaagaagtgctcaaagaacacgctaacgaatttgagcaacttttaaagggccttgaggtctcaggtacagaggttgcaaagctaccagaaactatcaagaacctggaagcccagctagaaagatccttcgaagagaaatcagtactccaagaccagatcaagcagctggagcaggttatgtctgaatcttcggagaaacattcacatgagcagttctctcttactgcggatcttttgaagttatctgaagtgaacgcttctcttgaagacaaattgtccgatgtggcggcagagcttatccaagtttatgctgacaaggaagaagaatctctcgataatgagaagcaaatttctgtcctcagtaaagatattgctgatctcaggagaaagcttgaattgttgtcatctgagaaaaccacagttgatgatgagttggccaaactgctagctgatattatgattcgtgacgaaaagatgaagcaaatggatgaccacctaaatcagcttcagttagagcatgccaagctgatggcagaatttgacagtgcacacaggtccttgtcagagctgcatgcgcaggtttctgagctggaagacgaggtagagaagcagaagcttgtgatatccgagagtgcagagggaaagcgggaggccatcaggcagctgtgcttctccattgaacactaccgcagcgggtatcagcagctgaggcagctgctgcaaggccacaggaggccgttggtgatggcaacctgataaatgaacaaagtccgtttgccaacaaattgcgcagttgcttgtctctgggcgtgttctatttgtagctctgttctttcacaacttgtgccgtgtagtttatgttataaagaattctgtgtggtatgtgtgtagaatgtaatgggatgggatatttatgttgttccttcatactcctgtggctgttttctttttccttgctgtccgctgatgaatgttatgatatgcttgaaccttcgtcttttcagtcacgactttatgtggtcaataactgaactgcacaatggaactcccttttcaatctaagacgtgtttggcagaaacata

SEQ ID NO: 37211 - DNA, 6239 bp, Zea Mays
tgagagccggagagggagaaagaggatagagagagaaggaaaaaacttatctgccgcctctctatcgcgcgcgccgccgccgcgctgccgcgccgggagcctgtctccggcgatcgccgccttccagccccgttactgaccctcctccgatccgaatcctaggcgaaaaatcgcggaaaataccgcaaaaaatcgcggaaaatcgcccggtcctttttgaataaatcgcacgggcgttgcaccccgctcccttgctcccctcccaccgccggcgacggcgatcgcgcagactaataggtgccccgcggcgagccagaaaacctgcctcgtgccggtccgagcattcgtctctgtcggggggactgagcgcccgtcgcccacccgcctcctgctcctctcgtcggccgcggcaggaggagtgacactgagactgtgagaggtattccatgtaatgccataatttgtgatggcatttttcagcaactccgggagcaaggccgattcagaagggtacaacttgaatgaaaaggccgatgatgatggcatacacgagtcaatccgggatgggaatgatggcctgaactctaggcagtggaacttaaatgagaaagcagaggatgcttaccacagcgaagcagagcaatatgagtctggccagtcaggtttgtacgcatcaaggcagcatgttcagagaggaggcagatcgtctggtggtccatggggcacaaattttctgaaggattccaggtccaaacagacggccaaggaagttgcatcaaatagcggtagaggaatggatgctgctaactcgcatgatgacatggatggtagcagagaggatgatgaactgaatagagcaaatggtgaggtgcctgctgaggaaatgctctcagatgactattacgagcaggacggagaggatcagattgaatcgttgcatcgtggcgggatgaagcagtcaagctgttccacttctggtggagcagcaaagtctggctcacgacaaatgaagaagatgtcaaagtacaatgcttatgataacgatgagtataatgatgagaatgatgatgacagcgatgcagatgaagatgatcctgctgacatggattttgagccagacggcgaaacagacaaggctactgataaggataagtttatggatagtgagaattctgacggcgacgacgatgatgaccttgaactctcagatgatgaagatgattttgttgagaatcggaggcaacctaaacgacttaagattgtagcaactaaaacttccaagggaggacagttgcccatgccagttcaaccaaaacgaggggtgtctcacagtgatgaagaatatttttcaggaaaagactcagatgttcccagcgattcggatttcaaacacataccgaaaaaacctgacaggttgcatcagaaacctgtgggccgcagtgatgttgccccaatcagttctcataatgagcttagaacttctggaaggaggaggacggtgaaaaagatctcatatgctgaaagcgaagaaagtgatgatagtgaggagaagtcaaataagcgacaaaagctcatcaaggaggaaccggaagaggaggatggagaaacaattgaaaaagttctgtggcatcaacccaagggtgtagcagaagaggcaataaggaatcaccggtcagctcaacctactgttgccagcctaacatcggactttgaccaacaatgggatgaattagagttctatataaaatggaaaggccagtcttacctgcattgtcaatggaagatactatcagagctccaaagtgttagtggattcaagaaggtaataaactacacgaaaagagtttctgaggaacagaggtacaagagggcactatcacgtgaagaggttgaggttgaacggatatttgctgatagggtcagcaaagctgatggagatgatctggttcccgaatatttagtaaaatggcaaggacttccttatgcagaatctacctgggaaaaagatacagatattgattttgctcaagatgcgattgatgaatataaggctcgtgaagctgcctcagctatacttgggaaaacagtagatttccaacgaaagaaaagcaaagctagtttgaggaggcttgatggtcagccagaatggctaaaagctggcaagcttcgtgattatcagctggaaggactaaactttctcgtcaatgggtggagaaacgatactaatgttatacttgctgatgaaatgggtctgggaaaaactatccaatctgtatccatgcttggcttccttcataatgctcaagaaatcaatggcccatttcttgtagtcgtgccactgtcaacattgtcgaactgggcaaaggaatttcggaagtggctgcccaacatgaatgttgttgtttatgttggcaaccgtgccagcagagagatgtgccagcagcatgaatttttttcagacaaaaaaggtgggcgtcatgtaaaattccacacgttgataactacgtacgaggtgattctcaaagacaaagcggttctttccaagataaaatggaactatcttatggttgatgaagcccaccggttgaaaaattgtgaagcgtcactgtatacaacccttttggaattcagcactaagaacaagctgcttatcacgggaacacctttgcagaacagtgtggaagagctttgggcattacttcatttccttgatccagtcaaattcaacagcaaggatagttttgttgagagatacaaaaatttgagttccttcaacgaaactgagctcgcgaatctgcataaggaattgaggcctcatattctacggcgggttataaaagatgttgagaagtctttacctcctaaaatcgagaggattctacgtgttgagatgtcacccctccagaaacagtactacaagtggattttagagcggaattttcagaatctgaataaaggtgttcgtgggaatcaggtatcacttcttaacattgttgttgaattgaagaaatgctgcaaccatccattcttgtttgaaagtgccgatcatggttatggtggagatagcatcggtgatcggaataaagttgaacgtattgttatgagtagtgggaaacttgtcttgttggacaaactattggtgagactgcgggagactaaccatcgtgtgcttatattctcacagatggttaagatgttggacatccttgcagaatacctctctcttcggggatttcagtttcagaggcttgatggtagtacaagagcagatcttcgtcatcaagccatggaacactttaatgctcctggaagtgatgatttctgttttcttttatccacacgtgccggaggacttggtattaatctagcaactgcagatacagtgataatttttgattcagattggaatccacaaaatgatttgcaggttcttgatcacttggtcattcagaagctaaacgctgagggcaggcttgagaagaaagaatccaaaaaaggtggccccatatttgacaagaacgaactttcagctatcttgaggttcggtgcagaggaattgttcaaggaagacaagactgatgaagagaccaagaggaaccttgaaagtttggacattgatgaaattcttgagagagctgagaaagtcgagacaaagggtggtgaaggggaggaaggaaatgagcttcttagcgctttcaaggtcgcaaacttttccagtgtcgaagatgatgcaacgttctggagtaggttaatacagccagatcctgcagatatagttcaggaaactttggcacctcgtgctgcacgaaataaaaagagctatattgaagatcctcagcttgacaaaaataataacaggaaaagacgggcagttgaaacacaagaaaagccaaggaggctttctggcagaactgtggaaacagttaattcattaccattggttgatggagcagtagctcaagtacgagagtggtcttttggtaatgttccaaagaaggacgcttctcgttttgtacgagcggtcaaaaaatttgggaatgcaacccagattggattaattgtggatgatgttggtggtgtacttgcgaaggtaccgcatgaagcgcagatagaactatttgatttgctggttgatggttgtcaggaagcagttaaggagaatacagacattaagggcacagttttggattttttcggtgtagctgtaaaggcctatgaattgctagctcgtgttgaagagcttcagttcttggcaaagcgaattgcacgttacaaagatccaatcaagcagtaccgcatccagctaccttataaaaagcctcagtggtcagcaagctgtggatggactgaaactgatgacgctagattgatggttggaattcattggtatggctacgggaattgggagaaaataaggttggatccaaagcttggcctgacaacaaaaattgcgccagcaacacttggagaaagggagacatttttaccacgtgctcccaacttggataaccgcgctagtgctctcctgcaaaaggagtatgctaagtttagcggtaagagcttaaaagtcaaaggaaacacccgccagacagtcaataacgacagtaatagtggagttcgatcaatgaggggccggcaaaaggatgtaccagaaaaagatgataataagccgaacaaagatgacattcagaagcgtagggtaatagtggaagctgaagcaagagaagaaggtgaaatttctgaatcggaggcagagaccaggtatcgtcaggacaaagaggagaagtggcttgaatggtgctctgaagttttagatgaggagcaggaaactttgaagcgcctggataggctgcagaatacaagtgtaaacctcccaaaggaaaaggttctttcaaggattcgcaagtatctcctgataattggggacaaaattggagaagttgtccggcaacacagtgaatcttataggcaatcccgcatggtcatgaggttatggaattatgttgccaccttttcaaacatgtctggggagcaactgcatgatctctatatgaaacttagtcaagaccaactggaaggtggagttggcccatctcatggtggcaatttcacatccattcctcccaataagggaggtaactcaaatcaacttcatccttcgagaaaccaaaggccaactaggtctctccagtacaattctgagtctttccataatgagagctctggaagttctgaagcctggaagcgtcgacggagagctgacacagataatcaatttgacacccagcctttgtgtcaacctccaattatgacaaatggaaataggttgcaggaatctagtagttctgcaggtattcttggttggggtccagttgaaattagacggtatggtaatgagaggccaaaacgtgctgttcatcctagtcatttccctactgggcatggacctttgctgtagctgaaggaagtagatgatgcgaacaaccttgttcattttggcataaccgttcccagtgaatttcagcttccatatagttataaatggtggatctccgtaggaattgaaattctttttccaaaacaaaaaggaataaagagcaacctcacctggatcacagttttgaattatatgccttaaaaggtaatgccaggactctagaggcgacttatggaattgttaacagctacactgaatatccttctgacaccatcacagcaacacaaatacatggtggcttgtgaactgccaagaggatcaatcgaggaagttttgcctgttcagttttgtgatctctcaacaatgatctatagttaaatctcaatacataaattatgctttacattgtaatatattgaaatatggttccgttatgctccctccctctcgatgtgttttgtgccgtttttctaccgtgttgatgtaaaagatgaaagaaatgcatgttctcattttgaggcaacaaaaagttgcagccgggagcataatagtgaaatgcgatggaattatcggatacttatcgattccatagtgttttccctgagacaatgtactgaatgaggtacggttataagaaatggtgataattagcttagtaggtgctcagccattctacaagtcatctggtagtccgaagttgcatgaggcctactttcccctggttgccccacttatgctcagtaagtatgcttctagggttgtatgatgatggcccaattgaatttttaatcctgtgtatgaa

SEQ ID NO: 37212 - DNA, 985 bp, Zea Mays
catggaagcatgtctttagttttaggtttgaagctacaagattaatccggtccatagagaaaaaaataaacgatatgatcatgatgggtgaaatatccgctaataattatggaaataaggcccattggcatgtaccaatattagctatgacggcagatgtaatccaagcgacttttgaaaaatgtatgcagtgtggaatggatggatatgtgtcaaagccatttgaagaacagcagctctactttgctgttgctcatttcttagagactgatgaaacagaataacaaatccaacttcgtaggagattgatttgccgcaacactgtttcaacatctgccaaaagaccatctgttcaacaggttctgaaaaacagcgatcggcagcatatttggaaacaaaatacattggactcccactgaccagaagaaagaagataagatagtagggggtacaaaatgtttggtctggtttccgcagcaattttttttctggccgtgttttctggaaccaatacaacatgaccttgcaacagtggtgtcagttgcttctgtaatgccttatgacaccacgatatttccaaatgctgtgttgtaagtgctttacagacaaaccgaggtccagctttctaaaacattgagttcaatgacatcacttcatccattatttaagaaagcgagggtcttcaaatcaggaggatacaattgtatcaccaagtcaggcacacagtttcaaggtgactttgttctgatctgattgttaatgcaatctgtaaagaggcaactatgagttagggattgtttgatgccttgaatgtcgtatattcatattccatcatttttgtgggcacttgtatatacattgatgattaattgtattgttagataattgtgcattttaagattaaatgaattcctaaagcaaatcgttacataaacaatgtataaagcacacataacaaataaaggcatgtcttagtagattaaac

SEQ ID NO: 37213 - DNA, 318 bp, Zea Mays
atggaccaggccgtggagccgaggtcccgggaccgcgtctcccgcatgttccgcaccggcgccgagatgggcctcaccgtgtgccgctcctgggcgttcaacgacgacacctacaacgccctccaggtctcccctggccacttcgacgagcgcatcttcaaggaatggctagttgcagtgaaagtaatttctagctggagcggatcagtcatcatgctgatgtttgatccatacttgaacacagatgcaagtacaatgtccccctttgagcatgatgagcctcgatggtatctacctagcatgtggtatttgtaggtt

SEQ ID NO: 37214 - DNA, 1990 bp, Zea Mays
tttcagccgccatggagcccagttttgctccccgacacgtgagatcccttcactagcatctctcttcctcaagcgccatccctggcttctcccatgccgagcgtctccaatgcccaaacctccatggccgacgtcgccctgctcaggtccaaccagctccccttcctgttgttgtgtccagccgatgcccctccctccatcttcctctctgcagcaaccctaccacggttgtgcccctgcttccatggtgagctcgccccagccccaacgtcggacgtgccgtcgccctcacgtccagctcctccatccccctggttccctcctagctccgaccaggtatcagaattcctggattccaaatctgagacggatgttgatgttgactataacagcttgtactcaaagcaggactttctacaggcacccattcttctttccctccacttgccgctccagttgcagttggtcgaaaaaagtggaaaggaaaggggcaaaatatcctagggttctgcctccatggacatcgagacccacgccgccgccctggcccgcgacgagctgcggcggctcctcgccgccaccctcagtcccgacaaggcgtcggtggacaccgccgcggcggggctcgacgcgctctcttccgacccacgcttccccctcgccatcctcgctgtcgctgcaggggacgatgatcacgggatgagagtcgctgcagcgacatacttgaaaaattttacccgccgcaatttggaaactcgtctgtgttcatctgaggtttacaaggagttccgtgaccaacttgcccaggctttgcttcgagtggagcctgcaattcttcgagtgctgattgaagttttccgccaagttgttgaaaaagattttgtcaaggataacttgtggcctgagcttatccctcagttgaaactagtgatccagagcagcaacctaattagtccaggccagcatcctgagtggaatactattaatgcactcacagtacttcaatctgttgtaagacccttccagtatttcttgaatccaaaagttgtgaaagagtctgttccacaacagttggagcaaattgcagcagagattcttgtaccattgcaagtgacattccatcacttctctgacaaggttcttttgtcacctgatgggactaacttggaatatgagcagctcctactcatcacatgcaaatgcatgtatttcactgtgaggtcatacatgccatctagggtgaaacaaattttgccttccttttgcaaagacatgttccgtatactagattctttgaactttaatagtcttattgaagatggatctaccatgaagctcaagattgcaaagagatgtctcattatattttgcgcacttgttacacgtcaccggaaacatacagataactagatgccacatattgtcaactgtgcaataaaaatatcaaaacaaagcatccatttaagtaaactcgactctctccccaatcggattgtttcattggcatttgatgtgatttctcgagttttggaaacaggaccgggatggtgactagtttcaccacatttttcttcacttcttgattcagcaatttttccagcattagcattgaatgagaaggatatagaagaatgggaggaggatactgatgagtatatgcaaaagaatcttccttctgaacttgatgacatttctggatggactgaggatttgttcactgccagaaaaagtgcaatcaatttacttggtgttatagcgctatcaaaggttgtgattccttttttattatagtttgttgaacacacatagtactgacttcaggctgagcaaaacattttaagggattgttttgctatattgtattccatgactttgtcattctatatcaagtgatttcaatggctgcatgcagtctttcatatttgaacacacttgctatttttcacagaaccatgtagtttgttgaattaactcaaaaattgagatgttg

SEQ ID NO: 37215 - DNA, 6351 bp, Zea Mays
cggccatagcgttagtattagaaaccctaaccctagaatagggttgggctgaatattaatagatcacatagctgggctaggcccattacaagggacgggtagctaacaccccccgcagtcacaactctatccggtatgtcactgaagggatgaggcgacatttgacaggtctttcgacaaataagattctaccatcttttccccgtcccttgtgactgctggcggcgccggcgcggccgggcaggggaggccggcgagggtaggggagagggggtggcggctgggagggagagaaaaaaggcttggctccatattggaaaccctaaccctagaatagggttaggctgagtattaatagatcacatagatgggccaggcccattacaagggacgggtagctaacagttagcaacacgaacgaacagactggagaataacggagatatccccctcacagttggaacgacaatgtgaatgctgcgactggagtagcccatgcagatgatagccctttgtgccaataatgtcgagataaccaatgacgaggacgcggagccgttgtcaaagtgtcgtgcgtagggtagctgtggtcgaggacgtcgtagaagacaagccacacaagtggcgggcgctggtgcggcacgcaggaaggcctgcagcgcgccagagcacgtcgtggtgatggtggcgctgagaagcagccgtagacaaaggcgcgatgcgtcgaggcagatgagggtatcgatgtcggggtcgacgcatcaagcagccatggacgatgcatgttccaggtttgccaagcctggaaacacgttgtggatgaatgcacatgtcggtggtgccagcatcagatgtactaggtagagggccccaaccatatcatctcaaaggaccaacagagaaggcctccgcgacggttgaggtgcagcacgacgggagtgccgacgcaacacacagttatcagagcggagtagacgaagtagtcgaggacgagacgatgatgctggcgacgaggttgtgctgaacgaagcggagaggtaggcgtggcgacacttcgaggttcctggagtcgtggaggtgagagccacgacgcatgggaaacgagcctcaatggcgccagtggagcgcgatggaggtgtttgttggcgaagaactcgataaatgcggtgtagaccggcgacgatggctggcacgcctaggacaagcgcaaggtgttgacacaacacgcagaggacccgttgtgggggacagatatcccccgggtccactagaaggcaagaaggcctcgcgcggggccttgggccagctacctcgcaaggccatcccttcgtgggtcgggtcagaattactggcggaatgggccgacccgagaaagaagcagactcaggcccaggcgacccgtcagactcgtgcgccatccgtagcgcccacccgactttcccgtgtgcggcgtccttgaatatcgaggcgaattagggataagtcggcaagattgtaggaagatcagttcagtcggttcactattatttaggatacacataatcctcatgtacgcatgtagtgccccacgatcgagtatataaggcctaaggggtaccccatcatttccatcgaccatctacctatctcattagttttctccatttaggagacttcacttgtaacccaccacataaagatccacaccaggaagtagggtattatgcctctccaagcggcccgaacctgtagaaaattgcttgtccttctctcgtgcatctagcacgaaccattgagctacagtcgacagcactgtcctacccaaaagcaccgcgaggggtaaccctgggtgtgcggtcgggctctaaacaccgacacccgcagtgcagaacgacgggtgtgccgacgcagctcgcatgtgtcaaatagcttgctcaaaccgtgcgcgggagacacgcactaacaaagtcgacggtgatgtagatgctgaccgaggaggctacgcagcgacggtcctcttgcttggcgaagcatcgcgcaatggacgacaaacgtcttgggaggatggttcgcccgctatcggttgatcaggtcgatgacgtgtgaggcggagacgacgatggtgatgtcaaaggtggagcctcctgatcggtggtggcgacgacgagccgatatagatggacgtgcagacgaagaggcgcgacataggcaggcattccggttacgtcgcatgtcacgccagttgcaccgtcgaagaaaatgaggaagccgtgttgttgaagccgatgtcgaggacgcgcgagtcgattgatggtgggcgacgcaaacccgatctctgatcggaaaaaagaggaaaatatacataacaacaacaacaaatctaggtagaaactctcgttgtgcatacacccatctccactcgtttctccacatcacgttcagccccaaatagacaaaatcaatggagagtgagtatagatgcatcagccttatcacaactccacgcgagccatacacaccaaggataggactgaagactcctcacacctcgacgtggagggctcgaccagcattggaggagtgaccgtctccacgacacgaggaggcagggcaagggccgccggcggcctagcccagctccatggcgcgggaacaaccgactgtgaggagcccagtgccgctccatggcgaggggcagcccggcgacgaggagctgtggcatagctctgaggcgaggggaggcccgacggcgtggccttgtagcgggagccacggcccggcctgtggcggaagagtagagccgccccatgacaggattcggcgtagccccgacccgcgacggaggggcggaggcgtggctccggtccgcggcgaaggggcgatgactggcgtggagggggaccgagcggaggagggccacatgcaggtcggcgcttgctgctgcctccatggtggcgcgcagagcggcccgaccggcgctgaagtccgaggcatcaccacgacggcgtactgagaagccccaatctcatggatccacataccctcaggcgacacccccgactgttgctgctggatgacgcgacaggattagatggatccaccgtggaaacaaggacgatgaacgcgacggtcagagggatcgggcgcgcatcctaggagggcgctgccccggcggagaacgatctccccgggggcggggcggctgtggcagcatgagacgcctgttggatctaaaacctaaacttgtgatatcatgaaggaagtagagaatgtatataatgtgtgggatgtattgcattgagcctttagggagaatatatatgagtacatgacttggagggcaagaagtctatcctagagataaggaaggttatcctagatataaggaagattatcccgggattacaatcaatcttaaaccaaccatatcaggagttgcctaatatactctaacatgcctaatatactctaatactgcgtattcgagaaaaaaaattatgttagatagttgtacgctgccagtctattaaattctggtgtattttatcaatatgcctagtttcaagcttttgcagatatgcaagcttcctagttataggtgtgaggagaaacataattattttctgatatctcacttattgaccttcccttctagtcactatgacccagttcttaatccttgcgacatttcactctgtctctcttgaaagtttggtctctataactctaatagtttatgaaatagcactgttcaatgggattcctaaatcattccattcacccaggaccaggatccatatatcagtgaggcattgctagaaatttcccatatggtatatttttcactaggattgaagaaccaatggaactgcaccctgtcatggggtttgaatagtttgtatcgcttcacaaaaaaagagatcagcttatcttctaaattctattactgacttgagtcttcatggatatgtttgtatggaagtttcgaacatggtgaatgtgtggtactcggaaagtatcgagagtactgtattaaagtggcgtgtcgacaaatatttggtagaactgatggaagcagtgaaattgaaaatttcggaagttcacagaattcaggacagaattatttgaaattgtcgaacttgctgatattgcacgatgcatagcaaatactcctctggatgaagaaagtgcattatctcaaatggttacctgcatagaagatctccaagaaattgtcaactgcaggaagcatgagtctctcacagtgcagacatttggaacacgaatagaaaaactacacagggagaagtatctgcagctctgtgactcggttgatatggacaaggttgattcagcaagcaccataatggatgaggaagacaacgttgttcgtagcttgcgcgcaagtcctgtccatccaatcaaggatcgcacttcaattgatgactttgaaatcatcaaacctattagccgtggagcatttggacgtgttttcttggccaagaaaagaactacgggagacctttttgctataaaggttcttaggaaggcagatatgattcggaaaaatgctgtcgagagtatattggctgaacgtgatatattgattacagtcaggaacccttttgtggtacggtttttctattcgtttacctcacgggacaatttgtatctggtcatggagtacctgaatggaggggacctttactcattactgaggaatttagggtgcctggatgaagacgttgttcgtgtatatcttgcagaagttgtactagctttggaatatttgcactctatgcacatagtccatagggatctaaagcctgacaacttgttgatagcccatgatggacatattaagttgacagattttgggttgtccaaggttggtttgattaacaacacatatgatctgtctcgtcctgttgttagtggggcttcactgtatggagatgatgagcctcagatgaatgaattcgagcaaatggatcaccgagcacggagacaaaatcgttctgctgttggaactcctgattatttagcaccagaaatccttttggggacaggacatggttgcagtgcagattggtggtccgttggtgtcattctatttgagctcattgttggcatacctccgttcaatgcagaacacccccagacaatttttgacaatattctgaattgcaaaataccttggccgcatgtcccagaagagatgagttttgatgcacaagatttaattgacaaattattgacagaagatcctcatcaacgactaggagcaaatggcgcctcagaggttaaacaacatccatttttcaaagacattagctgggatacccttgctaggcagaaggctgccttcgttccctcctcagatagtgcatttgatactagctacttcaccagtcgctattcttggaatccatcagatggaaacatatatgaagcatacgagtttgaggattccagtgataatggaagccttagtggaagcagtagttgtgtgagcaaccgccaagatgacatgggggaggacagcgatggcctcaatgagtttgaatctagtgcaaatgtcaattattctttcagcaacttctcgttcaagaatctatcacaacttgcttccatcaattatgatatgctcaccaaaggattgaaggatgatccaccgccaagaactgaaacgtagcaatcaatctaaatttggactctcatccgagtaatcaaacagtctacaaggtgttcgcgggatatcaaagtgtgaggcatggtctgttccaattgaggctgttcctacatctcgcggagccgagtacagttttgttgttaccttgttttcatgaccaattgacatgccatcatcagtgaatcacccttgaccgaattgggcagagcgctgtctttttgttcccctttgctttttttttaaaaaaaaaatcagtccattatgagccttgggtttggggagattggcccaggttactgtattcagaatacaacccctgaagatgtaggtgggttttaggaaattgtcattctagaatttattctggacacatttagctaactgaacaagccctaagctggtagcccgctggatttcctgcggccagaaatgttcacagcattcttgatggccatgggatacagcattttgctaaatgtgtccagtgtcccacagaatctgggacattataagaataggaaccgattgaggctggtgctgtttgtttcaacagagagtacgggaacggtaatgcaactagcaaacggtgataattgtcaaaggaataaaaacgctctctgtttggttcagctttgggagcgcagcatccaaatagttgccgctgagactgaaagtttggc

SEQ ID NO: 37216 - DNA, 1693 bp, Zea Mays
cgacaaggccactaacaggatcaagtaccacgtactcactcgaaggtgagacacagagcaaatacaataaagcataaaaccatacattaaaggagtacataaaattattgcaacatcatcaaagttttgcaaaagtagtgatcattgtttgaaatgcagcggaatatgactaacggtaaacaaacggagggatggggaagcctggcccatcactcctcatgctcctccccagccgaggtagggtcccactcaactgtccaacccggtggcaagttgaacgaccaagtcactccagcaaccatatcctccagagaacctgtaaaaaattatgccacaagcaaggatgagtctactaatacttagctagacttacctggtgtgaggagtctactccactacctctagacatgcagctgtttggttgaggggtttggtttgccaaaagcactagctgagtctaaaatcatgttttagattttcaaattttagtatgatcctttttaaactagttgtgtacctagctaatcatacatggtatcgaacattttttatcaaacaacgtcttttgcaaatcaacacctttccacttgttactcaatgtagcagcatggatcaagcagtctcattagctgcgagaagcagacgattcgaatcgagtttttatccttgctaggtaaacctaaacacacgacgtggcgaggcactccgtccccatcgattccccgtcaacagatcagggcttaccgccttagcgtacaatgcctcactgaccccgactgccatcgtgcagtgaccgcacttgtacccaccataaccggaatgggagaccacgtctcaggtcgtgtgaggggtaaagtctgcgggcaggttcactcaggtactaggcttaccgatttaccatatttctcggcatgtgtttagtacgttcaaatgcttgacacacggtaccacaccttaatccttattccaatttccgtctcgtagacaacgcatcctcatggatcgttgtccacagaccattatcattacgatataaaaatgggtacaaccaattcctgacctcgcgtgagtgctagaaaaatcactcgacttctaccgagatccctaattagcaaagtagctactcgacctagacctagcatactagtatccatctcaaaggaatcctgaattcatgcaactagggtttcagtcaactcctacacttaagtgcacagtacaagcctacaaacattaagtgcagtaaaatagcatatatatataacggttatgtataaaaccggggcttgccttccaaagctggggcaggcagatcctcgatggcaggctctggtgatggcttctgggctacctcttgagcaactctgtaacacccctggtgttactgtaactaaaacttgagcatagcatcataagcattggcattgcatatgtttgatacaactagagtgcattcactaggtaaaaatttcaaacaagttgtattgttttaatgttttgcaaatagaaccctggatagggaacttaaccctaaatagggattaaaggggtaagacctaacccaaattgagaaaacctaaaggctttagggaaagagtcataaaatgtccccaaaaacaaagttgaatcacatttatacccctgggataccaaaaatctcaattagaaccctggaaaaccctaaaaccaaacc

SEQ ID NO: 37217 - DNA, 2531 bp, Zea Mays
agagcgcacggcccagttgggcccaatactcgacacgactcattgaccggcccattacggctgaagggagtcgctcgccgccgcgttcgaggcgttccctcgtcgcgctcgcgccgtcgaccttcaccgctcgctgtcaggtctgcccgccacgacctcgccggccacactcgcagctcgccctcgctcctacgcctcgccggcgaggccttctgccttttcgcgccctctatctgctgcgatctttggagcatcgttctcttctctcacttgagatccagacccctaaaccctagagctcgccgcttccgctcgctcgctccgcgctggcggcgacaatggaggacgaggagatggagaagaaggtgcagcagtacttgcagcgcaagggtttccgcctcactgagcttgcgctccaggaggagcgcaaccgcctctccacctccgccatctccgacgttgcgcttgcacggtctgacaatgatccagcgagatactacgatggatatagcagattaagaacatgggcatacagttctcttgatcaatataagcacgaattacttcgcgtcctttatccagttttcatccatagcttcatggatctagtggcagaaggacatatgcaggaagctcggtcatttttccatacatttcgggaagatcatgaggtgatgcattcaagggatcttcagaagctggaaggcgtcctgtctccttcacacttggaggaaatggaattggcccggtcttttaggaaaaataaatttaaaattaaattatgtgagtattcgtatgaattgcttctccagtatctccagaaaacacaagcccttgtggtgcttggagtaatcaatgagcacataacttttgaagtatctcctggtcagccctcattaatctctgatgacgctgatgttgttgctctgattgggacaagtaaggacttggcaaaacagataaatcagaaggaagtacattgggggttgcttgaagattctgttgaagagcgaatggagaaggcactagcagaatctgataaaatagaagctgaaagcaaggatgctgatgcagaagataacaagaaaagaaatgcagaaggtggaaagcaaggtgcttctcttaagaaagccaaaaaggacaagcttgttggtgcgactggaaaaagcgtcagaactgaaacaagcatggtttctgtggcacctcgagtgaaaccggagctaactcttccagcaacgcctgttgaagttgaacaatcaattcttgaggacctacgaaaccgtgcacaactgaatagtgtggcattgccatctgttagcttctacacattccttaatacacataatggattaaactgttcctcaatatcacatgatggatcactggttgttggtgggttttctgattcgtcagtgaaggtctgggatatgtcaaagatgggccagccagcaaaaatatcaagatcacagggtgagaatgggccttcccagggtgagcgcatatcaacattagatgaggggaaacgaacctatacactatttcaaggccattctggaccagtttattctgcggcctttagcccgtttggggatttcctcttgtcatcatcttcagactcgacaattagactatggagcaccaagctgaatgctaatcttgtctgttacaaaggacacaactacccggtttgggatgtccaattcagtccagttggccattactttgctagtgcttcgcacgacaggactgctagaatttggtcaatggataaaatccagcctttgcgaataatggctgggcatctttctgatgttgattgtgtccagtggcatgtaaactgtaactacattgccactggctctagcgacaaaactgtaaggctatgggatgttcagacgggtgaatgcatacggatgtttattggtcataggagtatggttttatcactggcaatgtcacctgatggacgatacatggcctccggagatgaagatggaacaatcatgatatgggatctctcgactggccgttgtgtttcaccactactaggacacagctcttgtgtgtggacacttgctttcagctgtgaaggagcattgcttgcatcgggatcggctgactgtactgtaaagctctgggatgtcgcttctagcacaaaaaccctgaagacagaggataccaaaggcagctcagctaaccgactgagactgcttaaagctctccctacaaaatcaactcctgtttatagcctgcggaaaactagaactggtcctgttttgacattgagtagtgaagctggcatttcagagactgcctattgtacagctaatattttcattagcaattccaacgaactcagcatgtactgccgaattgagcaccgcagattcgttgtagcgggttgtgatattgtaacaatattattaggttgtgaccttatgaacgcaactaaatgtacaagtgctgacaggcgatagcgtgaatgcaatggtctatcaggtctggagtttggtttagtgaccaggtaattc

SEQ ID NO: 37218 - DNA, 2118 bp, Zea Mays
gtcctctccctcccctcaacctagcaccgccacttgcgcccaccacgccgccgcaccgccgctggtgaacgaatccgtccatcccgtacaccagccatgtcctgacacactgacacacacctggtggaggaggaggcgctacctccgtccgccggcggtgcaggggaggagccggccatcctcagggcggcgttgggctccggcaagctgcgcatcgaggggtcgctgagcttcaagcgggcgcagaccgcactgcaggtggagaccgagatctccatccggaccgctgccatgcccgcgccgggaccgggacccctacccaggggaacccccgagaggaacacacaacaacgtctcaccagtcagccaccaccgtgctccatttcctttctctctctcggctcctccgctctcttgcccgagtcgctagcttccctgccccgcctcctcccatccccgtggacagacaaccccccacctccgcttccatagcatccgagctaaggtcaactcctccatcggcggagcgagagcggggaagagacgggagggtcccgaatccgagccgagctgcgctccccgcgcgaccgacactcaggtcttgtcgtcccatgcagatctgctcttcctcctgagataaagtgaccctgaccccttctttcttatacattggaaattacaggccatccatgaatccgtggcacacaggaagttaagattaatctagacatgataatctacaggcttatgagggcttacataagttcatcttctctacggaaatctgcattgagggctcttgcaaaggcactgacgacagatcaactcttcaacctaagagagcagtttacattattcggtccaaacaagagtggccatatatcattgcaaaatatgaagacggccttgatgaaaaattcctcgggtgcaatgaatgattctaggattcttgactttgttaactcaatatgcaatatccaatatggcatgattgattttgaagagttctctgctacggccattagtgtatatcaaatggaaggcctggagacctgggaagaacatgctcaacaagcatatgaattgtttgacaaggagggcaaccgaccaattgtgattgaagaacttgcatcggaacttggacttggcccttcgatctcatttcatgttgttctcaaagattggatcagacattcagatggacacccaggaagttgagttgccccttgaccaggaggaatccacctaccgtctggacgaaaaacgatcccatccatggggcagcgccaggtgtaccgaatctttggcacagcgatcagggatctatttcgcaaatgaacggaaagatagcacaattctttttctttttgtgctagtgccagtattgtggaacgaatttataaggtttgtgggttgggctgctaacatttatgttcgaatttggacgcctctctctctctcaggttggaaaggggttgctgaaggacgagaatgctcagaagcttgcgttgcagcactggctggaagcgattgacccgcggcaccggtacggccacaaccttcactgctactacgactgctggctccactccgaaagcaagcaacctttcttctactggccgcacttgaagaaatcttatatcagtttgaggaaaaactccaagctgaaagagaggaagctgctaggaagcaggaagagttgcaagcacaactacaagctcaacaggccgcacttgaagaaaaccaaagtttgctgcgccaggcccaagaggaagtgaaggggatgcataccaagtttgaagagaccaatgcactgctacgagctgtcctgaaacttcagaaagattgaggtagggatgcataccaagtctggggatgatgcctttgcttaaggtttttctaccttgctagaacatatctgtggttagaactttgtcagaactacgtgcaatctgtttgaatgcttcaaacctttgtggtggaacctttgtatgtttgaacctctgttgtggaagaactagtgtgctggaattgtgtatgacttgtgatgagaatgttgtgtatgatggcttttctgtgtattatgattctgtgagctgtcatgagagctcagtgtgt

SEQ ID NO: 37219 - DNA, 3566 bp, Zea Mays
atggagcaaagcaggccgaccctacagggcaggagaggggcaatgggccatcacagggtgccgccgccggatgcgtactattgctccgcggtgaagaggaggctcagacggtgccttcctcttggctccccagcgactgctcctcgccgcggatgcagcagctacggcccgcgcgaggccgtcgcgctcctcctccggctgcagtccgcccccgccctcacggaggtacggagactccacgctgcgctgctggtgcgaggctaccatagaagcaccgtcctcgccgcgcagctggtacgcgcgtacgccaggatgcgggatggtgggctcgggcacgcggtgcgtgtgttcgatggaatgcctacgaggaactccttcgcgtggaacgctgtgatcaagggccttgtcgacgctggcaggttctcggaggcgctgcggtggtactgggacatggtccgtgacggctcggtcgttgctgatcgtttcacgtacccgcctgttctgaaagcgtgtgcggcgcttggcgaggttgagcaggggagaaaggttcaagagaacgtggagacggacattgcccggggcattgcaaagggcaacgtgtttgtgcagtgcgcgcttgtggacatgtttgccaagtgtgggtgcttaggtgaggcgaggaatatgtttgagagcatgggagtgagggacttggcttcgtggactgcgatgattggaggagccgtccgcggaggagactggcttgaggtgatgacgttgcttaagcgcatgaagtcagaagggtttcggcctgattcaatgatttttgctactgttattccagcatgtggtaaggtgaaagagctgaggactggaatggcattgcatggatatgcagtaaaatgcggagtaggtgatgatatctgtgttcctaatgctttggttgatatgtattgcaaatgtgctaggctggatatggctgcttctctgttttggtctatcgatcacaaggatgtgttctcttggagtaccataattgcagggcattcacagaatagaatatataatgtgagtgtcagtttgtttactgaaatggttgcttcaggcataaaaccaaattctactaccatagcaagcatacttcctagcatttcagagctgaggttactgaggtatggaaaagaaattcattgcttctccttaagaaatagattggagcacagtgagtttctagctagtgcactcatcgacttctactgtagacaaggatacattagggacgcacaaattgtttttgaattcaagccgaagaatgatttggtcgttttgaattcaatgatcagaggatatgtcgtgaataaggattcagagtctgcattacgtctattaagggcactgctgaaagagggactcagacctgatcatgtgactgttgtttcagttcttcctctatgcaatcaaccctcgaggctcctccagggtaaggagctacatgcttatgccatcagacataacataagttcgtgtttctcagttactaacgcacttacagatatgtactgcaagtgtggttgcctagaaatagccaacaagatttttctgctgatgacagagcgaaatactgttacatataacactctgatttcttctctgggaaagcatggccatgcagatcaagcattcattctttttgacctaatgaagagggatggagtttctccagataaagtgacttttgtagctctgttatcatgttgtagccatggaggccttattgacaagggcttatgcttctatgattccatgttgcgggactataatattcctcctgacaaggagcactattcatgtattgttgacctctacagtagatctgggaagcttgatgatgcttggagttttattgctaatttacaagaagtgccagaaatagatgttcttgggtgcctattgtcagcatgcagagatcaccatagaatggacattgctgagcttgttgcagaaagaatatttgagcaaaaccccaatgatcctggttatcacattctgttatctaacgtctatgccagtgctggaatgtggtctgaggtgactaggataagaactatgatagaagagaggagcttgaagaagagaacaggaaatagcttgatttaagatcatggcgtgtcgcttgtggttctttgactccctgtacatatcaaattcattttgcacaaaagaaaaacatcatttgcttgtggttgtatggaacaattaactagataggaaatccaaaaatgtctgactgtcatatttaacgggaagatacataactcagcgaaatcatgaacggtcacttcataacatgtcttggatacataaggcaagacggagtgtaaaactgctgatgtgaaggatagtgactaacttatctaactactgagaattagtgataaacctgggagagagaatgcaaggagacagctactactctgctactgcatcaaaacactgttcagatattttcttttctagaggaatacatttccatatttgcgggcataagcagacagtataccctgttctgaagtcctttttttgctagctacacttgtgaagaaaagtaagcaagtgggtgcacatcaacgctcaagtctttctatggtttggaagaagtttggattttgcgagggaaaaatggattttccagttatgcactgtttcaaaaattttattcaccatgagtcttggacttattctcctaggcaggtagttagaccacacatatcagtgcactgtttctccagactgggtttcagcacgacaaagcttttgcttactcatgaattagctcacctgttgctatcatatacaacgatggtgtctccatcaatggatgccaaaagcagaaccagcaccacaagtagaatcggtaaagcacccggatttcactgatgatgcatcataatgcaatgcaaaagggcagtaatcaatgagggtgctgggccaatgcagagggggtgggcagtgggctcaccacatgtcttcatcagatagttgattccccgcttgtcctactgagcgttgctgctatccgaagtttgtgcagaggattgagttgaaccacatggcctatattattacagcgtttgttcaattccggtgtcccagaatctatcaggttaacttgcaagcttcaagacaacagggaacgggcatccttatcggatccagatcagatctattctccaacttcttatcgaagttccgatggccggtgcgatgtagtttggggtttggaccatctgccatcctgcaacggtgatgggcggtgggtgccgacatgtccacaggacatcccgcccgttgaattgtctgcaaggagtatgcattatgacacagtagctagctagtgactttattatattatatgttgatgtgatgcctaactgtctcacatttatagctgaatggacgagcggatttggcatgacttatgtatttacgcggcagtggttagtagtgtatagctttacctctgttcccccatcctgttttggaaacttttatccgtgcctgttctgaaacgatcagccgggctttcc

SEQ ID NO: 37220 - DNA, 371 bp, Zea Mays
attcagacattttcactatataatcatgaatgaacatgaataatattgaattacatttataccttcggcttgatagaaggtaagaactcaagtatgacgtgtgagtaaatgcaagtcagcgtgaacagtacaggggtactgttcatctatttataggcacaggacgcaggctgcgagaaattacattcatgccctttacaaatgcttataatcataatacaagctatcacgggtcgattggtcatttcatctttaagtcggtttgctccttcatcttgaggcatgccactatgccgaagctttatggatgatagcttcggcactactttttaaaggatctgccaaaggtgtttctttttacaggatcttcg

SEQ ID NO: 37221 - DNA, 653 bp, Zea Mays
ctgagtgggaggtgtgggccttgggtcaattattttgtttttttttggaaaattccgagacttaaattcggtaaattccaattaaaatcggttatcgaagtaaacggtcgataagacgttaaaccgatttcgatatcgattacgaaattcaataccgattaccgattccgtttttgggaactaccgttggattggataaaaaattcgaaaacggtttctggaaaaccgaaattttttgaaaccgtttccatccctagttttcatcgcgtgtgattcgggctcggctaacaaagatctcaaattctcataaccgccagggaaattgctatctaggagtttgttatggtccacgcggggttggagatttggtcggtgactataaaaccgagcgcccacgatttccttttgccatctaccgattgcatgggcctttagctcctgggcagctgcgtcccgccatcgagagagagagagaccgagtggtggtgctagagttcgattacgccatcatcgagccattagtgggcgccgaggatcgtcgtcgaaacgtgagggtcctgcaagaagcatctacaaatgtggagaacttcagcaaccgagagaatagcgtgatggaattcgtacttcatcgacgggtgcgccgcaggtggagg

SEQ ID NO: 37222 - DNA, 2083 bp, Zea Mays
cagccaacagccaagaactacgactacggtacggccgtccaccgctctaggactacgacaacaagtcctaaccctagccccggtagccgccaccgccaggctctacgactacggcccggccgtccaccgctcggccgtccaccggtccaccgctctacgcgacggctccatcgctcggctgctccaggctccagcgccctccaggctccagcagatcccggaagcaccgaccacggtccacggcgagtcggcgagcagacagcacaggcgcacaacagtgacggcgagcagacagcacaggcgcacagcctccgcgcatccgcggtccgcgtccggccgtgcagccgcgcagtggacgggcgggcgggtaatggatacccgttggataacggatacccggcgggtacgggtacggatacagatccgtacccacgagcgtaaatgagtatgtgtatggatttggttttatctcgtgggtatgaatacgcgaaccatatatccgcgttctacccgcccgattgccacccctagctgtgcgttctccctcccgtgtccggcggccggatgttgtgtgcgtctctggtatccctcccgtgtccggtggctggcccttgttgagcgagcgccgagcagctaccggcgcctctgcctcccgcctctcgcccggtcacccgtcgtcgactcgccgtcaggcagcgtcgctccgccgcaccagtctccatcaaaacaggacagcacagcgccggcctccctcaacacttcaacaactaacacttgagcaagtatactggcttcctaaaggatcaatgtcggctatctctgatcagaagaaacgcaccttggaagcccttcagcaacagtatactgctgcaaaagctaagaaattgcaagatgaacaggttaagagtcagaagaagagcaattttaatacccctaagcctaaatgtgatgcaccaaggggaagcaaaggtccagaaatcactcctcgacgaacatatgcccaaccttctcataaaggtgtagcattttctagttctaattgtcaacaaaagccttccacgtcctcaggtgaagaaatcaatcctgtgtatgctgaactttcttgtgcttttcatgacactttgtccaaaggtgttgtctcggatttggatggcacagaggttgttcacaatgttatatatgacataattcagaaaggtggagatgctgggaaaattacaaagggtgccaaaaagttgaaactggaaaaagggatccttttggataattatgttcagaggggttctagattagtggattcccaagcaagatctttgttgattcattcaaagcgatcaaaaaggcacatgtctctaaaacaacataagaaatgtggttcatttgatttagatggtacattccacaagtacgacctctataagccaatgcatgagatgtggaaggactatatcagagagcttatggatctgagcccgaaaaagaaatttactgagaaccttctttcagcagatcttcatggggcccttctaatagtggcagaatgcaaagctgcttcatataaaggtgtaaacggcatcatgattcgggatactgcagagacgtttggaattatatccgaggacaaccgcttccgagttgtaccaaaagctggttcagtgttcgtacttcaagcagatcgctggaagttcacactgattggcgacaagctctcgcccagggagaagttgaaggaggatcagcgtcaacaacgtgcacaatcgctaatcagatagtttccaatgtgccagctgttctctcaaaatttttgctccacgaaatacttgcttttgtttagctgttttaccctttttagtttgcctctaacattgaaggtagataatgggtgtctgtttttgcaactattgattttattttacacagcaagatgtaactgcaacggccacgccgtcattgtttaactgtcattcatgctctccatgataaatatatagagttaataggaatgggaatgaggttgacctactaatttgtcactacagaatctgccttcagcggtccactaaaactttagtattgtacatat

SEQ ID NO: 37223 - DNA, 1918 bp, Zea Mays
atgcgcgcgaaggggcgcgtaagatactagtatttctctctctacgggagttccctctccttcggtccttcgcgagtccaatggccgcctcgccctcttcacccttgacagcgccgccagagccggtgaccccgccgtccccatggaccatcacagacggagccatctctggcacgctcccagcagccgaggccttcgcagtgcactacccgggctacccctcctctcccgcccgcgccgcccgcaccctcggcggtctccccggcctcgccaaggtccggagttccgatcccggcgcccgcctcgagctccgcttccgccccgaggacccctactgccatccagcctttggccagtcccgcgcctccactggccttctgctgcgcctctccaagcgcaaaggagctgcggcaccttgtgcccatgtggtcgctcgtgtccggactgcttactacttcgaagataagacaggacatgatgaagcagatggagatgtcatgatgttggtaccccctctcttttcagtgaaggataggccaacaaagatagcgcttgtaccatcgtccaatgccatatctaaaaccatgcacaggggagttgtacaagaacggtgggagatgaatgttggaccaactctggcgcttccgttcaacactcaagttgtcccggagaagattaattgggaagaccacattagaaagaattctgtagaatggggttggcaaatggctgtttgcaaattgtttgatgagcgccctgtgtggccaaggcaatcactttatgagcggttccttgatgataatgtgcatgtctctcaaaaccaattcaaaaggcttctgtttagagctggatactacttctctactggaccctttggaaaattttggatcagaagaggatatgaccctcgtaaagactctgagtcacaaatatatcagagaattgattttcgcatgcctcccgagctacgatatcttctaaggctgaagaattctgagtctcgaaagtgggcagatatgtgcaagcttgaaacaatgccatcacagagtttcatctacctgcaattatatgaactgaaggatgattttattcaagcagaaattcgaaaaccttcttatcaatcagtttgttcacgttctacaggatggttttctaagccaatgatcaaaaccctgaggttgcaagtgagcataaggctcctctctttattgcataatgaagaggctaaaaacttgttgaggaatgcccatgagcttattgaaaggtccaagaagcaggaagccctttcgagatctgagctgtcaatagaatataatgatgctgatcaagtttctgccgcacatactggaactgaggatcaagtcggccctaacaactctgatagtgaagatgtggatgatgaagaagaggaagaggaattggagggttatgattctccacctatggcagatgatattcatgagttcaccttaggtgattcctatgcatttggtgaaggcttctcgaatggatacctcgaagaagtactgcgcagcttgccattgcaggaagacggccaaaagaaattatgtgatgctcctatcaacgctgatgcaagtgatggagagtttgaaatttacgaacagcccagtgatgatgaagattctgatggctagttgtatctttttttgagctgtgatcttccttagcttcagttttctaaacacataggattggttcacatgtatgtaagaactgcatagatggcttatttgttaaattattttgggtactgaggagcttagtagttcaaacccatcagtggcactttggctattgaaaatcatagccccaccacaccgatgaggacagccacgctgccattggacttgtgcccgtaactgctgttgctcgctgcaaaactcgcatatgattttcc

SEQ ID NO: 37224 - DNA, 3453 bp, Zea Mays
tgctgcagcttctgggccgaccgggggggggggggggggggtgcgtttgacttccctttccttcctgcggtaggggcccacctcgttgccccgctaggccgctacccttctctcttcccccgcctccgtctcttcgactccagacacctccccttcccgctcgccggcgctcggcggcgatccggaaccggcagcggcgcgcatggcgggcccgtgggacacgcacgcgtcgacgagccgggcgcccgcgggccccgacggggaggcggagggcgcgtcgccggactcgctgcggaacacgccctccaacatcgcgcggctggaggacgcgatcgggcactgcgcggcgcgccgcaagtacctcgcgcacaccaagagcccctccgacggcgaggacgtccgctggtacttctgcaagcttcccctcgccgacaaagtgctctcttcttcggtaccacggacagagatagtcgggaaaggagactatttccggttcagcgagagggactctctggcactggaggcatctttcttggagagggaggaagagctgcttgcgtactggtggagggagtacgctgaatgcagtgcaggaccaagaggatccttggttgaaagtgatgattctgcatatctttataaggttgaggaagagcgggttggggttcctgtgaaaggtggactatatgaggttgatttgatgaggcggcattgcttccctgtgtactggaatggggaaaaccggcgtgtcttgagaggccactggtttgctcgcaaaggtggcgtcgactggattcccgtgcgcgaggatgtctctgaacaacttgagttagcgtataattgtcaggtctggcatcgtcggaaatttcaaccttcaggcctatttgcagcaagggttgaccttcaaggaagtacaccggtcctaagtttggtagcaacacaatcaaattaagacgcggatatttctgttctgaatctgcaagtacaaagccttcacaggatgaattgcgtcagaaaaaagaagaggaaatggatgattactgctctcaggttccagttggtcatctggtattcatggttcatggcattggacagaggctggagaaagctaatcttgttgatgatgttgttgatttccgtcgtgtaactgctaacctagctgaaagatacttaacttcgtatcaaagaagtacccagagggttctatttataccctgtcagtggaggaagggcttgaagctcagtggtgaaagtactgttgagaaactcactttggatggagttaagggccttcgagtcgcattaggtgccacagttcatgatgttttatattatatgagtcctatctactgtcagcatattattgactcggtctcgaaccagttgaacaaactgtacatgaaatttctaaagagaaatcctggttacagtggaaaggtttcattgtatggccactcgttaggaagtgttttgtcgtatgatatactttgtcatcaagaatccctttgggccccatttccaacagagtatctgaacatggaaacatctgatcgaaatcaaggagcaaaatcagccaatgaagctgatctgcatgattcaggcgcaaaggatcatgatacttctagtctagggtattcttgtgctgataatgaaaacagtgtcattgatgaagatagcaccagaactgacgtgtcatgtatggacagcatcctcccatcatgtgtgcttgaggattcaccaaataaccatgacactgtcgtgcctcgtggtgcggttgttgctgatcaaaatggagaagaaaagaaggttgagaattatcagtcggtgtatgctgaggaaggaacaacttcaggtgtaatcacaaaaaaggctgaaggatcaagcatttcaagatctgctaaggaagtccatgaagaggtcctcgacaaagaaaaattgatggtccttgccaaagacaaattgatcctttcactagaagaagaggtgaaatgtcttaaagctaaactagatcagcttgaacaacataatcatctagtgactgaaaacaccagtggtgttgagtatcatgaagggcaaaattataatcatgccttgaactctggcaaacttttcgtggcacaagaaagtacaaaccagtcctactcaccgcaaatcaaatacacgaaactaaactttaaggttgatacattctttgctgttggatctcccttgggtgtcttcctttccctgcgtaatgtccgtattggtattggcaaaggacaagactattggcaagataagaacgtaattgaagagatgccatgctgccggcagatgttcaatatttttcatccttttgaccctgtagcatacagaattgaaccacttgtatgtgaagattatctaaagaagcgtcctgtaattgttccctaccatagaggcggaaagaggatacatgttggagtgcaggagttcagagaagatatttctgcacgttctcaagcaattgcccgtcaattgaagtcactgaaggtcaaagcagtagctgctatactagcattgagcagaaatgacacagaagaggatggtgagagtgctaatgagaaagaaaaatcatatggttccattatgatggaaaggttgaccagttcaccgaatggtcgaattgatcatgtgcttcaggagaaaacatttcagcatccatatctatctgctttgggagctcataccaactattggcgagatcatgatactgctctcttcattctcaaacatttgtatcgtgatatacccgaggatcctccaagcgatgtcattgaaaggatgcctattaaactattttatgagagagatccagttgaggaagaaacgcctgtgacgttttcagatcatgcagcaattaaggaattctgcagaaaggtgaaagcttactcaagaaaaatggaggatgatgccaactgccaagcctcgtgatggatttttagtctctcgttacggcctcacacgttcctgggcaagcagaagcaagatgcagacatgggaaggaagaacgaatcgtgatcccaagaaaagaatccacgagatgcagttccacgcttcacgccagaatcagagcacttggagaatgttgtacggagtagagtcggttgccttgctcgttcctacatttataatgcagtgttgtacatagaacgtccgactgtagttttgtgcatcttgaacgtaatgttatgctgcctgctttaaatgctacagaatatatttttgcttttgcatccctagtgtgcgtcaattgcaaagtggttagctcctacttatttagcatgtcttttcattatgtctatcatgggcaaaagtactacataaaaaaggactcgcttagggcccggttgattttttttttttgaaagtttaggtattacaaagacctagttttatagctaaagcgatgcaaaaccaccgtgatttcaaaag

SEQ ID NO: 37225 - DNA, 1319 bp, Zea Mays
atcgttagttctgcttatgatattatctctcattgtcacgaacgtaacaagctgaataagctctactccgccccagccccagcatcgatgaagagacagtagaatatagatggatcaagatcactctcgatcggcccccaatgcaacttggcagctaatggtacagtaactactttctccggaaagctcagtgcacagcacctgagattcgaccgcggctcgcatggacacggctgtgagatgagatgagaattgagatgacgtgtgctgatcggcgtgcatggtcgacctcctcgacgtgactctttcaggccagccgttggcgcttagctggaagtgcctgcccatgcatgtcgcgtgcgcgtgccggccactgccatcctgggccagcgcaccagtgggtgttccaccaccagtcgctctcgctcccgatcaacgtcgccgtcgcgcggatccgctcggtcgcgattgaggtcgctccagaacagcccgtcgtgggtctcggtctctcgggatttattgcggcgtaagtgcgcgtgctggtggacgacgccgtgatcgccatggcaactgggtttcccgcgcgccgcggcgtcaggtcggacggacagatagccccgccccgcacgcgggtgcatacatgaacgaccgcgacaacaccagagaccagacagcgtcacatcggccgaggcccgaggcacgccccctcgtgtcatgctgacggccgaggcccgaggcgccgtcgccgagcggtcgatcgtccgccatctggggccccgatagcgcacacggcaggcacactatccgatccgcggtgcaacttgccgcgcccggccggaggggagtggccacggcgcggcgctacggtccaccgacccaggcacccagccgcgggggtcgcgtcaagctgcgtgacgtacggcagccctgggccccgtgtcggcgcatggaggaccgccggcgccggatgggcctcaccgtcgccgtccgcgtattcccgctgccgccggccggccgtccaggtcgcggcgcgggccatgtatgtatggctccatcgctccgaaatagcccttttcgcgcttgcaataggtgatagataacatgcactgtaacgaccgtgcaagctgccaatggcgtgaacgtgatgatggtgaccgaacagttccatgatcggcgatcagcatccggcgggcaccgacctctttgcaacttggtacggatcaaactgtgcgtgattgtccatgcaggcagagggacagggatagggatagggacttgttggggacttgttctcaaatgctataagaacaaggcaacat

SEQ ID NO: 37226 - DNA, 1847 bp, Zea Mays
gccacccaaaagcaaaaagctacaccaggtctacagcgccgggagtccgggatccagccacggccacggggggcgctctcgagagaaagatccagccccaaaggcccaaacccgaaacccctctcttcttcctccttccattggggtcgcgtccaacaagaggttggccagccatcccgcgcgagccacttcctctctcctccccatcggatccagcgccacgcggatccgcaaggcaatccatggcctctacccaggcggaagcggaggcgggggcaccggccccgcccgaggcggcggaggcgaaggagaagggcaagcagggcggggtgctggggagggtgtggcgggcgctcttcggtggccgcgaggacttcgagaagcggctgcagtacctgtccaaggaggaggcagccgtgcacgcgcggatgcgccggcggacgcagttctcgcgccgcgccgtgcggaacctcatcgtgttagctgttgtttatgccatcatgacgacaagaaatgaggatctaacttggcaaatgagggcaatacgagtgctacctatgttcattcttcctgctgtatcctctgtcatatattcaacagttgttaacttcacaaggatgtttgagcagaaagaccagaagacccttgaaaaattgagggctgagaggaaagccaagattgatgagcttaaagagagaacaaattattatctaacacagcagcttattcagaaatatgatcttgatccagccgcaaaggctgcagcagcttctgttttggcatctaagcttggggaggagactggcttaaaagttcatgttggagaagaaccaaagctggatgctgcagtggccagaagcaatgatgttgagatagtaccttcagatggtttgagaaacaggaagcaacccagtgcaagaggaagcaggactgggagccccacttctcataccccagcacagggaactgaaactaatctacctcctgctcctgctagtgctggcctggaaactgcaccagctccagtggtggtagagcatcatcaaggttcaggggctagtgatggtggtggatggattgcaaagattgctgccttacttgtgggggaggacccatcacagtcgtatgctttgatatgtggcagctgccatatgcataacggcttggcccgaaaggaagattacccacatgttacttactactgcccgcattgtcatgcattaaacacatcaaaacagtccatggggcaatactcaggctccaactcaggccggtcgacccctgttgttctggctgatggattatctacttccagttcagtacaagagactgaattgagtaacctgacgacattgcaggagctacccgaggaaggaaagacagacaagcaacaagtggaggcaagttgatggttcttatgacttgtactgttgatgtgtgtggaactagtttatctttagacttatatcgtcatgtgttcaactggtggagccacaaatttagcactgttgtaaattggaaatagtgagtgatatgatcctcggaagcatagcacgcaaaaacaagaaatgggacatggtgtacatccttgagtggatgattttttgttgtcatatagagcgcgaagtcttcttcctgcgagacaaaaagctatatgacgttcagacaagatggtggtgcaggatataacataagatcattgcttgttcagagaacagcgacatgtagaattttttgcgtttgtcttgaccttcggtcttttctttgttgtttgttacattaccaccttacagcatttcgtacacagtttccttatgatgttgaaaccgtacttttcatttggcgtt

SEQ ID NO: 37227 - DNA, 3591 bp, Zea Mays
ccgcaattcaacacgcgaagctaaaaaagaaaaaaacaattcgaaacccccgacctacgcgaggacaaaacagcaaaaccaaagcgctcagccgctcgcgaggagcgaaaggcgagcgcgcagccgggcgcccgtggcggaggcgaaacccccgccgccgcatcgccctgagaccctccggttcggcccgggccgagctcgagcccgcgcaatctcgccgccggcgggcttgatctgatccaaggccaccgcgcgccggcgcgggcggcgaggaatggggagcgtggacggccgcggggtcgaggggatccacgaagctaatcggcgcgcgcagttgattggatggatgaatgccttactcccggaattcagtttgcctccggattcatcgagtgaagagctgcgagagctgctcagtgacggcgtggtcctgtgccgtcttgtgaacacactcatcccgggggttcttgagggatcctgggagggttatgcaccgtcagatcagaggttaggcaacgtgaagaaattcctctcggtggtctctgatatggggctgccaggcttcagtttgaaagatcttgatgagggattaatgtcttctgtagtggaatgtctcttggttttgaggggcagtgtggatcctagattaggtgatgatattccaccagatgttaccagaactcctttgagaaaacaatggggagttcaggaaatggacaagcctcaagttcccgctgcagcactagggaaaagatcccctgcagaggacatgagaaacggcgttgcagattccaaaacccatcagaaaacttctgtcttttctggacaaaaggttcgtgaagttttccaattaaaacgcggatcatattcagatcttactgctgccaagatttcagagatgatgcactctaatagcttagataatgcaccgacacagtcgcttattagtgttgttaatggtattttggatgaaagcatagaaaggaaaaagggagaaataccacatcgtgtagtttacttactgcggaaagtcgttcaagagattgagcaccgtctctgtattcaagcagagcacataagaagtcaaaatgttaccatcaagacaagagaacaaaagtactgttcaaaaattaaagcacttgaaatgttggtaaatggcacaaatgaagaaaaccagtttctctcttcagatggcaataaacaggcttcagatagtcaagaatgagaagtcacaaatcgaagagaaaaaagaactctgtgagaaagatgttcaacgattaatgaaagagaaagaatattccaaaagcatcataatgaacctaacaaaagatatggaagccatgaatagattgcatgagcagcaacttgagcaaattggaagaaaggcaaaggaaatggaggaacaattaaccaccagggtaaaagaagtagagtatctcttgctacaatcgaataagaaagttgaagaacttgagattgcttctaggctaaaatcacagttatgggatcagaaagagaacatttttcagagttacatggataatcaacaattagttatcaaggacataagaatattgtcacagtcatatgaaaatgatatgtatgcacttcaaatgcagtggagaaatgaaatctctaatttaggatctgggttaaaatgtttggttgatgccgctgaaaattatcataaagtcctgacagagaaccaaaagttatttaatgaagtgcaagaactaaaaggtaatataagagtatattgtcgtgttaggccatttctttccggtcaagataaaaagtccaccacaattgactacatgggggaaaatggtgagcttcttatatcaaatccatttaagcaagggaaggacggacatagaatgttcaagtttaataaagtgtttactccatttgcttcccaagctgaggttttttctgacatacaaccactgatccgatcagttctggatggattcaacgtttgtatttttgcatatggccagactggttctggcaaaacttacactatgagtgggcctaccacatcaaaacaagattggggtgtcaattatcgagctttaaatgatttgtttgatatttcactaagtaggagaaatgccttctcatatgaggtgggggtacaaatggttgagatatacaatgaacaagtccgtgatctgctatcaaatgatattgcacaaagaagacttgggatttggaacacttctcaacccaatgggcttgttgttccagatgcaagcttgcactcagttaagtcgacatctgatgtattagacttgatggagattggacaagcaaatagagcagttggttcaacagcgctaaatgaacgaagtagtcggtcacacagtattctaactgtacatgttcgagggatggatttgaagaatggatcaacctctaggggttgtttgcatcttattgatcttgctggtagtgagagggtagagaagtctgaagtaaccggcgatagattaaaagaagctcaatacattaacaaatcactctctgcgttaggtgatgttatttttgctttgtcacagaaaagtgcccatgtgccttatagaaacagcaagttaacacaagttcttcaaagttctttaggtggacaagcaaaaactctaatgtttgttcagataaatcctgatgttgagtcatattcagaaactataagtactttaaagtttgctgaaagggtgtctggagtagagttaggtgctgctagaagtaacaaggagggaaaagatataaaagagctattggaacaggttgcgtctttgaaagacacaattttgcgcaaagatatggaaatagagcagatccaggtcatcaaagacaaagtaaaatccccaaatttgttgttagatagaaatgtgcctggcttgacgaagactacagcaaaccaacctagccaactattatcaggcgaacgaatgcttaagtctagtgacagagttctatcggatcgtcagagttacggcgaggtgaatgtagatcctaaccaccatgtgatggatactgcaccagtgagcatagatgaagcaggatatgagaacaatgcatcggatgatggtttatcgggtgaaaccgagaatgataattcagctgctgagatgacagcggaacggctgcatagatttccatcaagaataagcaggttcactctcacaaagaacgggcagccatctatgtctagatcgaacccaaaggatgctaagactccaagcaatacgaaagctccatcgagccggttgacaggaggctcttcagccaggtctaaaagacggcagtagagcacgatcatgttgctcgttttgatgtgcattgtagttgaaatgtgaatttgatgggtagttgtaggaccgttttatgattgtaactttagaaaatgtcagacactgatggcagaatatttgaggcatttgtttgatcatttgcttatgccgagcaaaacagcaaacaatgctcgattgtatgtgaaacactctgacctgtgaccatttgaatgtcggtgcgcctccggaagtccggagttgtgtatataccaccaaattgccggcctaaaatttccag

SEQ ID NO: 37228 - DNA, 2805 bp, Zea Mays
tgtacttcatcactgcatgctttggcctgagtttctggattgcactgctaggacaagtctagatatgctttctaagcactactatcaagctactggcagctgggtcgtattttttgtcccagaaaatgatgcggacatgacagcttataatgatttcatgagttatctaggtgataagcagcgtgcagcagtctgtaagcttggagagagcagcaccttgtttcttgttccaccttcagatttctcagagcaagtactgagagtgcctggaaatgtcagcatatctggagtcattctgaggtttcagcagtcaaatccagattacagctcaccaaatcgcaaaccattggatagagctcacccatcttctgcaagtaattttaacactgatgtaagaaattgtgaagatctgcatgcactgagaaggctcaatccttcagatatcagcacattccctcagggtccagattatgtctgctcatcaggtggaagctataccccagcaaatgcagattttattccgccctataagccagagagtgctcctccatatgtcgtccctcaatcaccgcaagaaaggccgccagcggagctccctatgggtattgcacaaggccaacaccagcaactcccaaacaggctgccctcaggatggtccaataacctggataatccaaatccaaatccaggttctggtaacttcagtttggcacagggtgcaatctctaacaggacacaggatccgtacacatttgctcctggagtagtatcaactgggacagcttcagggtatgcatcaggtgaagcatccaacagcatgtcctgggcttccatgcaatacaactcacagcaggtagctagatctgatcaacctactattccagtatcactgccacctgatcaacttgcacagctagctgcccttcttgcacgacaaaaccaacctagaaaagttggtttgcctgtggacagctcaaacaatctgtctggattcatacagagtcccaatcctcatggacatgctacaatgatgccaggcaactctggctccatccctatccagaactcactgccacctgttccatctatgcaacaattacatgccaatgtgccagtgtcaccaataggctcgctacctgcaaatccattcaatgtgccgaccagtgctcctgtactttgtaacagcacttcgcctatgctgcccagtcatgctttggtcaacccagctcattcttccatgccaatgagaccgttcattcctccacttcctgaaggtcctccaccctttcagcagcaaacatcaagtgctgtcacagtgcagcctttaggtccttctagccagcagtctagccaacaactactggctcaggaccttgatggagatcctcaaaagcgccttcaagcaacactgcaactggcagcaaccctgcttaagcagatacaaaatcaatcaaatcctggtggccagaaataaatataaggtattggtaaatgtctagctgcaaggatcatcatatggtgccatcctgaggagctttaaacttactgttgtggttttataccatcacctcctgtgatttgaatgtttatgatgagttctaagacgctttggctttcttatgtacatggttttttgctatgcatccagatatacattggctagaaaacgttgaaaggtcttttaagttggaatggagggagttagctgttgcctgcatttgtttgtttgcctggcttgttccaagagggtatgatggtatggataacttatgatggctggcgtttattggtacgtgcaaggctagagaggcttatgagcgccccccctgacgtgccatctgtgtaccagacggtaaataaggcgtcttactcagatgtttgcttggactcgtccgacagttgtacaatttgttacatgcattgggggcgaagctgttgacattgttttagcattgctagcaaggggttaaagagcgtgactcgtgatgcgtaatctttggtcattcgaaactggctgccgcccgccatggagcatcttttagactgtcctgggatgctgaggtgcttcaagattcagaacagctcctcttttttttttcttctctctttcagtttttaatcctcgctgatctttcagcctttctcctttgtgtgggtgtagtgcatgattgcggcacttgtttcagtgcatcagctttatgctgctctctgccatggatgaccggcctgtctgctaaagagcatgcctgtgccatgccaaggcggctgttgttactccctagtcactgcttgctaaatgctactcctactactagaaagttggcattgcatggagatctgggtatgtatcatgatggcactgcactgcgttttaaaatgcagcagatttattcccctggtctacctcgcagtcgtggatgaagaatgatggcctttttcctgtgctacgtattacctggtgcttatttagttccttgtttaatacggaccaagatttgcatctctctttctctctcctccctctggaaaagggagattaagtgttggctttgttgggtgaaggcgaggcagtgatgtacggatgattcagatggtatgccctcatggtcgcctcctgctctattcttcgtgttctgcgttgtgacggagggagctttatttcaagtgctgtgttatgtgagctttatttcaatttggatgtgtcgtggtaaccgagtgtttggacgtgttctgagaatctgagatgttgcagcaaaatcaatcaactgctgttgaggcacggcgccttgtcgtgggtccttccgg

SEQ ID NO: 37229 - DNA, 697 bp, Zea Mays
caggctaccgcgtcccactctgtgaccatcgagctcttctctagcggccatccttctttgttagccgtagccgagtagcgcgcccatctccctgctcacatcaacaaccttggaccgcgcgctccggcgtccgctcgccatggagcttcttccctgcgcgcgcccggccctagctcggccttctccccggagcccggccggagctccctccagctcgtccatggcagtcgcgccctgtcgaggttgctcccatggtcaccaatgctccctttgctcgtctccatggctgtcgcatcctttggtggttgagctcactgttgggatctgcttcgtcgccgaaggtcttaaaagaagaaacaccttcataagatcagtacagaaataacactgaagctaccttctaggaaacttcggcataacaacatgtctcgagatgaagggttgcatcgacttaaagatgaaaagacagatcgatccatgattatttgtgtcttgattgtaatcggatgtaaagagtataaatgtaatttcacacaggctatgctctgtgcctataaatagatgaacaataccactgtactgttcacgctgacttgtactcgctcgtgcgacacgcttgtactttctccttctgtcaagccgaaggtacaaatgtaatattattttatttatgtttatccatgaaaatatgaagaag

SEQ ID NO: 37230 - DNA, 2531 bp, Zea Mays
tttctatttcaattcaaattttaagaaatattcagatttcttgcctattctgtacaataaaattagttacagtaaattgctatgatgtgcataaaaatgtggatattattgatacagaggatgatgaagtattgaacacttaacataagtcttgattgatatgtgtgttctgatgaagaggttccaggctatgtcttttggttactgctgttagagtgggtgcactaatcagttcaacccaaaagattaagatgatgggagaagatagttgtcggagagaaaatccttcggtcggatggcggagtgcacccaccctgatcctaagatgaggagggggcctagggattgcctggttagcagcaagaacacgagaacacaagggttagagtgctttgggccgccggagcgtaataacctacatccactgtgagttgtattgcatgagagtctctgtgcgtatccgtcctctcccctgtaacgttgcatgtcctcccttgtatagtccaagtgggcacatacaaggaagctgagctccgacaggtgggcccaggaatatagtaataaaagcatactgcatggaacaagtaacgtcatcggcggacaaagatcttatcttggtcgccgtgcagatttcatgaccaccttctccttcgccctgtctcgttagcgtacgggtgaaggctctagtataggttgcagcgtagactggcatgctgacgtgcgtaggtacgtgtgcagtcgcctgtgttgtcacgtccggccgatcactgtagcggactcaatacctgaccgaacgacgcttcatgatggtgtcttccacgcgcgtgtggcacaacggtctcggtaacacacaaagctctgagcgtgcatttaatgcgtgcgacgctaccatgatacaatgtgccttggtaacgtgcggggcggtcatagaggcctgtcacaagcctgccaatgctctgtgcttggtcagaattctggatttcactgatcacgtgtggacagaatgtttttcaaacttgtatggaagatggatgcacctagatccatgcgaaggagtctatgataatcccttactgtacgagaaagggtggaacaagaagttaaattatgttattgcgatttctaaagatggagtacgggacgtaacaaaacgctacaccagaaagtggcatgaggttctctctaggcgaataattacctccgaagaaactgttgtgtctgttctatcatctataacagggaagtatcgcacaggtttgtcacctgatgctctatcagtcatagaaaaccgtgaaaaggaggagtctgaggaacttagaaaatctgcttatcttcaagttgaaacggctttatccttacctggaaggcttagtggttctgtggaatggaggaaagcaaggtcagagttgggccaagcagattcactaagttgctcatcctgccctattcggaagtgtgtggatggtcatgtttcaaatatatatgatgctctttctgcttttctttcacatttttttgacaaaaaaatccctaaagaaagaattattgaagcttttgaggcattgaagactttgatgctaactcttaaaagttccaactttaagagcagaagtgctacattagaccagaaagcacaccatctatttgaggagatatttccttccattgaaagattgttatctgctatttcactgaaagcagagttgggaactgctggataccaatctgtgaccgtgtctggaaatccagtacactcatccttagcgttaccagtagcactggatgcagttaatgagatattgagtaattataagaataatacctttttcacagaaggcaatcatttcccaagagggaacagagtatgctcaggttcagtccttgcaagcagggaacaacttccaataggaattgcaacagcagcttttgacggcattcactcctccaaatgggaagagcctgatggagccaaaggatgttggctgatttatacaatgcaagatggcaaaagttgcgagttggagtcatatgatttgatgtcagctaatgatgctccagagagggatccaatggactgggttcttgaagggagcgcagacggaggctccacctggaatatacttgatgctcggaattcagaaatgttcgagagccgtttcctgaggaaaacatttacagtggataagagatataaggcaaatgctttcaggtttctacgcgtaagagattcccattctaatccaaggtttcagataggatcaattgatctatatgggaaaaccatatgaactccccccggagctgtgtttcacttttcggctttctgaactgctcggtctcacgagcctgtgtagtatcataaattcataatattgtaatgcgagcatttactgtggacgcaacgctctcttcagtatgaatagatactgaataattaagagcatgatatatattgtttgcgcgcgcgattgagttctgaaatataagtgaagtccctcgacatgatcaacgatcctgttttcttgaactca

SEQ ID NO: 37231 - DNA, 1257 bp, Zea Mays
aagaggaaaaggaggagaggtggccaggtggtggagggcggtgacgggacaaagtagtggcctgggcgtgccggcgcggaggagggggcggccatggagaagggcgcgggcacgcggcggtggcggctggtggaaagagggtcggatcgtctcgccttcatcaacagccagacacgcagcctttcctgcgacccgattccagattcaccatgtcgtccagagtttgaaggtagcgctggaattcaacgagctgatggtcgccaagaaatgaaggctagtaccttgagctatgaagatgagcttttccgcaaatttaagatgggcagttcagtccctgaaatttagccagtaaatcaaacaccattgtgtacccatgatctggaaactgtgagtaacaatgcaatccatgctggagttagtaagaatacaagtgatgacagagttagtaagatgacaagtcttgatggagcggcaagtgtccaacctagcagagaagtggaaatgagacccagatctgcacgtccaagccagtcaaccgaagtggacaattcaggttggtctgtggaaactctgaaggaactcttagacttcacgccacaggagataaccaaggccatatccgcgactgagagtaaccgtttgttagcatctgtcgccattgctttgctggtggttctttcgaactagggcttggacatcggtggtgccatcaccagagtattggttggtacaaggccacttctatttctcattataaccaacatcaccattgtcttcacattgttgatggagaacaaagaccccaatgtgaaaagcaggcccgtcggcgccaacctgggttctgccgatagcttagggcagatgctagagatcggtttgctgctacagaaagccctaggtgctctgctgattgactgcagcgtttgcgctgttattatgatctgctttcttggattctgagggagcctaggtagaagttccgcagaaatctttgtaactattttgtcccgtgctctgtactgcatcgttctgctactgctattcaattctgtatcatctcactttggcagagttttaatttatgtactccccgttttctgttttctgagcgtatgcagttaattaaaccaggtcaactgttttagccagtattttttggtaaccttgtatattgattatttattatgacaaagcaacctcttatacagttttaccaacgatgaatataatgtcgactgtgtgcctactgcctagtct

SEQ ID NO: 37232 - DNA, 5344 bp, Zea Mays
cgtcgaatcccttttcaacgcctccgtttcgatgaagtcgaatgtgccgtgttttataatggtataaatctcctaaacacaaggagaagagagctgcccgcatccgcgccgcgctgttgagaggagggagacgcgaggaggaagaagcaggcaaacaaagcagaagctccgtcccatccccggcagtcccctccatccaagtgatttcaggtatcagctaccgagaaacggagaaggtgaccgcacctcacgcaattcgcccccgccccgccgtcctttccctcctctagggttgtcttgtgggtgcctctgcttcccaccctaggggcaggtccagggccggtccttcttctcgccccgcccccgctgctctcttctctgctgctagagttaggttagtgttcggcgctggggggaggggcgtcctcctccctcgccgtcgccgccaatgcctcccggcggtaggcgcggcgccaagcagcggcccaactggaccagggaaccccagctaggtgacctcgtcctcgccaagatcaaggggtacccgcgttggccagctaagatcagcaggcccgaggaatttaatcatgagccaacgccaaaaaagttctttgtctacttctatggcaccgatgagattgcttttgtaccgctggcagatcttgaggaatttactgagaagacaaagaatgatctgttagaccgagctccaaatatgaaagttaaaagaaaatatgttcaagtatttaatgatgctgtggagcagatctgcaaggcctacaatgagttgccaaaaacatctgaagctgcaaatggagcattgcctgatcagagtgaaaagccttcagagcaccttgtgaggtcacaggatgttggtgagattccaggattgggacaaatggaaggtgatagccctactgattactcgcatacttcagcgaaaaggccagggaccgaggaggatgtcaaagatgatggtcatgaaatatgtgatcattctttagcagtttatcaaaagaaaacatctttactagaggatcctaagcatcccatgacaaagaagtctgctgcatccaagtcttctcttgacatttacatggaacaggagcattcaccaacatctgtccgtgctgaaagggaggctgaagaggtgaaaattgaaaaagagagctgtcccctagatggttttattttggaacctaacttggaggtagtttgtgcccttgaagtgccaaagaaatctaaatccaacaagccgttgaggaatgctgaaaggaaggaaaacaaacgtgctggtattggtagccctattgaaaggattgttgctgaggctgcatctgatgttgtattaaacatgagtgctgacaaagagagcagagaatttaagaagtcaaaaatcatgacaaaacaatcactaactactgattcagagaaaatggattataataaaattgtgcatggcgggcctgacgagcaattgactggaaaatcatctgcagggttttcttccaataagaaatcgctgccagatagtgggcagcacaagatggacagtagtgctgatacacgtccgggaaaaaagccaaggcttatggacagggctggtgaaacagataagacagttgacaagagtgagatgaagtcaaacattgattatggaaagcattatgctgtgaaacatgagcggcctacctctatggaaacgtgtaaaaacacgattcttaagaccagtaccagcgatgatagggcactgagatcaggtggtgttgtatcacccatatcaaggcttcattctgaggtcatggaaccagcatgtggttctgtgacactgtcaactgttgctgattctgttaaaaagggttccagcatgaaggaggatgcctcacgtgttgataggcaattggtgaaacctaagagaagagcatgtcgttttgatgaagatgaggatgaaggacagcgaacaccacttcatagaacttctgctaaatctctctctacacatatagtcccaactgagaaagcaggtattcggggaaaattttcttctcatgttggcaatgtttttggaaaaaagttaggccctgcaagagaagagaaatcaaggagtgttaggatgtcacctgtgaagcatgagccaattttttcttcaccgagtcaggataaagtgcatgctagacaccaggtagtcgagaaaagactgatcacagggttggttgagactcctgctgtcattggtaacaaaatgagcctggttgatggcaaatcctctgctcaagtaaaaatgccggcatcctctgaggtgaagaaacttcgtagtagttcttctaaaccatcacacctaacatctgggaactcccattcccgaaactatcctgccccagaaaagatccccttgctgccccaaccagaagaaacaaaggctaaatctaagctagctacgtctgttgagcataaggtgggcaccactttgtcaactgaacagagtgggaagcgggatcacttgaaagaggaaagatccagttatgttgataaagcagtttcttctgaacctaaccctggctcggccaagtcaataaaacatcttattgcagctgcccaagcaaggaggaaccttatggcttctgttcatgcaaaatttgatgggtcttcgactgataatgctgatattacgtccacaccatatggtttgccgggactaagccctagtcctgttttccgcattccatccccacccagaattgcttttcccgggagtcctggtcaacgtattctgaaaagcccaatagagtttgacaatggtcatggaaagagtcccaaatctaggcaggccagcggttcacctagtggtggtactgatgcagctattgctcgtgatgctttggagggaatgatagagactttatcgaggacaaaggatagtataggacgtgcaacacgccatgcaattgagtgctctaaatatggcattgctggagagattgtcgagcttctcatacagaaattgcagagcgagcctaattttcatcgcagaattgacctcctttttcttgtagattccataacacagtgttctcattctcagagaggagttgccagggcttcatatgttcccactgttcaagcggcattgcctcgtcttctcggtgctgctgctccacctggagctggtgctcgtgaaaaccggcgccagtgccttaaagttttaagattgtggcttgagagaaagattatgccagaagacatactccggaagtacatgggcgacattgaggtgccaaatgatgatactagcactactttaatgttgaagcgaccatcccgtgctgaacgttctgtagacgatcctattagggagatggatgacatgcttgttgatgaatatggaagcaatgcaacttttgagctttctggaattttatcatcaaaagtgtttgaagatgatgaagacttccctaaaaataatgggtcatcaccatttgtttcacaggcacggcctgttgaaaatgatgtcatacgaaaaactgaagatactattgctccagtatatgttgaggaacacattattatagtagagaatgtaactactgatgctgctatggaagatgctttagagttaccaggcaacaaacaacagactgatggagctgtccttattgaacacgactctattcaagatccaggttcagagcaggcaattgaccagaatgactttccctctctacccgatggccctccaccgcttccgtcagattcaccaccacctccacctcctttgcctccttcaccaccacctgttacaccgccgcctccgccaccacctccactttctccagcttcaccacctccgccaccacctcccccactgccatctggaccacctcctcagcctgctccaccacctctggcaacccaggtcacacctcttccttctattcctccgcctgttccttcatctccaccatcattgagttatcagcctccagctcctgagtactttgtgacggccaatggtgatcaattaacccagatgacaggaaatatattgattcaagctattggaaatgcaacaaccttcattcctagtggaccagttaatggacaagctgcggttaattttgttacttcgatgcaggcagaatatggaaacaataacatatttatggcaccacaagcttctaatgtcatttccaaacagtcagagccattatccatccgaggaacattggcggatggcatctggtaacttcagcccagatggccagcataattggctagccggtggcggagcattaccttgctcagaagggccatatgtgcaggatggatattcaaggtcaaacattgacagatcttcaattaatcctatgaaccatcaacatactgttctgaatcatttgccgtatggagcaccactaccaggccatgttccgcagatgctaccagccaggtctgatgtccacactcttaattgctggaggccctcttgatagagttgtaaactgaacttctttatggttttaacgtggaaagctcagaacactggaggcaatttgaattgagtgcaacaattcatggctttgttagtctgtgagatgcacttgcctcattgcctgggtgtaacgatgagatctgccatagtatatggaatggacattttacaatgtaactagtcttggcaacagcatccagcagactaatctctcttagtgtctgaagaacgatagccgaacgatgacagggtttgatttgttgatgcgtcgttttggttctcacccgagccagtttttgaagtgaaagcaataataatgttgttggtgcaccgctgaggtgtttaggttttactgctggtttggtgttgggtgatggttcctatcatctcactaaacaagattgttgactgtacatctgggagggaggtgatctgggatattgaggtgggtatcatcatgtgacggcgaggcacttggtgccaaatcgtactgaattttgttatctgggtctcagtctgctgcttttgtcccgcccgtattcgtttattcccgcaggggcaggggcaggaccctgttggctggccaggccacatatcctttttagtcccaagcaagttggagagccacacagtatatattatataaataatagtgagacatatttttttatgagattacttaaaagcaaatcatctctcgtcgtcgtgatacatggtttgttttcctcttttcgtcgtcctactcctgccttaccacaagcaggcacggaaggctgcacgggcaagcattttgcttataaagttcagggtgctgcagatgttggccaatttctaatcttgatacattattggccg

SEQ ID NO: 37233 - DNA, 3690 bp, Zea Mays
gagtctaaacaaagcgccagacagcctcctctcctccggccggaaaaaagcaacctcgcagatccgcggccccccctcctccgctcacaggttcaccgcatcgacgccactaccgtttccactgccgcctcgaccccgctccaccaattcttggtcaagccgctccagctaagagacggagagccctgcggaaaggggagacgaggggagggtgcaaaccctagccgtagaccgcgggctcctcctcctcgccggcggcggcggggatggagatggtggtggcggcgccggcgctccccgccgaagtggagagggctctcatccgggacataaccgtcgcggctgatgcccacgccaaggagggagacactttcttcctcatcaccaccaggtggtggcaaagttggattgattacctcattcaagatttgactggtgcaacaagtaatggttctcatcatcatgagtttggttcaaaaactcctagaaggccaggagctattgacaataccgatttaattgatgatgtgccacttgaagtctccaacatggagattgagatacatgataacttggttgagggtcgggattacatactgcttcctcagcaagtttgggaaaagttgcatggttggtatggtggaggaccaacattaccaagaaaggcaatcaatactggcttttctcaaactgatttggcgatagaagtttatcctctacgactgcagttaattctaatgtcaagaggagagcgaacctttataaggataagcaagaagggtacagttggccaactccataaaatggcctgtaaggtttttgacttggcaccagatgaggtatgcatttgggactattatggtcgaacaaagcattcattgatggatagcttggacaaaacccttgatgatgccaacattcagatggatcaaaacattctagttgaggtaaccactgatgcaagtggtagtctggatggtttggttaagcgaaacaatttttttgagagtgatgctccgaaatcaggattgccagatgagaattttgcagccaacaactatgcttccagaagctatagctctagtctgacaccaagcatctacctgcgatcacccaatggtgatctggataatgtgcatggttctagtggcatgatcacgaggggatcgcccttaggtcttacagggctacttaatcttggaaatacatgctatatgaacagtgccatacagtgtcttgtgcacacaccacagtttactaaatacttctgtgaagattatcatcgcgaaataaatcggcaaaatccactgggtaatgtgtcatgtagggtgaacttgcattagcttttggtgagctattgagaaaactctgggctcctggaggacgtgcccctgtttcacctagaccattcaaaatgaagctttctcggtttgcatctcagttcagtggatacaaccagcatgattcacaggagctgttggcgttcctattggatggactccatgaagatttgaatcgtgtgaagcatagaccttacataaattcaggggatgctgatggaagatcagatgaagaagttgcagatgaatattgggcaaatcatattgccagaaataattcaatcattgttgatgtatgccaggggcagtacaagtccactttggtttgcccagtctgtgggaaggtttcagtgacttttgacccgttcatgtatctttccttgcccttacaatttgcctcaacccggagcgtgactgccgtggtgttttcttgtgatggtagtgttccaccaacaccattcactgtgaatgtaccaaaacaaggtttgacgattgtgtgtccttaaacattttggttgaatttatctacagatacggaatcataagatctaccgttttattgatgatccagtgcttcagctgtctacaataagtgatgatgatcatctggcagtttataagctcccaaagttggaaaagagggtgaattacattcagtttgtgcatcgtcatgaagatctggaccatggaaacaataacagcttgacatcttggaaaccgtacggtgttcctcttcttgcacaaatttctcgcaatgaaattgtcacgggttttgatatccatgagttggtccataaaatgcttgtgcccgtgctaaggaatccggactctctgcatttggctgttcaaagttctgtttccacaagaactcatagttatcataccgacagcagcaaatgtcagcttctgttggttgatgatagcaacacagtcattgaaaaatcaaatgatgctatcaggatcccacaatcttcacttgcaactgtattttttatcaactggcccaaggcagatctgaaaaagatagacactcatcatttagagtaccttccagaggtgtttatgtatgctccgcctgcgaagagaacccgtggtgaagctctgtcactctatgcatgcttggatgctttcttgagagaagaacctcttgtacctgaagacatgtggtactgtccaaggtgcaaggagcaaagacaagctagcaaaaagttggatttgtggagacttcctgaagtactagtcatacatctaaagagattttcatttagtaggtcaacaaaacaaaaactagaaacttttgttaattttccaatacatgacttggatttgacaaattacattgccaataagaagacttcagagcgccagatctatgagctgtatgctgtgagcaatcattatggcaacatggcaagtggacattatactgcacacattaagcttgtggatgagaatcggtggtacaacttcgatgatagccatgttgcttccattgatgaagatgaggtgaagactgctgcagcttatgtgctattctatagaagggtcagagaacaagacatagcaaggggaactagtaatggatctcagttatatgcaaaaagaagtcacggatatagccataggtaggctgatgattactgtggttcggtgcaagggggattctggaaatgacacccgcacgcctttagtcattgccaggagtatatggcttgctggaaaaaatgctcatcacgtgcagtcaatgcaccgttgtccagttgtcacagaagatatttcgtgcagtgctggtacaagatgggaattttgtatgaggtgagttgaaggagtaattgactctttatgataactgggtagcttcaacaggaacgccggggcttggtggcattttgttcgtctgttttcttctagaagagaaacaaggggaggcaagaaaacatttaggaaacaccttttcgttaatttgattttttatttccatttttagatttagctagtctgtacactgttgttggaaatgggtccgctgttgttggtcgatgcttgtggtggccaataatactacacccaactataccaggctctgcaatggcgaatcatggtgcacattatggtgctctgttgcgggaagaattgtagctgatgttgtacttatatactggcaaaaaggccccagaaatgtaaaaatgtatcgatatgctgacatcttaaaccctattttggattcgtgctctttcctatggatgaaggtgtgcgccatttaggggttgtttgtttgaagaatcaatccattctaggtaggtgattatcacgagaccatttcataaatttggtgaaatgaattcatttt

SEQ ID NO: 37234 - DNA, 775 bp, Zea Mays
cggacgtgcctgctttctcgggcgtgctaggcgctatccatcctgagccgccataaccaccgcctgctagtgcagccagcaagccgctcgccacgcgcgcgacgccgtgtttggcccccaccgccgttcggccgccttccctgccgccggtccgccgtactcttcttcgctagactgctccccttctccatcgatcacttgctccactacgcgcaagacgcaaccgtgcctacggcctgctagtgcctaacttcctccccctctctatgcgtgccactccaggcgtcgagctcgcctctgcgggaccgtagcccccacccctcattggctctctgcgcgagcgtgatcgcgcctccgcatcccatgttcagtggagccctaaaggtaatgcaaatccattcacattccattttgggtttccacacaaccgatctatatattagacaaaacacaaaatcgatttagtattctttattccaagttctggctaccgatgctggaggatttggaaaggcgctgtttgattagaagacgagcatcctgacaagtgggtacctatatcctgtatgggccattttctggtagcagtttgtttcgcatctccatgtatttctcaatttggagactggagagagaacaacagagagaaactgatgttgaggagaaccatagaagtaattggttaggcttgagattaggaatttggcaaacaggttgtgtttctacgaagatccaaaattccttggaccaaaagcttcagcttccaatagtcggt

SEQ ID NO: 37235 - DNA, 1321 bp, Zea Mays
catgcacaaaattggcggcagcagcaacagcaccagcggaagagttcgggctggcgaaggtgacggcgatccaggcgggcacggcgccaggggacttccagaacggcgccaacttcgccatcatctcggccaccgccaacaacggctccttcttcgcgggcaacggcatggacatcaggcccttctcgctggacacgcagatgctgtggttcaggacccacctccgcgagctcgtgcaggcggcggcggcggcacagcagaacggcagcgtgggcgcgctgctgagcggcgcgctggtggcgctgggcgagatcggagggaacgactacaacttcgccttctcgcggggcgtgccgcgggacgcggtgcgcaggttcgtgccggccgtggtggacaagctggcgggcgccatggaggagctcatcgccatgggggcgcgcgccttcgtggtgcccgggaacctacccttcggctgcacgccgctgtacctgcagcggttccgcgccaacggcgggtggtgggactacgacccggccacgggctgcctcgcctggttcaaccgcttcgcccagtaccacaaccgggtgctcgcggcgcgcctcgacaggctccggcgcctgcacccggacgtgaccatcgtctacgccgactggtacgaggccacgatgagcatcttccaggaccccgggaagctagggttcacaaacgctctgcggacttgctgcgggaaccagaccgtgccgtgtggcaggcccgggtgctccgtctgcaaggacccgtccacgtacgggtcctgggacgggacgcacccgacggaggcggtgtacaaggtgatcgccgacggggtgctgcacgggccgcacgcgtcccctgttcctctcgccgacacctgtcctccgacatgacccttagaagatttataattggcagctttaagagcggtggtaacatctgaatcgtacttgcgtgattttaaggatggcacgataatagctttgtttaagaatacaggtgaggttggcatatttcgatagcataagcatacacacgaagctctgaagtgataattgagtttgtataaacatcatcattgatttagggggtgtttggttagagggactaaagattagtctctagtttttagtctcttttagtctcttttttaccaaacattaggactaaaatatgaactaaaatgatttagtctgtagtccttcacatatgtgctaaaagggactaaaccatattaattccacatttaccctttatttagttcaattgtactaatagtaggagaatgttaaaggctattttagtctta

SEQ ID NO: 37236 - DNA, 811 bp, Zea Mays
acgtgcagccgaacaaagccgcgggcgctgctgttgcgttttgttcccactaccgtccgccacagcctacgcaccttgccggctcgcgggggttttgccgtgcgccttctccctcctcctcgctcgcggcgacgaccgggggaccgcagccaccgtacgccaggtgcgcaggtcttctttgggcccgtcgccggcgacgagcacccaccaggttaaggtcgaagatcaggccgaggacggcggcgcagatgctgatgccaggggtctcagggagtctgctctggatccgctgcctgtctcggtgcatgccagcttgaaggaggaggaaggtcaaccaagttcttcatctggtaaactaagatcacagtttattggaatggggttttcatccaagctggtagacaaggttctccagagacatggtgatgatgattctaacacaattttggaatctcttctgtcctattctgaccttcagcagtctggatcagagtcatcagattctttcggaagtttttttgataatgataatgaagagaacaattctccttcagagtctaggaaaggaatctaccaagacatcaagccagagcttgattctttctcagagaagtggtcatttttactcagaacaatgaacttttcacaacaagaagttgatttagccttcaagcaactaggtacatacacttctgcgcagttgacaaatttgttattgagtgttcagattgcgcactgttagtttgttttatgtaattttttccaacaactatactgcactattgcccttgtagacccaaacagtactgat

SEQ ID NO: 37237 - DNA, 1293 bp, Zea Mays
tcgaccacctcctttcctttcatttcctttcctagagttgcaaattctcttcaacacgcgcacatgtgacatgccccatggtcgccgccgctccaggcatcctcccgtggcctcacctccctctcccttcctcctcccacccgtctgacgcctctgacgccgccgcagcagcaacagacgccaacacctccgcgtatgacatccagatcttcgagcccacctccatcgaggagcgtcgtcgcctcctgatccagcggcgtcgcctccgactcgccgcctcccatgcctcgcggctcaccgttgcctcgcgcgtctcctccaaactcatcagcgccaccgcctcctgctccagcggcgtcgcatccgatctgccgcctcccctcctcatggctcgtcgttgcctcccgcctcttccccaacctcgcccttgccgcccttggaggatcccaaatccgacgacgagctcagtaggcccacgcagacgcggatgtgctatgaacttcagattctgtatcgatggcaatgggttccagaacagtacacaaggcaatttcaagacggttattcaattgctcaaatagttcaaatgtgatttgaagtattcaccttttgacatggataaacatcttctctctgttgcatttgcaggcgaaagaaggctcatgtgctgcttcgaaaatcagttctaagaaggcaaccagggacaacaaacctgataagggaagaaacatgttctggataaatattggcctttgtttcaagactccaagcccgccaccatccagggatcaatcctcaccacgaggaccaggggtgatgccaacaaggttgagaacaagtcaagagggtttgatttttgtcatgacttggatgatagatccgtgttacgataccagcatcaaagccgcctagaagcaatactgaactttcacttgagatgtgagtagttgtagtagtagcccaaactctggaatatagtatcatcattcctagatatgtagttgtaaattctctgcccagaggtttgagctatcactcagattatgggttcaatgtcatgtatagagtcaagaaaaaacatcttctgtgcgtcttcgagtctttcaaaggcaaaacaaattacacgcgcgctgacgcgcaccaatttactagtatatattcaggtacaaagtttgttccgatttctgtgaattgttcatgcagaactgggttttggtggtcatcacgaaagttgtagcaagttttctgcagatttccataatacacatgtttgcctcatttggggccagtgaa

SEQ ID NO: 37238 - DNA, 232 bp, Zea Mays
cctagggtttcaccaagaaattctgcaagaagagatggggaagaacatctcgttgatcctctcttccccttcaattcaacgtgctcctcctcttctcgatccttgctgcgcgggggaagatctagagggaggaggaagccgtggagaggggctgccatggggaggagaggacggccagcccaaggggaaaggagggaggggcggccaagtgtgggagggggggaaggggtgg

SEQ ID NO: 37239 - DNA, 629 bp, Zea Mays
cgccgatcggttcccccccgagcacccaaaacccaatctgacggagctacacgcggtatttctgattgcgagctcaaagaagggcatctcaccggttgtcgcggcatggaaagcactcggccacgaacagcgcggcccgcggcggaggatagaacgccgacgagcaattctccattccctagactttgcccatacacgacaaggacctggaagcccatggtatgcaccagcgagcgccctgatcacgcacagggacccgaagagcattgtctggggttcctagcgcggtggcgccagtttctcttccctgtttcagcttggcgcatgggccctctgcttaagccgatgccctggacgagaggaggtggccgggttttataggtagtcccgtgaggatctcggccggagcaacaacctacagaggggagctccatcggatccggcggccgcggcggcgtatcccaaccaccggaggaagaagggggtccctgaccctgcgggcccacatgtcatagacgccaaggaagaggtgaggagaagggctggcgcgcagcgtctgtttgggccggcaggagcacggggaaaaggggaaagtgggccgtccgcaaggacattaggcccgagagcca

SEQ ID NO: 37240 - DNA, 3296 bp, Zea Mays
tccgtcgccagctcctagaaacccctctcctgcccggcctcctccctctctcatccgatgggcaagtcaagcaagaaggcggccgccgtggctgcagcgccagcggcggtgcccaaggggaagaagcgggaggcggaggacgagatcgagatggccgtgagcgcgaagaagcagaaggcggcgccaccggcgaaggccgtgccgacgtccaagaaggacgccaaggaggacgccaagtccaagaagcagccgccccccaagaaggctgagaacagcagcagtgactctgaagaggaccccgagtccgaagaggagaatttttataatttgattgagtcggggagggcagacggagatgaggagtttgacgaggacgaggaggacgggttcgagttcggtgacgctgacgaggcgatgcaatgcgtggtgatggcggaaagcagcaccaccgccgcggcgctgcgtgctcacacgcaggactacgaggcgctagctgcgcacaagcgcaaggcccttgccgaggagcaaccccagagggaggagggtcccaaaaggccaagaccggaccaactttcagaagcagaagcagcaaccatgttcgaccaactgatggaaggctttggtcttaggcgtaaaagaagggcaagagaaggggaagaaagaaaggaacaaagaataagggcagtgctgaagttattaaaaagttgggtgatgctactctacttttcgctgaagaaaaatttaacgaggcaatacctatactacatgagattgtgcgaattgcaccaaatttgtcagattcatattatctacttggtagcatttatagtgagattggtgaactagataaagccataaacttcttgatgctagctgcatatgtttccccaaaggatgcatctctgtggaagaaacttattcccttggcaaagaaaaagggggatgcttctctggcaagacactgcattttaaaagcaatgaacgcagatccagaagatgtagatctgaagtatctttgtggttatatgtatcacaacctttgtgaatatcagaaagctgcagaaatatatgaacaaatagtcagaatttatcctgccaatagtgctgttcgtaaagtagcagcccagatgtacagagagtgtggtcaaattgacaatgctattaatttgttgaaagactatgccgatactcaaactttcaacattgactggagcgttctagatttattgatatcactttatctaagaaataatgtttttagtgaagcactaaagcagatcaagagggcacaactacatttgggatctcaacagaaactaccagtacaattgcaggcaaaagaagtaatctgccatgcatattgcggtgacatgaaacatgctgagattttccttcgtgatgtgcgtttggagccatcaaaagaaaacattgatgtgctcaaggaactcgcaagcaatttagaaaaaatgggacgatatgagtatgcagtaaagttttacctgctaattgaaaatgttgctactcaaaatgatggtggtttatgctttgatcacaaagaaatgggtagttggtatgtcaaagctgctcagtgctacatgatcttaggggacaaaaaaaatgctattccttatttttataaagcgttacaaagcatgaaggacaatattggtatacgattgaccttatcctcccttcttattgatgacgacaagacagatgaagctgccactttgctttctcctcccaaaattccagagttgcagtctgctaatactccagaccaacagaaaccttggtggtgtgatgggaaagttaagatggcgcttgcaaaactttattacaataaaggaaatttggaagattttgtggacacaatttttcatcctattctagaaactttgaatgttgaatatgctaatcgaaaggtcaagtcaatgagaaagcttccaaacattgttctgcatgaaagagtcaaagtattgggtgagcaacggccagatagtgtatttcaaggattaaggccaatagcatcacctgatgaattacaaaaggcaaacagagcaaagaaattaattgagaaaaggaccgctgcaaatgaagagttaaaacatgattatctgccaagaacaaagcaagttcctcctgttcctggtctactgacaaatgtggagcatcatcagcttgtgttaaatctttgtcgaacattagctttgctgcagcgatattgggatgcactgcagattatcaaccgaaccctcaaacttggaaatgacgcactcactggtgacaaaaaagaggaactcagatccttgggtgctcaaatagcttatagagctccagatcccagtcatggctttaagtatgtccgttacgttgttcagcagcacccatattctcttgccgcatggaattcctactataaggtggtatcaagaatagaggacaggtttccacatcatttcaaatatctccttcggacaagagaagcgaatcctgactgtgtgcctccaataatcatatccgggcatcgatttactgctataagtcagcatcagtcagctgcccgggattaccttgaagcttataagctggacccagaaaaccctcttattaatctatgtgtaggcactgccttgattagtttggcccttggcttcaggcttcagaataagaaccagtgcatcgtccaagcttttgctttcctgtacagataccttcgcctttgtgataacagtcaggaagcctcgtacaacattgctcgagcgtatcaccacattggcctgaataccttggcagctgtttactacgacaaggctttgtcaaccgaggagaaggatcatcccatccccaagcttccgtacgaggctggttcacgtgcgccagaggatctgaggccagggtattgtgatgtgcgaagagaggcagcgttcaatctgcatctaatctatatgaagagtggagctaccgatcttgcgagacggatcctaaaaacttactgcactgtctaaaagctggtatcgggcaatgttgttgggatcggatatcagatccttcaaggctccttgcattagcttaggatcaagctagtctataaagctagaacattggtgtaatatgtcactagtgactttagatgtgtagctgaagagttaacaacgtgcttgatccagatttaaacgtatattctggtttcacaatgctgtgttatagtcaaatggttcagcgatgctttgcttcatgtgatttattggcaattcattattatttttctctcaaacgcacaggagaacgcatag

SEQ ID NO: 37241 - DNA, 4030 bp, Zea Mays
gtactgtttataaaatggtaaataatagcaacaactcggtcgagtataagactgtacgtagaaacaaatacaaaagaaaaactcagtctcaggttgcagacctcccgacgccggccgtgccgcttccgtcctcgctttcctgtcaccgccgccgccgactgccacaacctctttcccatccctctcgtccccatcctctgccgccgcccccatcctcgccgcggctcggctggtgcggagcggacggacggagatccgccgacctcgggctccgctgcgtcatcgctacgccggctgaaggagtgaagatgatagacatggtgtctgctgttgaagagcttagtgggttaagctctaaagaacttaatgagatgctgaaggagtcagacaactttgttttgcagtccaaggcagaaggcggaggtccaaagcagacacttgtggacatggaaaaactcgtgtcctcgcttcctcttcatctcattgctgtatgtttggagcttcggcaaggccccgatttgacatatgtgcttcgtggcatgcgctttttgcatagtttgtctgacctagcatcccgccatactagactggagcaggttcttcttgatgatgtcaaattatctgaacaagtcatggatctgatattcttcttactttctattcttgctgaacagaagaaggagaataatgttggcgcttctccgcttgtgcatgcgtcacttgtagcagctagtcttcatctgctaacaagttacttctcttcccagtggcatgaacttgtccatattctgcttgcacatccaaaggttgatatctttgtggatgtggcctttgatagtttgcatgaagatgtgaggctgttaaatatcagattatcatcaatggacttcggtatctttcctgttggttctttggaatctcgtcttgctcacttcatctgccaacagtgtgaagcatcattgcaatttctcttgttgttgtgccagcaaaagctgtttcgagatcggattttaagaaataaggaactctctagaaatggaggcatactgtcactttctcacactatactgaagttagctgtccctgaatgtttgaagcaatcaaccgatcttgttgcttctatttccaggctcaaggcaaagatactttctattctgctgcaactttgtgaggctgaaagtgtctcttacctcgatgaagttgccactaattcaaacagcatgcggctagggcaaaccttggctctagaggttcttaatttgctgaagattgcatttggaaagaaaaaatacattacttctgattctcatgataaggttaagatttaccccatgggatctatgcttatcagtgcattgcgtcttgttgacgtcttctctgatgattcaaacttcagatcatcctttttgactaacactgttccgtttttaacccagattctagcaactcctcacggtgaatttgtttctagttggtgctctgtcaacttaccagcaattgaggaagatgcaagtctagattatgatccttttgttgcatctgaggtggcactgttagcttctaataatgtgttgactgaagctaaagctgactattcatgcccttttcgccctagcctgccttcagtggcatatgcacagacaagaacatcatgcgtagtgaaaataatagcaaatttgcatgtttttattccaaacatatgtgaagagcaagaaagggatctttttcttcagaactttcaaaagtacttggtgtctgggagttctaaactgtcagcagaccagccagcttctagtgattttgatgccactaaagtctgtagaaacttaggatctttgtctgattatgctaaaacattggttcctaatttgttaaatggggaagacttgttgttattaagtgatttttctgataagctacaatcttggtgtaaatcacaagttgcagtaaaggtggtacaaaatgatattccaccagaaagcatggaggacatgcacccaatgcagcagcccttgccaacacgggcaagcactccggactccaaaatgaataactttccaaaggatgtgcagaacatggaagtgtctgcaccaatacccccaataaatcgggaaggaaatgataaggatgagactccaaagaacacagtctctagaaatggtggtttcctacagaatgcagttggtcaagacctagtccatcttggcgttgcaagaacagccagtggtggctcttcggccgtcacttccgttgttagcactggacaccagcgcagcaaaatggatcttgatccagcttccggtagcgtggacaatttcaaaacaccagaactcacaaaagaaaatggtctccagggggatgacaaaggagaaagtagtgtgtatgatgagaggcaacctaagagaaggaagcggaacattatgaatagtgagcaaatagatgaattagagaaggctctagtagatgagcctgagatgcacaggaaccctgttctattgcagggttggtcagagaagctaagtctgcagggcccagagatcacatcatcacaacttaaaaactggctgaacaatcggaaagctaagcttgctcgcattgcaaaagaaagagggacatttgagggagataatgctgataagccatctacccctcatcccggcgagtcttccgaaagtgctggggaggacaactatataccccctgcaagggtgatgactgctccatccaaaggcagactggtgagcccggacggcaatgagaaaacatcgcaggcagagctatcccccaacacgatgctgatccgcccattcacgagatccttctcactggagcccggtcggctcgtttcactagttgacagcgacgggaaggaggttggcaggggcaagatattccaagcgccagggaagagcccagccccagtggagagccgcatctgcacggttgatgtcaccgagctcaggaccgagaagtggagggagctcccacacccttctgaggcatctgggaggaccttccaggaggcggaggcgaggaatggtggaatcatgagggtctcttgggactccggcaggctgttgcctgtagtgtagcaaggcagaaacttttcgtcaggttgctgtataccgctaggcacaaggtgagcagagggagcctttggtttagggcgagagactggatcatgggattcttgggggcctaagtaacactgttaaaacctgtggttaactgtggtgtatccatcaactaattgtctcaagcaatgcaggtacggagtagttactaattttactgctggtgtttggtgtcacctgcaacgtgacgtggtaaaccaatgctgagcgatggagttgcatgtaaataattcagcactagaggaaaccaaaggggctgcataatgaactttagcttttattgtgggaaaaaaggtgatagcgttcttcatgttcgatcaattaaacagcaccagtaaattgatcatagggatgtggacttgctgaggcttgagtatatatggtgttcctcgagcttccttaaacaagcatgaagtttgtaggcacttcatcacttgttggtgagctacagtaatcttgagcccgaccctataaataacatggttcttaggctcgttaccaaaatgagcattacattacaaagcagcttttagacatatattggccaagaagatgttggagagaaatataagtctcaaatgttgagtgatatgttgcttcgtgaattattctcaaacatttaatgacgaggccacatacgaatttctccattgatttttttcactaaagacaccatacactgacaatgatgagatattggagagaaacaaaagtctcacataattttcattgtatatcatttgtgagattccgaactattgtttttatacaggtcaacatgctttagtttttgttaccatagtagttgtgagtaaattggttataacaagctaacgagcatcaaaggtcgcttcattcaagataattttatgttgctttaacaaacaaacaaacaa

SEQ ID NO: 37242 - DNA, 3322 bp, Zea Mays
tctaccctgcggccttgcttctgttctctcgcgtcgttctcccgtgctccccgcgtgcgctctatctgtttctggtggcgacgacttggcggtcgccggctcgccgccgccgccgtgcacagtcctttattttggggaccttcaccggcgacgagcacccaccaggttgcttcacaaaacttacaacatccaggatacaactaataaggattccttcatctttatctggattttgaggaggttgctgagagcccatccagcagggtgtctcagacatactaatggacggggcgcccaagatccttgaaaaatcatcacatgaatgcatgtactcttggtacttcacccgggaagaactcgagaaattttcaccatcaaggaaagatggtattactgaaaacaaggagtcagaaatacggcatttatattgttcatttatccgggacgttgggatcaggctgaagctacctcagatgacactagcaacggcaatcatgctttgccatcgcttctatttacaccagtcccttgccaaaaatggatggcaggtgagacttgagagactattttgttgtggcagtgatggttacttgctgatgtctatgaaaagcgacaagggtgcagagtttccttgccaagcatttgttgataatatgttatccatgtccaacttaacattacagattattcttcaaatcatttgaattatctaatcttctaatactattactattttaattttctaattacatgataattcatcttgatgctactctacctcaagatcacttcgtgattgggcatttcaaaggaatctaaaaaactcagtcagggagggaaataccgtcctccaggtattatataagagaccgaaacatggtcctggccgagaaaatcaccgaacactggccctccatcactagcgggtcgtcaccacccactctgcaacggcccaatcggaggatggcgcgcaggacgtaacccggaagcgtgcggggcacaacgaggggattttttttaaacgaagtccgaaatttgcccccgagagggatcgaatcgggaacctggaggtgctactcggaagccttaaccattacgctagaggccctttcgccatttcaaaggaaactacgtagctacaaatctacaatgttataggaatgcttattttttagaatctactgtgttgcatcttactgttacaacttaatcaagtttgactgtttgacatactttgatggatcatcttgcaaattacatattcaccaacaattgcaacagtatgtgtatttctagcgtcaaaagttgaagatactccttgtcccctggactatgtagttagagtatcctatgaaacaatgtataggcgggacactgctgcggctcaaaggatccgccagaaggatgtttttgagaaacagaaagcgctcattttgattggagagagattgcttctgacaacaattcgatttgatttcaacattcagcatccttatagaccacttcttgatgctatgcaaaatcttggcatcaataaaaaagaagtgaagcaagtagcatggaactttgtgaatgactggcttaaaacaacattgtgcctacagtataaaccccagtacatagctgctggttccctttacctggctgcaaggcttcacgatatcaagcttcctttgcatggagcacatgtttggtggcaccaatttggtgttgcaccaaagcctctggaagctgtcattcatcaaatgatggagcttgcggctgtgaacaaatcgaatcctgttcgtcccaatctggttaagccaaaggaaactttatgtgaagctaaactgagcttatctaatagcccagactctgtgttgaatcaatcaagcttgttaataagcagctctagtcctgatattggcgagaccagtgaccaagtgcaggtggattcttgtcaatacttgataagcagccatacgggtgattgtagggtctcatgtcctgacaacagttcgttggatacttctggtaaagctcatgatgaagagagattggatcaggccttaataaccaagcatgacagtgggatgatgccttctactagtaaccagacatcattagatgctactgtaggcactgagagcagtgctgaatatatgaagcaggatgtaagccattgcgatgacttcaatatcagagtcaatgaccaaagcttgaaccaggcgttaagaaatcagcatggtgatgctgtcccattacctgacatggtatcactagatgctaaggtggacaaggaaagtagttggtgtctggaaccattgattgcaaacttcgactgctgcattgacagcgttaatgtggatagcttgtgcactgatcagagattggctgatgttgcttcaggccccacagctgatgtgccatccgtgctgctggccaaggagaattctgatcctttgagtgcaaagctcgaaaatattgatgttgccaggataaaaggtttactgatgaagaggaagagccggagagagatccaaaaccaagccattgcttcagatggcctcagtgaagaagcctggattgagagagagctggagtctgggattgtcacaaaacaagaagccaattgtgccgccatctcagatgagctaagtgatgaagcctggattgagagagagctcgagtcagggattgtgaccggaccaacaaacgagcaggcgatcacttttgatggtttgagtgaaaatgattggatcgagagagagcttgagtctgggatcatcattgagccagcacctgctatcaagaagcggaagctggagtcaagctgttagctctttagctgctgcattcagaggccagattccaagcaggtgaataattacagatggaggtaccctgcgactagggcacatcgaagccaagagatgtcgcatagatgggaggatcaatattttccttttttttatttctttaaccaaacacctcggaatactttggcacgagggttgtgtgtacagtgggatcttcccagtttcttgaattcagaatcacacgaggtttgtgtgtacagtgggatcttcccagtttcttgaattcagaatcatatccactgtatctgttccttgtttgtgtaaatctagcatgcccgaagttcggctttaattagattgtaggtgtaactgtagcagggattgtctcgtgttaagcccgacgaaaaaatgattcagtgtaactgttactggtaaccaaagaaaattagttattcactatagacttattgttaacaaaagaaaagacagttactggtgtacgatgtttataaattgatggcgaa

SEQ ID NO: 37243 - DNA, 925 bp, Zea Mays
caagcatacacgcagggacagggcatgtatcgaactcaacaagcttcgacctgccaagaacaggaccgtcgctacaaatcatagctagcacacacaaccacttccgctgtcaagactcaacacacgctctcgccagccaaccgaagccaccgtacccacccacccaatggcggcagcttaccgccacgtcgcgacgcgcggcctcgccctggccctcgcggcggccgtggtcacggcgtggcagtgcgcggcgcagcgggcgccgtccggcccgggctgcatgccggagctcgtcagcctgaacccgtgcatggactacatgtccggcaacgcgacggcgcccgacggcccgtgctgctcggccgtgtcgggcatgcttcgggccagcccgagctgcctctgcatggtggtcggcggcacggccgcgacgctcggcgtcgccgtcgacggcgaccgcgcgctgcggctgcccgcggcgtgccaggtccaggcgccgcctgccaaccagtgcgacgtcgcgggagctccagtgccgtctccggtggcggggacgaacacaccaggggctcaggcagcggcggcgccatcggacgccaataatgtcacccctgcagacctggaacgaccttcgtcttcgccgctgcggcactggcgttgctacatcgtctctgagacacgagagttttcacgtgtccatcgactcatcgtggacgaacctttcgttttcacgtgttggtgtttgtcccaccgtcaggattaagagctcttggaatgatatgcaccttctgcattttcagctagcgttgaggctccgttcattttttttaaagggggtgtttggttaccccaaactaaaatttagcccctgtcatatcgaatgtttgaacctccgttccgggtattaaatgtagtcggattataaaac

SEQ ID NO: 37244 - DNA, 2649 bp, Zea Mays
gtaagactacaccaaaaccagcagcacgccgacacgccgccgcgccgcgccgccattctcccatccgcccccgtgcccccgccgcccttccctaacctcgccgcggaagacgtcgcgccgtgcgtagctagcagttccccgtcgcacgcgcgtcggataagaattggttttggctcttcgtctccccccatccttgggtccttcccctcccactccctcttcgcctcgtccgcggcagtaggctcaagcttaggaactcgctaccgaggatcataaatttctctagggatttggcatatccgcgagtgagcagaattagttggaggcttcgtgatggcgggcgcgaaggcggatgtagacgcagaaacaggagatggcagcggggtcggcagtggcggcggcggcctctttagcgagcagatgctgattgataagctcaacaggctcaacaactcagccactagcattgagacactttcacaatggtgcatttttcaccgcaagagggccaaaagggttgtagatacatgggaaaaacagtttactagttcaagggaggagaagaaaataccattcctctatctatcaaatgatatcctgcaaaacagtaaacgcaagggggcagactatgtggatgagttctggagggttctacctagatccctgaagcatgtttatgaaaatgggggagaggaagggaggaagcaggtggcgagattgatattaatctgggaccaacgtaaagtttttgggactcgtattggaagtatgaaaaatagcattcttggtgacaaccctcctatattggataacaatgtgaatagtttaaatcctagctctaatcccacttcaaattccaaagctgcacggaaggattctggtacagtagtaaaaaaactcactgttggcgggatgcctgaaaagattgtgtctgcataccaatcagtgtttgatcaacattttgatgaagacacagctctaaacaaatgtaagagtactgtgggccttttggagagaataaataaagatattaacgatgctagcatcaacggtaatcagccagcatcatcattgatctctgaccttcaagagcaggaaatgaccttaaaacagtgcatcgaacaacttgaaagtgcaggtagggtgaggatatccctgatcaatcaattgaaagaagctctcagcgaacaggagtcgaagtcaataattctccgtgatcaattgcaagtcgctcgagcagaggctgaacatgccattcaacttagacaacaactgggtcgtgttcttgtcacgaacgatacacaatctacttctagtccgctcatgattactccaccagatcaaacagcagctatgatgcacggttcgggagtaagatcgacacctccccattcacaaccactgaaccctgcagtgtcacttccccctacagtcagtgcagtgggtgatgagtccaagagaacggcagcagctatggcagataagcttgcatctttgtcagctcctgtgcaggtgctgacctccattctctcatcttttgccgctgagcaagctgcttccataaacggcggatcaccttctggagaactctctggagtaccaccaggtttccatattgataagaggcctaggctggagaaaacagggcaggccgaggcgggcgctcctcccttttttgggcaagcgtcacaggtgcaacaacaggttggagcagtgcctacttcttttggaggcacacatccaccaactccaggcccattcccaccccctccaccgccattgccacctctattgccaccgctcatgcaacagtttggtcaaaatactggaggaatgatgggaatgcgaggacctttcgggatgatggctggctctatgccacctccgcctccattgtccaacattctgccggcaggttttccgggactaagtggaccacctcctccacctccacttccaccagctcagagccagccccagcagcagcagacctctcaggcgccacagcaatcaccaacatcagctggattctttcaatcatcaggcatggggttctttcctcctgtgcaggtgcagcaatctcagcctgcccaacgacagtgattcaactgtgtctatttgcactcatgggcttaaaggcagcaccttgcattaactttgtgcattaaacaatatctcaccgagtattgagcctaaacgttggctggtcctgcaagcgaggcacggccaatgacgacggattagaaagattgtagaataggcatgcacgttgtagaactatccccttttttgtccgagtagttttaactcttcctggttatgtgaagttgctagacttcgtttgtttttgatccagtctgcattgatcacccgaagcaaaagaaaacgactttggaaaactggggctgaaattgggacttcgccaactgacaggacagttttatggctgaaacagttgtagaacttactggtcttagtctcatagatatgatgtgaactgcatatttggcatgctgtttaaatctgtggattattattatcatcataccaccttttctgggtttgaaactgcagaattctttcacctggttcttacacaagggctagtttggacaaggaatcgtgatctggaaaagttgaaatgcatca

SEQ ID NO: 37245 - DNA, 244 bp, Zea Mays
gttggcgccttttttagttgcctggagtgttggcgccttttttagttgcctggattgttggcgtcttttttagttgcctggattgttggcgtcttttttaagttctctggagtgttggcacttttttttattggctggagtgttggcacttttttttattggctggagtgttggcaccactttatactgtactttattgagtccagcggctgagatgaagctaaattcagtgaagttgtgtttg

SEQ ID NO: 37246 - DNA, 1471 bp, Zea Mays
gtcctgcccgtccaggtccagcagtccaggatttcccaaccctaactagcagcagctgccgccgtcgagcaccagtccatggtctgccatgggcgccgtcctgacactgccgccgtcgagcagctaccacagcgtcgccctcggggttcatcgtgttgcgcttcgtggcgggtctcttcctcgccaacttcgtcgccagccagcactggatgtcgggcatctttgcaccctccatcatcgggctcgccaacgccgtcacggctcgctgactagtgtaaattccaggattcagattgtccaacgatgcagagcatcacggtaagaaactgcaacaaacttagtcaaattccttactttgtctctgtcaggaatctaatgataataaagtcagctctaattggtctctagctttcggcatctaacgaaccttctcaactgcagactcttgatatcagttactgcctcaaaatatattaattgatcactgccctggtctgatcaaatggtgtgatgagcaagagctcttctgtcaggtgaggtcttatgttcttctaaattttttattttaacattagtccattgtcttgtgttctcgcaatagtttttcagtaccatactgcataaaaggtatagtccattgtctgccaagggtttcttaaaatttgaaatgtttaaatattttattcttggtattgtgctacataggttagcaatatttaaagaataattgtttgttgggacaggaatatctttgttctctcggaagcttgtatattgcattggttagcaagttttaaaaggtatagtccattcgtctcttcgatagcaggataagtgattccaatgcatgtagatcacatacaaacaacactttaaaatatacaaatatatatatatacaagttttacatgctaaaacacgtttgttgttctgaaacaaagtattcaaaccaacttcaacaatgatactacaacgacctcctacaacatttattgctcttcgtttttatattgttatggatatggaattaattaggaaagaaacgacttcaatgacagagctaggggtggccagcggtggctaggcccttgctactaccgcactgcacatgttttttttgctacattgattatgtgacacagtccttgccaaagtggtgggttcttgcttgtagcattcctgattccctgatcttttgttacttcacttcttgttttcttgaccctaccaaagtcgatctgagtaagctattgcctagcaaaggaagcttctatcccctggttagatgatgtttcctttcctcaactctgttaggctattgttgcattcagacagtattttaattcccatataagcgtacattggctatattgactttgtaaatctcacaagggtaagcataactaaactaaaaagtaaatttgagcgattcagatatagtaaaaaagtggcgatatgatgccggttggca

SEQ ID NO: 37247 - DNA, 2466 bp, Zea Mays
ggccatgtatagtttgatcagatcaaggccctgttctgtttcaccagacacatgccaggtgaatacttggagaaaaaggtcccccacaccccccacgcaggtgaatactacaagtagcagtacaaggaagagagccaatctgcccgtgactgccagtgagttgctcgggtgtggtggttagttgaggtcacgatgatgggaggcgggctgatgatggatcagagcgtggtgttccctggcgtccacaacttcgtggatctcctgcagcagaacggcgacaagaacctgggcttcgcctcactcatgccgcagacgtcctccggcgaccagtgcgtgatgggggagggtgatctcgtggacccaccgccagacagcttcccggacgccgtggaggacgacagcgatgacgacgttgaggacatcgaggagctggagcgccgcatgtggcgcgaccgcatgaagctgaagcggctcagggagctgcagcagagccgcggcaaggatcccatggctagcggtgggggcctggccgacggctcatccaagccaaggcagtcgcaggagcaggcccggcgcaagaagatgtcgcgcgcgcaggacggcatcctcaagtacatgctcaagatgatggaggtgtgccgcgcgcaggggtttgtgtacgggatcattccggagaagggcaagccggtgagcggcgcctccgacaacctccgtgcctggtggaaggagaaggtccgcttcgaccgcaacggcccggccgccatcgccaagtatcaggccgacaacgccgtcccgggcgccgagaatgagctcgcctcgggcgctgccagccctcattccttgcaggagctgcaggacaccacactcggctcgctgctctcagcactcatgcagcactgcgaccccccacagcggcgctacccgctggagaagggcgttcctccaccgtggtggcctaccggcgacgaggagtggtggccggagcttggcattcccaaggaccagggcccacctccctacaagaagccccatgaccttaagaaggcctggaagtccaagtgcctccaggacaagatgactgccaaggagatctcgacctggctggcggtcgtcaagcaggaagaggagctgtacctgaagatgcaccctggcgcacgcccgccggcatccactggtggcatcgccagtgccatatctttcaacaccacctcaagcgagtacgacgtggacatcgttgatgagtgcaagggggatgaggctggcaaccagaagacagcagtcactgacccaacctccttcaaccttggtgcggctatcctaagtgacaagttcctcatgccgacgccgatgaaggaggagaccgctgacgtcgagttcatccagaagaggaacgcccccgctcctgctgagccagagctaatgctaaacaaccgggtgtacacctgcaacaacgtccagtgcccgcacagtgactacagctatggattccttgaccggaatgcccgcaacagccaccagtacacctgtaagtacaacgatccgatcactcagagcgccgagaacaagcctctgccagcaccgccgcaaccacaagccttccagccggccttcagccaagccaatcaggcagcgaacaatctggacttcagcctgcctatggacgggcagaggtccatcgccgagctgatgaacatgtacgacaccaacttcatgacgagcaagaccatgagcagtagtgacagcgtcaccatcatggagaggccgaacgcgatgccccagaggatccagatggacgagggcttcttcggacagggcaacggagtcttcgacgacgtcaatagcatgatgcagcaacaacagcagcaggcaccacccgtggtgcagcagcagcagcagcagcagttcttcatccgcgacgacacgccattcatgagccagatgggcgacatcaccagcacggcggagttcaggttcggctctggtttcaacatgtctagcaccgccgccgccgctgattacccaggcgcggcgcagaagaacgacgggaccaattggttctactgaagaataaaacttgtagggctcctcgttataagcttcggattcctccatggatctcccaagttgtcaagtcttataggtcttcgttatataggttttgcagtagctgcaagacggctggaacctggaactggtttatacttgtatgtccggccagccataaacctctcttatttgcaaacttaatgttattcctagctttaagttgttagtctcagtctgctgtccatgtatatggctgttaaaatgcttgtgcttgtttctgtactacctgctgtttggtgtctgaatgaagtgttttcttcagtggttctgctcgacgtgtctgctcactgttgatgaggcacatcatcgctgctgctcttcacacaaacaacatgactgacatattcaaatattttgagc

SEQ ID NO: 37248 - DNA, 4176 bp, Zea Mays
cccacgacgacccacgacgcctgcgtcggccctgcccgaactggcgtgcagagcagtgctccacgacgccgccaccacctgccccagcagcggcacgctccgacaacggcgaccatggcggtgcgggcgcggcggctggggagtctgttccctgctagatccagtagatggctgactcatcgaggccctccgtgaacatcatctgcgccggtcgtctgctcggctgcagtggattaggaggcttggtgtggaggcgctcagcagcgggtggaagttcccgtcaaggagtctgtcccgtcaaggagaccgtcgtgccctggacggagtcagagcaagagtcgatcaacattttcctcacgatgattgagcgacacaggcacaattcaccatgatcccatcccccactcaaacctgcaaaatcctgtagccgaacatctcgatggtctcacgtgccattcctttctacaggaataggcctataactgatttcaataagtttatgctgcatttcattcagtgtgtttggatgcatatagagaacacgaagtttaatgtgtttggtgcataatgagaattgaggaaatgggacattctagcatgctatgtgaattgtgaaaggctatagattaatgtgtacaggacgccggcttggaggtacttgcacacaagggtcgagctcggacgtcgtagcggtgcggagggcctcggccgtagcatgccccgccccgccgcgcatgcctgcgcggtcggtgtcccgcagcacccacaccgagtggcctgtcttcaaagtcgtcctcatcctctcctcctggctcaacgagaccatcaacgtctggatgttcatagacctgctcgggttcatgctgttcttcgacctcaccctggtgcacctcggccagtacttcaccaaggtgtctggtatgattgggcacctctcctgctccggcgaccgagctccaaccagggacgtctagcgctagcgcccaggacgcacgaccccctgctcctctatcctcagcgccgagcccctccgtcctgtttctggcagcgaaagcccagcccctgcggcaagctacctactcgatggaatgcccagccgcttgtcggatctacgcagcccctgcgcgacgtcacaaactccgaacggttatacgcgcctcacacaagcatgcgctgaatttctcgctttcccaaccctatcgttttttgggtgtgtatggttttcccaggcagtcaggcgggataacaagcagaggtttagtctgttggaggaagatggcgagctgttgatccgggcgaaccagggacacacactaaaaaaatatagtctggaggtgacctcaatgtaattcaattagtgatggaacatttgggagtctactcattatgtatttcttctatctggaaaaacactcaagggatctttgtttagaggatggagacctaaatctgaccgaccttcattggtggataaatatgcagaaaaagattgcaacgtgatccgggtgtcagagattcagaaggtcttggacatcgccgacgagcgtagcctcattgacaccatcttcttctgctacctcgggtgcaatgcaagctaaggtggtcgacaatggtgttcgcggcggcgaactcgcagcgcagccaggtgatgaagccatcgcgctcgtcgacgagccaggcgacgggctcggccacggcggtgccgggggccggcgaggcgatgacggcggcggtggaggccatcgccgtgcgtccctcaccactgcgggccgcagcatagcccagccagcaatgccgaggtccatcaccactgggaaccgtcgtccggaccctctcccatcccgcacccattcctgtcctctgtctctgcgatgcgcttagcgccctcaccacttccacctccccagcctggctagcagcggcggagggaagaagtaccccactctggctagcagcggcggtggcagctcagattagtacggcgctgccccttcttcccccacctgtctttggatctacaaccgcccacccgtcttcggagctgttgtattcctccccacttgcttatctattcctctcaaaatagtgatggatttcggtcctcggatttttaccaatcggacaaatccagtgaattatgttgagaaattgttatactgaatttagtggtaggttggtattacgacctgcaaaacttaggtttggttatatgtttctttactggcctgtaggtacgacgttcttacatactttaagtaccttgacacattgagagtattagaaggtgtctgatcaatttggatacttgctgatccaagccataggtatttgagcttgcaaagaggtgcgtttaccaggcagtgagaacaaatggtgttaatgttaacacaaatattaagggcacactgacaaagaagaggaaagtggcacataatgctacgaagaaaggaaaagaaatcggtagtggctcttggccccttcattttgcaggtggtatatgtttttcgaaagaattttagtgtaacagacaccttctgatactatgcagatggtatatgtttttttaaagaatttttgaaagaattcctgttgggtacatagtggtgtagaagcagggccagtctcataactatctgctcgttccagtaattaagttaaagtaaatgccagtaaacaagttaagaaaaattccatcatggaggatagaattgtccaagagttactttcttgtatgttgtaaggcctttaatgacatattacgaataaatagtatgcagatgttaactgtaccagttatgcactgcctttattccttatatttctgaattgtatacatatgcttcaacctgtctgtcttaaagcctccatgtcttacttttggcaggttcctccaagagaatccagagtatgttgcacagggtgtaactttagctcagttttcgttccagatacctatacctctgcggcaggactatgtcaaaaagaaaccgaagttgataaatgcaagtgatgaagcaagtacaattacctctaagtcttctgaaccagacgaagtgaaccctatagcctgggcagttcctacaaaacatgagggcgatgccagtgaagaagcttctctcgccgatgagacacttgcatcagaagtagtgctaacccggaagaggaaaataggaagctctttgtcagtagagccaaaccatctctctgatgaacttgaaccaaagttggaggatgcttagaacggggagacgtctaactgaaaagtaaaagtgggcagcgtcgtgatgccaacttacccccctgccatggttttattggtcctctgcttgtttctcgttttccttgggagttagcttctctgttttatgtggtcgcacacggccttatttgtagtattacaccacaaaagctggctgacccccactgagggagggtgattgatgcaagcattgtgtatgatccttggacaagggaatcacggatgtttggttttgtcaccatggctgctactaaggaggcagatcactgcatcaaatatctggactgttctgtgttgcaaggtcaggtcataattgtttagaagtactctacacagaacattttattgttttgtcttcaccaccgagaatccaagagcgcctcccatagcctccacatccacaaggtcctgcttgactgcgacgacgtccaggctgatgccctcatcgtggatcgactcgcctcgctctagaaggagtggcccctctggagttgaatatgcagttataaccaatttttaccccttttatcctagaagagttgccaagacacggtataagaccatgataatagactaagagaggatttgtctctaattattatatgttttatttatgcagtcccatgagaactttgagtatttgcagattgatttattaatatattaaagttaaagattgtatgtgttgagtatgtatccattcttgttggaagtgtcttgcaattccaatccaaggatgtataaaagactgcatgggctaagtatgtgttttttcatgtatttggagtatatatactttttgttgcttgagaacatgtatgtacatacatagaagcttgtcaattgtgtgaacttgagttgatccctgtctaacctgagtatatatatatattttgttgcttgagaacgagtatgta

SEQ ID NO: 37249 - DNA, 2952 bp, Zea Mays
ccgcaggcacccctttgcacagcagctccgaagccacaccacagttatttattactgttttttcgttgcctccaatccaatagagttgaccgaaccacgcgccgcccgctgacatggacgacgtagtaccagcgacagcgaagcagaccgtcgttctgtaccccggcggcggcgccgggcacgtcgcgccgatgacgcagctcgccaaggtcttcgtccgccacggctacgacgtcaccatggtgctcctggagccgcccatcaagtcgaacgcctccggcgccagcttcgtcgagagcttcgccgcctccaacccgtccatcaccttccacctcctcccgccgatccctccccccgacctcgccagctccaccaagcaccctttcctcgtcgtgctggagttgctgggccagtacaacgacaagctcgagagcttcctccgcaccatcccgcgcgagcgcctgcactcccttgtcatcgacatgttctgcaccgacgccatcgacgtggccgcgaaggtgggcgtccccgtctacacgttcttcgcggcgaacgccggagccctggccgtcttaacacagacggtggcgctgcttgacggccggcaaacgggcctcaaggagctcggggacacgcccatcgagttccttggcgtgccgccgatcccggcgtcgcacatcatcagggagatgctcgaggacgcggaggacgaggtgcgcacggcaatggcgaagatctggaagcgcgacacggacacccggggcgtcctcatcaataccttctactcgctggaggcccaggccctgcaggcgttcagtgacccgctgtgcgtccctggcaaagtgttgcctcctgtttaccccatcgggccgttggttggcaagggcgggagcgggacggacggaggagaggcggcggagaggccgcatgagtgcctcgcctggctcgacgcgcagccggagcgcagcgtcgtgttcctctgctgggggagcaggggcttgctgtcagaggagcagcttaaggagatagccgctggcctagagaagtccgggcaacggttcctgtgggtggtgcgcacgccggccagcagcgacgacccgaaacgattctggctgccacgcccggagccggaccttgacgcccttctgccggaggggttcttggagcggaccaaggaccgcggcctcgtcatcaagtcgtgggcgccgcaggtggacgtgctcagcaaccccgctgttggcgcgtttgtcacccactgcgggtggaactcgtcgcttgaggccatcacagcgggtgtgccgatgctgtgctggccacagggcgcagagcagaagatcaacaaggtacttatgaccgaggccatgggcatcgggctggagctggaggggtacaacacaggtttcatcaaggctgaggagatagagacgaaggtgaggcttgtgctggagtccgaggaggggagggagattaggacacgggcggcagaggtgaagaaagaagcacacgcggcgttggaggacgggggatcatcgaaggcagcatttctccaattcttgtcagatgtcaagaatattaattaggtcgggaagtgatcaatctttaaccgcccgatacaacgtaacacaaactattcaataaaatattagtatacatattgcttaggaaaaaaaatcccataaacaagtaataaagaaaacatgtgtgtagcaacaatatctatatctatactacttattaaggtagcaaggataatctgcctccccgccgttctgccttccaacgatctcaactgtccatccacgcctctgttttcgtcccgtcggatgctgccaacgcccgcgcgcatcccctggtcgtcagccccacccatccgtgcgagcgagcaacccattgcagccaccaccgccctacctactcacctcctcggcgcgaacagccgccgaacccttatcgctcgcccctcgcccgtgccagcaacccccgccaccgccgccgccctgcctctcgtccacccctccgccgcgagatgtcgccggcccctcaccatcctctatccacagcgcgcggggcgtagcccccctctagcgccgctcaagggtgaagggcccatccgcaccctgatgttggccacctccaccatgctctgatgcccatccttcgtcatgaccccctccagttccattactgacggacggtcctcttcataggcaaggtagagatggaggacagcaaaacactaacacccgagccatgccaccaccaatctattcctccaaacccttctgtacatgtgcgctacacatacatgaggctcctcctcctcgtcaaccccacatggttcaactgaatctgtccatgctcgtggctttctttgttgccttccattgatgtggttcttgattcaatgttctaaaagctgcagatgaggcgtacttcagatgcagcgtgctcaagtgtaggagattgtcaatatcatcttgttgaatcgatgtgggggaggatgtctacttggtgagccacaagattcaggaatatcattgtagattgtttttgaattaggccacctatcctaatttttcgagtttgcatgggcctgcgatgcattacggaggcatttggaggaaaggttattcgtgcaccttctggaatgacgcatgagaaaatctctccagttcattatgatgaggaattaggaaattccttattcaatggcttgccaaaatgtcgtgcggtactacaagcagaacgccgatgaaacatggttcgacgtctcgctgaatagcctgcttcccggctcagtcctcaattgccagcgccaggtgtcaggatgtctcatccagaaaaagcctaatggctactcaaagatacgaaatggccaaggactgctgacgatgatgacgacatggccaccatcgccgccctctgtaggcacaatatcctttgcttgtctgc

SEQ ID NO: 37250 - DNA, 241 bp, Zea Mays
caagactccactgcgcccaagcaaggcggcacggcaacatagcccaccactggcgagcaattcagctcccaccagaacctaatcgtgtttcctaataggcgcccgagattgcggagacgagaacggatacgatggagggtacctcaacggcgaaggaagcagtgacgttgatagcctaggaatcaattgaaccggtcgccgttcttgactccgagagtgatttcgcaaccacacctccccg

SEQ ID NO: 37251 - DNA, 1548 bp, Zea Mays
gccacgccacgcacttggtccacacgtcgtattcggatgaagcatgagagagaagagcaagaaagacttcgtcacgtcaggtcgacggcgaaagacgcggaggttggtgaaggagtgaaggaagaaagagaacgaaagatttcgcagttttgctgggggtaactacggaatggggggcggatccggatctttcctcaaggtcttggtcaacaacatggatgtcctcgcggggcctttggtttcacttgcgtatcctctgtatgcctctgttagagcaattgaaacaaaatctgctgtggatgatcagcaatggctcacgtactgggtgctgtactcatttatcactctattcgagctcacctttgctccggtactcgaatggtaaaacaacaaactttcagcacaagtgggcatttcaccagctttagttccatgtgcagtttggaacttaccataatggtcatatgtggtatattttttagggctataaacaatagtaccttaatttctttgctagtgaccttaaatggtttagggcctgtttgaatgcactagagctaatggttagtttgctaaaaaattgctagtggaattagctggctaacgaatagctaactattagctaatttactaaacgtagctaatagctgaactattagctagattgtttggttgtctttagttatttttagcagctaactattgcactttgcaggcttcctttctggtcttatgcaaagctgttcttcaattgctgctgcacagaggtacattgagcaaaatggatcaaaagcgtttgagaatcttgttaacaagtttaagagttcgaacccaaggcgctcaattctggaggaggtagaggttgaaaggagggccaggattcaactagaatctgaagcgagggaagtgaaccctttcttcaatccagaatatcagtactaggcaaccattttcccttcacttgccaggaatgtgctaggatcggtttggaggaagatgtctggatattaggattgcgttttgcacctactgaatcgatgatattgtgtagatggacaaccataattgttgtagatatgttgtggcgatggaactcatgtaatggtcatgtcgcgaatgtttcatgctgctggaaattatgtattcacactggactctagttatgtgcctcactagtttcttgaaggtagttgttgaactaggtactagtaacgggtgcgcgctttgcgcgcatggtaaacaatatgcaatattgtttttaagttaattattaatgcttgttataattcatatattgccagacgaataaagcaagaataaagcgagagagttttttttaagatgatacagagcatgaaagacagtatagagcacaacagatttatataaaataaaatagagttaagtgagttgtggccgaaggtaatatgtttgttgcgatatttaaagctaccttgttatatttatatgaaatgtctttagaagagttgaacagttatatataattatagaggacattctacaaacttaaaggttgctaataatctg

SEQ ID NO: 37252 - DNA, 3333 bp, Zea Mays
cgaactgctggaccggagatggcctaaacatagggtttagaccgttgccgtccctactcccgcctagccgaccccactcgtcccagtcccagtcccagtccgccgcctggttccttcttgctcttccctccactctctacagacgcagattgacaaggaagagagagagaggccgaggggaggaggcgtcgtcgtcttcttctgaatgcctgaacttttatttggattccagatagtatggctgccaaaatggctggagctgtccaagtgctcaaggatgacactgttaaacgcacacccatggcacgacctagtaacggccgtgaaggaaagcccattaggttgctgtcgaaccacttctcagtgaagcttagaggagttgatgctgttttctaccaatacagtgtctgcatcaaatctgaggatgataaggtggttgatagcaagggtattggccgaaaggtcatagataaactattgcaaacatactgttctgagcttgatgggaaggattttgcatatgatggagagaaatgtctatttactgtgggacctcttccacagaataactttgagttcactgttatcttggaggaaacatcttcaagggctgctggtggaagtccagtgcatgaaagccctactcaagctaacaaaaagcgagtcaagcgatcacatctggcaaaaaagttcagtgtagacataagttatgccgcaaagattcctcttcagtcggttgctttggctcttcgaggaagcgagtcagaacatggtcaagatgttctgagagtccttgacgttgttttaaggcaacagcaggctaagagaggttgtctacttgttagacagtcatttttcagtgatgatagtcgaaaccttgttgatttaactggtggagttagtggttgtcgtggactccactctagtttccgtactacaattggtggtctttcactaaatatggatgtttcaaccactatggttgtaactcctggaccagttattgattttctcgtcacaaatcaaaatgtaagagacatcagagatattgactggcccagggccaagaaaatgcttaaaaatctcagagttaaagctaagcacaacaacatggagttcaagattattggccttagtgatcaaccatgctctagacagatgttcccaatgaaagttcgaaatggaaacatcgaaattaaatctgttgatatcactgttcaggattattttaaatccaagcaagttgagctaacaatgccttatctgccatgtcttgatgtgggaaaaccaaaacgccctaattatctcccaattgagttatgccacatggtatcacttcaacgttatacaaaggcactgtcttctcaacaaagggcaatgttggttgaaaagtcacgacagaaacctcaagaaagaatgcgagttgttacagatgctgtaaaaagtaatatgtatgatgatgatccaatcttatcttcatgtggtattgaaattgagaaacaacttactcgtgttgacgctcgtgttctctctgcaccagcgctagttgtgggcaacagtgaagattgcatcccaaacagggaggctattcgatccagtcaagattgagcgttgggccattgttaatttctctgctcgttgtgacatgagccgaatctcaagagaactgataaactgtggacgcagcaaaggcattttcattgaatgtcctcacagtttggtggatgaggacagccagtctaggagatgttcacctgtggaaagggttgaaaagatgtttgaaaaagtcaaagcaagccttcctggtcctccagagtttctcctttgtcttttaccagagaggaagaattgtgatatttacgggccatggaagaagaaaaatcttcatgaaatgggtattgtcactcaatgcattgctccaagtaataagatgaatgatcaatatttcaccaatgttcttctaaaaattaatgctaagcttggtggaatgaactccaaactggcactggaacatcgtcaaatgataccagttgtgactcaaataccaacattaattcttggcatggatgtttcacatggttctccaggtcgagcagatataccatcaattgctgcggttgttggatctagatgctggccattgatatcacggtacagagcatctgtgcgcacccagtctccaaaggtagagatgattgattctctatttaagccactggatgatgggaaggatgatggcataatgagggaacttctactagacttctaccaaaccagtcaacaaagaaagcctaagcagataatcatcttcagggatggtgttagcgagtctcagtttagccaagtactgaacgtagaacttaatcaaattataaaggcatatcagagtatgggacagggggaccttccgaagttcacagtgatcattgctcaaaagaatcaccacacaaaactcttccaagctgattcaccagagaacgttccacctgggactgttgtggactccggcatagttcatccaagacagtatgatttctacatgtgtgctcatgccggaccaattggtacttcaaggccaacccattaccatgtgttgcttgatgagattggcttctctgcagataatctccagaagctagttctttcactttcatatgtgtaccagaggagcaccactgcgatttctgtggtggcacctatctgttatgcccacctcgcagcagctcagatgggccagttcatgaaatttgaagagtttgcagatacgtcgtcagggagtgtcaattcatcatcgccaccatcaataccagaattgccacggctgcatgctgatgtctgcagttccatgttcttctgttgacgtgattttagtttgaccgttgtggggtagggccaattctttgtgaaaggaaccttaccttatatgttggcacacagcaggctaaccgtttttgtgaagaaaccatgtaggtcgttagttgtcgtatatcgcacgcgtgcatctttttggagcggttttcggctccccccacccacaggtggcggttccgttaggtacagtttccagattttaacgatgctaatacagtaaaagcagtttgtacattctacgcagattttgcagggatacgtggttagatgatctttttgttatgcccagaaatacgtgtgcattggggggttatgaaagtgagctaaatttctgtgcctcgcatggcatccaattgtactcggagattgtgtttgtgctcgatacgcttcctgccactgaaatgcgaaaatgaccacttccactcgctactcgtgacaccacaggaaaatccttgcatcgac

SEQ ID NO: 37253 - DNA, 2345 bp, Zea Mays
atgcaggtcttagacggtggagtcaatggcatagcagccaagcacgtggatgaaagacgcaaacctctcaatctcctagatggcctcgtggacgcgcgggaccgtgtcgcagagccagccatgcgcgacgtccgtccctcactctcttcgattctggactgctcgcgcctctcgcctccgtgttcacatcgccctacccgccgtaccacatgccagacgctggccaccggctccgccgccgcagcgactacatcgggggtgtgcagcctcccatcagactcccgccagcgccaaacccttcgactcggcgatggccacaccggagaagaagtcatacccacctgccatggtcgcggaggaggtgagggtgtgaggctgactggcgattggacccgtccccccattccacccgccgtcgccgacgtgtctgtccaaggaacacaagcacaaactactgtccagattgacgaggagccaggttctgatgaagacgacgatcttccaccacttgaagcaaacaccaacatgaatagaccatatgaactaatttctcaacggaacaactaattgaattttttgtccagtgcaaggtattagttgtgtaacaaattgttaaattctcacatgtcagatagtggtgcattccatggcttgatctgtctctttttactctaggccagcggcagacgcgctgcctgcctcccctggcttgctcctggccatctagcgtctgtcatgtgttctgcctgatgggttttctccttttttgcatatgccatatgttctgcccatctgttaattgccgccgctgttttcaggaaggtttagcgattgaggctgagtttgggcagacctcatcattgttagtttgtttgttatagagtaagctagcccaggggaaaaatagtgaacctggcagatgatggtatggagtaacctgttgttccattcaataggacaatctgagattgtagagatgtggtttctgcacttaatttttgggcgacaatttcaagggagtaacgtggtagtgatttctctccctttattatgatgaagttgtggcttgtatcaatgtcgtatctgcaatttgaaatatgtatatatgccatgtccgattagcaacacaagacattgggatctccaaatttcacggcattgattcaggtgtgtgcacttcttttcttgttccgtgcttgttttataccttctttttgaattgatgatttttcataggatataattctctggccagtagactggcctactaacttcatttatggacaaaaatcaagggtgtacatcatccttatggcttatctggaaatggattgccatgtttctcaattctctcccagctactacaacctacccttcacgctttcctcaagcccaccgtgtgccagcccacgcatgcttgtttaaaacgcgcggcgggtgtgcgcgttagtcgttggtttcttgtgcgctgtgctgccgcgcttgcatatgctcagacttgcaggcaatctgtcgtgtgcgcggctgggctggaccttcaaatgcagatgcacagcagacggagtgtacaggtaagtgtatatgctgtgggcaggtggtgactactgacatcgtgcacagggtttcgtcgagtcggaacggacctgccgggtttcgtttcttccaagcttgggcatctcaagcatgcatggatgctgagctgtctgacgctttaaaatcgcctgcgggtaggagatgatgggaatgggagcagcaaagcaaagaacgatcaggcggcgggccattgcttaaacttggttgcttcggacgatatgatgcgcgacgagtctacatgcaagatcggttggcactgtggctcaaattaaaggctggtttaaagcatgcatcattggtgttagatacagaaaggaaaagaaaaaactggcacggcaggcgcgatacatatacactgcgcccgtctcttcggtggacactgaagaggagctggtgaatggacgggaaaaaaagaattctatgcatacggaatgcaaatctattggacagaaaaagattctatacataccaaatacaaacatattatgagttacattgcaggcccacacgaacaaaaattacatctctttagactttttgtagcttctgtccgtaagggtctgtaggttataaatgtgagaggctgcaacagaacgagtttgcatccggtatgctgtcgatcagagcccgaccaaacactcaggagtcgagaggcacgctacaccacacccgtgttcggaaccgcgcgataaccatcttgtcgaactatggaaatgttgctaagcaacaacgatctctaataccatgcagag

SEQ ID NO: 37254 - DNA, 2124 bp, Zea Mays
aagcaaaagaaaatggagatgttggctctcgttctgacactcctgctttcactctcagcggctaccggcgccgccgcggagacggtgaaagtgaccaccaccccggtcttctcccacatccctcgacttcaggcaagcaaggatttccaggtgctcgtgcgcgtcgaggcgccaccggcgctgcagcagcatagacgcgtccccgtcgacctcgccgtggtgctcgacgtgggtgccagcaccggcgccggcacggcgaggctggatgcggtaaagaaggcggtcaagtttatcatcaggcagatccacgacgacgaccgtctcgccgtcgtcgggccgtccaactatcggctactccccgggttcctgaacacccgcgatgcccgatggaatgccgagaaatccgtcgaccagctggagccccgtggtgagttcacgtctggcgccggcttggaggaggccattaagatcctggaggagctaccggcgacggcgagccggagcagccgcgcgcgcttcgtcatcttggtgacggacagggcagtggcagagggcagcagcagattattcaacaagctgccgcgcgagtccctctctctacccccggtgcacacgttggggctcggcgcggcgcacgaccccagggagctgttgcacatcgccagggaatcccagggcacctactcattcgtggacgaccagaacacggacggcatcaccggcgccatcgccgtctgcctcagcgggctcaagaatgtggtcgccgtcggcgcgcgcgtccgcctcgaggcgccggtcgggagcggggtcaccatcgagaggatccagtcggggggatacacatacagcaggactcgccccatcaccaccagagacgacaagacgtacgtcgaggtcgccgtcggcgccatctacgccggcgaggtgaagagcttcctcgtccacctcagcgtgcctgctcttcttccttcgacgtcgaccgtcgtcgccgacggctgctacaggcaacagctgctcactgccagcgtcgtcgggcactacaccaacagcgacgaagaacatgctgcggctccagcttctccaagtccaacggtgacccaggctatcttgtacgtacaaaggccgccgccagaagccctcgacgtcgcctgcggcggcacgctgcatagagtccccgtccccgtggtgatgaaccacatcgcgcggttcggcgtgctggagatggtggccaccttcgtcgacaccgacatcgggcggcatagcaccgtcaccgcggaaatggcgacgaagctgcgggtccagtgggagaagttcgtgcaggcgcggcagttctggagcggcctggacctgggagtcctcgacgacgaggtcagcaggatggtgaacatcctagaagaagcagcaagcagaagcggctcctcgacgtctctgtcggcggcgacggcctacgtgttgtcgtggctgtcgagctaccagatgcagcggccgacggccatgggatcgccgggcagcgtcgcggccgctttcgtcaccgtgaacatgcagctcacactgctgcaggttaggaacgacttcgacagattcgacacacttcttccacgggctccaccacaatcaccaatctgcgtggatccaatgccgccgccgctgttcgagatgtccggacggggcgacgacacctaccgcgtcgtcaacaccgcttacccgccgggcgtattggtggacgccatcaacgaagcaatgaagcagatgcacctggcgttggttcaggcgagcaacctccggcgatgcgacgctgccggcgtcgaggtgccactgcggacgccgctgtcacgggcgggcgcattcgcatgatccatcatcctgccagcaacgatccatcctccacctctcctaccgtttatgttcttgatttcttgtttttgtttctaagaaaataaaggagagcatcagtttgcattggcgtaattttttttctatagacgagggagtgcaagaacacaaatcactgtcaacactcaatgcatcaccacctcaaaaagtatttttaattttattaagttataagttttgtaaccaagcatgtgatgatataataagaaattgaccacgtgcatttgcgca

SEQ ID NO: 37255 - DNA, 1735 bp, Zea Mays
agaagagagaagagggcgggcatcggccagtgggggctctgaggccgagggaggcgaggaaagcggcgggtgccgggccgcccgcgccggtgccgagccgcccgcgccggtgccgaggccctcaccagtcaccaccccctcccctcttccgtctgtcccccgcttgccgccaccgccgctgcccgctcgcgatccttcccctttttaacgctcccgcggccccgcgtcgtgctcccttttgtcgccgctgccttcgtgcccgtactcgcgggttctcctcgctcctcaatctccgcgcctgggcgcggcgttcgccgccggatctgggcgcgggacggtgccccggacggtcgatggcgcgggcggcgctccggttgggcgaccgcgcgctcgcgctcctcgtcctcgtgtcagtggctctgcttccacttgtcagttccgacgatggacacaaacactgcgagggtgttgtcaggggctgggcggattcctccacggggcgcgtgaaggacggggacaaactgagcctcaaggatttgctcttcttcctccacattcctaggactggaggccgcacctactttcactgccatcctgattgcaagctggttgttagtcatgatgactatagcttaacttccaagctgccaagggagagaacatctgttgtaacaatactaaggaacccagttgaccgtgtatttagcacatatgagttttcagttgaagttgcagctagattccttgttcacccaaacttaacttctgcaaagttaatgactacccgtgtgttaaaaaagtctcgtgctgtcagtactttggacatctggccttggaagtacttggttccttggatgagagaagatctgttttccaggagagatgccaggggtatcgacaaagttcatagtagtaagaaggttaatgcatatgatgtggaggatatggttatgccgttacatcagtacatcaatgatccagttgcccatgagatcattcataatggggctacctttcagattactgggttaacgaacaattcatactttgatggagcacatgaggttcgacattgtgccagaaagcatccagatcttggtcgtattgtgcttgaagttgctaagaataggctggaccagatgctgtatgtaggacttacagaggatcatgaagagtcagcgaggttgtttgctcatatggtaggagcacaggtgcttttacaatctgggacattgagtttggatctcaaggaagatctgcacagtgagactgactcacacccatccatggtggagcccggggatgaagaagcaagcgaacatctgaataacacacatggttggcaaaataatgaagccctgaactctaccagcgacgaacaaggaaaaggaaatatgactgtgggtaaactgatggaagcttatgaaacttgcatcgctaaactgcggaagtcccaatctagccgtcgtaaaatatcactaaagaaagtggaggaagcaaacttctcaaaagaggcacggaagctggtccccgaggcaattttgaaacaaattatctcgctgaacagccttgacatggaactttatgaccatgctaagaaaatctttacccaggaacatctgatgctgaaagctcagcaatccatggcggggcagcacagacagttggcggaacaagaggatcccagtgatgtccagagcgcgtcccatggctaaccatactaactgttgaagta

SEQ ID NO: 37256 - DNA, 977 bp, Zea Mays
tgcgttcttctttttggggcagactcaaattagtggcaggaattctggttggacaagaacaaaggcatgatctgtatggcactgtcgtccaaagcactgttttctgaaaacaaagatggtctgttggcattaattgcgatggaatgggctgaagatatttactcatgattccagtctgtagcctaccttcagcaaatctggtggtttgaggtggttggtgaagtcgatttctgcttccctgttggaacatatagcttgtacttcagggtccatcttgggaagttctacagacgatttggccgccgccagtgcacctcagagcatgttcatggttgggacaagaagcctgttcgcttccagctatcgacctctgacgggcagcaggcattgtctcagtgctacctggaggagcccgggagctgggtcctgtaccatgctggcgattttgtggcctcaaagcctgaccagctgatgaagctgaagttctccatggcacagatcgactgcacgcacacaaaaggcgggctgtgcatcgactcggttcttatctatccaaaagggaaggggtttcaccaggagagggtggtcaggtctcagaaatgagggttgtagatgttgtggaggtattcacattaggatgttagagcaaatgcagcttgcagcctgatcttatttttactttgggctctagttcgcagcagaggtgaagtgtatgtggttgtagaactcaggtattgtgtggtcaggtgaccaccagagtgctctgtcagtcctttggcaaggtcgttttcgccccccttcagctgaatttggacagcgagatagccatgaaactgtactgaaatgagttcgaaggtgtcattcccagtttctaatttgctttctactgcttagtttcggatgctccctttttcctatttgtcatgatccggtcttgacttggtcttaacttaatattaagaatcattattatgatt

SEQ ID NO: 37257 - DNA, 2248 bp, Zea Mays
cgcggatacagtcacaccttgtctcctcggctcctggctcctgttggacgccactcgccaccccactttccaaaccagaccacagccgaaaacccccgatcatgccgccgccggtcgaaccctacatcccttcgttcaccgccggcttgtccgcgcacgaggccgccgatgccgacaaagactacctctacttcctccgccacgtccgcctcgacggagacgcctacacggtcgtgattccgtccaaggacggcgcctcctgtcctccccagatcatcagaatgctcgcgtggtgaatgacaaattggtgttcaagacggggaactgttcaataactatcggggaccatagtgatgctgaggagcacgacgacaccgaggaggaagagaaagaggaggaaggggaaggggaagaggatgatgaagaagaagcagacgaccttcctgcgtcagggcagtcgggggaggacggtatcggtatggaggaggccggtcctgtgtcagagacagaggacggtgttgactcggatttgccaattccaaaggtctttgagctagtttagcaaaaaatcgtgctatttccgtttcttgtgaagttcgttctaaactcctgataccaaccctttctttgccttgtgacttttgtaaaggaaatttagatctataccattaaaagattacaactttagatgtatatcattgatatctcacttacacgtgggatccacataagtcaatgacatgtggatatctaaagttgtaatcttttaatggtatagatccaattattcctttttgtaacacgtcttgcttataaagggagaaaattggatttctgccattatgaagcttaggattcgctcaaatgccactatgtgaacacgcttcgctaaaaaaccattatgaatcatatgcttacagacaaaatgccatttagggggttatctgaaacataaacttcttttactaaactgactggatgcttgtgcccctggcgacataatcgctgtcgctcatggatcggtccggttccagctgccaggttttcttcaggctctgctctatgcggttgggttagggaaaggagcgatacccactgctgctgcggtgaattgggtgctgaaagatggcctcgggtaccttagcaagatcatgttgtccaaattcggacgccattttgatgttaaccccaaagggtggcgactgtttgctgattttctggagattctgactccagtgttccctcacctgtttgttccagttggggtggctgctggtgctggccgctcagcagcttctttgatacaggctaagacttactttagtattgattatcaatattctatagtctgcatttatggaaatctatgctcattatagcgcaacataggtgttctgccttgtgtatctcggtatcctcataattggtagccatatgaacatgagacttatgatatggccactagaagatgtatgactatctgaagattttcatagcatgtttatactttatactcacctgagcgacggcgattatggccaggggcacaagcgtccagtcagtttagtaaaagaagtttatgtttcaaataaccctctaaatggtattttgtctgtaagcatatgattgataatggtctcttagcgaagcgtgttcacataatgacatttgagcgaatcctaagtttcataatggcagaaatccaattttcttttgtaaaggtgaaggatgaagtggtgagcaaaaatgaagaggatgatgtggggcctggatcagatttgcatattactaacgatcaggtgtattgtgagacggagaaggtgaaagaaggaggagggaatacgttgaatgatctagccaggagaacaacagatttggatcctttggacaagaaggaagcaagctcaagcaagggacatctggccatgcctctcaatccttcggaattacaaggcgttatatggcccccacatatcaatgagaggccaaattcagtttttaaagagaagttgattgagtttctcatcaaaccatttacacaggaagaatatgataggtattttgctctggctagtgatcgcattccaatggtcaaagaacgaaggacccgtaatacggtggcatactatcactggacgcatgagatgagcaagtcatactttgataggtacccaggagctctgccttgcagaagcaagaaacagaaggctctgcccttggatgccatatgaagagacaatgctgagag

SEQ ID NO: 37258 - DNA, 1061 bp, Zea Mays
ggaggtccgaacctctggaggcccagctgggcgagcccgagtgctagcccaattcacccccaggtcacaccaaattgccaaccgccctcattccaaaccctagccgtcgccagccttggagctctcggacacggcggctcctcctccactccccctcgactcctcctccatccccgacgcgacggctccatccccgacgctgagctccatgtcttccctcacctcggtcctagactcccaggtgaaaacttcagactctgaccctgtccccataacgtgtgcctcctgccctcctcgcagatctgcttgtccgccggcggcggctaccactcgccagcaagccatctcctggagctggaggggtctgcttcctccttgactgcccatcgacatcttcgccctcgtggccttcgcgtcggtgcccctcgcctgtgatgcaggggtctcatccatgtggtgccacactactggttgccaacgaccgggaaggaaggtggtgtggatgccgtgctcgtgtcttcctctacagggatgctcagattccccttcctcactgggctccttagattcgccaacacgaaggtatatgtgacagaggtagcagcaaggatgggagctaataatatgatttgacttctctggtgtctctatatatgagtaataggagctaataatatccaaccatcaatccagcagaatttaataggatatgagttgatatcaaatgcagagtttacattttcaccgtggacaccttttcctaccaagaggttcaaattttactgcaaaatcaacgagttcttggtggtgttggtatggcatccgatccaatggtggcacgtagaagtaaaatctgaaacatttgttttgatggttagcttgcattttatgctataattacctcaaatcacgtgttgcctttttcaccaatttatgacatctattgacatgttttactttaatttacgacatttattgatgtgttttgcgacaacctcatgtggggccacatttgccattatgaaatagatcgatgatttatgctaaaattcatacccatt

SEQ ID NO: 37259 - DNA, 2091 bp, Zea Mays
cgacaagcccatatgccttcctccaaatccaatacattctgaccactagatgaactggcattgattggtgctagcgatcagttgtgaaattaatctacacacctccccaatcttttttcagattgcaaatcaatctacatgaattgcaaatctcatattttagtatcatatttcaatttttttcagattgcagtatcctccgatacttcctcacgtatattacagtatcacttgtactttttttatagatcgaatgttcgtgtaattaatatgtatgtagcaatgaaacaaatataggaagtatcaggcctgctatagatattcagaacactgccaatctacgatgtacagagcaatctgtaatggtacgactaggacacaaaggagcaggtccagatctgaaggtaggtaggtactgacctcgccggagcttgatcttcttcttgtgggtgatgccctgcacggctgcacggagatccggccttggagtcgtccggcggtctgcgtggccttgggtgatgccctgcatggagcttgatcttcttcctgttcgggtcggcggtctgcgtggccttggcgtcgtccggcgcgaagagcacgacgtcgatgccctgcacggagatcctgccgtcggtgtagatgtccgggtccaagaggtagcggatcttgtgcggcagaaaccagaatgaaacgtaccttgtgcggcagaaaccagaagcaaaccggaatcaaacgacggaggcgctcagggcgttggagcgacggaggtgctggtgcatagcgaagacgagacgaggcggcggagaatcgcctggcctcctaaggccagggttgtttccgacgggaaaatggaacgaatatctgcacgagattgggctgccaaatgacacacatgaataatccgaggacaattttctggtgggctttctcccaggagaaaaggccaggaaacccgctggattttgggctgccaaaccagtcctgatatgtcttttttcccccctctagcgcgtctcagtaagacattaaggactaacgcggaggctttaaagagaatctttagttattaaatattaagatgactcttatgtttctttgttgggcttcatcagttcttaaataaggtgctatatgcgagggaaggggccaagagcatcattgacagggcttttgtggacttaccatggcaagttcggttggaagtcgatggcaccgagatcgagataccagaggactcggaaggcgtgcttgtcgcgaacatcccgagctacatgggaggggttgacctgtggcaaaacgagggtgaggatcccgaagattttgacccgcagtcgatccatgacaagatgctcgaagtggtcagcattacaggagcatggcatctgggaacactccaggttggactttctcgggcgcggaggatcgcgcaaggccagtcgatcaagatacagatgtttgcccctttccccgttcaagtcgacggcttttatgttgaggagagcagttgaagagccactgggtcatgccgctgctatgatcaccgacgtccttgagcatgcagagtccagccatgtaatcactgcttcgcagaagaaagccctcctccgagaaatggctctacggctgtcatgaagcaagcgccgctcattcggacgtcgcagaagaacggtttcctgcctctgcctgcacatcggtggttagtacgaggatctgtgatctcaacatgagctcgatcatgttgttagcagaagatacaggcccggagggacgtgtccacgtgcacatagagtttttttttttggggtcatgttcacgttttggaaatagcgaggcaatgttgtgtgcagctatgtatggtgtgtagacctcgggtaagccagttccttccttctgtgcaaaactagttacgcctgcggcctgccattccgtgttaggttgactggatggatttttagggctgcgtcgctgccacttcggttggtgccccatatgtaaacgagatgggcttgaatgcttggttgtaacctttttttttaatgataggagctctgtcctttaattaagacgaaagaaaacatatgtacaagaaga

SEQ ID NO: 37260 - DNA, 1804 bp, Zea Mays
gtcctctcgtatagccgtatatctccgattggctgtgatatccaatgtcatggcggcgagaagccccaacgtgcggctacagaaggttatcagcaggaaaaaacagagctcgatgctgaaatgcccgcactctgcgccaccgaagcctccgagggctcggttcgcgaggctgagcgcgaccacggaggccgcggagaaggcaccggcgaaacccaagccaagggtccagcggatctgcgccctgcgagcatccccgatccgtatcaaggctgagagggtcgaatgtcccagcgagaggaagaaggcactgacgacgccgcggagcaaggccgtccggccgagccaggaactgtttcacagcgtgaagcaccagaaggaaccgttcaccgctgcagccaggaaggggaaggtcgtcaaggccctgttcatgagcacgccaaaaaaggcgcctgcccagacgccggcggcagacaggagcaaggaggcggggtccgaggcatgttccaagctgaggaagctgaacttggcgtgccgggaggtgccgagcaggtacatgtctcagctgaagaatccgaagactgtcaagaaaggggaagagaccacggtggccaagagcgagaagcgggggcaagaatccaagacgaatgccaagaagaaaatcttaggacgctcactgaagtgtacccatgccgaacctgatggggagaatcgaaacggttgcagcagcactgatgcagacgagaactcatttgcagaaattgctgcctccgatcaggagaggaaggtggtgctgcaggaattgagaatcgaggtggatacatcgcgagctgacaattccaatgacaacaaggagaatctgtcgagtgctcccagtgaagaagcattgaacaattcacattctgaaaatggaaacagacagttggagaacaatgagaatgttcctctaaacgagaatgttgctttgaaggtggctaaattgcagagcaaagtgcatcaagagcaagcaggaaagctcaagaaaactaccaaccctaggccattcaggctaaggactgatgaaagaggagtgcttaaagaagcaaaaccagagaaaaggcagccgttcactgagaataattccacggcagtactcaaggatgcaaacagaggagtgacgaaacgaagcacccagattgtaacggctcagcagctcgatgagtccagctccaggccggccgtcaacagcatccaatgcagagctgtgaaaccggagagggtttctaggcttgcatcatcaacacgtacagccaaaacagcaagtggccttatggcaccttcttcccggactgggaagaagaggaaggcggctacggtgaagctgtcgaggatccaaacaccagctgcttgagctcgggcacgggcagatcaaggaggaaatgagaaactgccgacaacggtttttgttgtctgctccagcgacgagttctgtatttattactgcgtcgaattcgttttccggattttgtggatttatgtacactgatcatttctttctgcgagtcgtgtggtggaagtggaacccctctgctttgttgtaccgccaccgaccagatttcttcttctttctgtagaatgattcagaatttgattatttttctgtaacttaattgaactggggaaaggaggcccggcccaacccatgaaacatttcaattttagccgtggactaggatccatttcatctcgctaccatgtgttgttgccccttgagtccatgttctgggctgcatgcgtccaatttccatttcatgtggacaaaatcgaa

SEQ ID NO: 37261 - DNA, 2050 bp, Zea Mays
cacaaagtcccatggcgcacccatatcctctgctccatctccctccagccatccttggattcttcttctcttccgcgcgcgcctcatctactgtttttccagccgcacccagctcctattcgccatgacgcacgaacgagctactctcctcccatctccttcctcgccctctcctggccatggctctagttctcactcgcagcggccagtaaccactgaaacccaccgcccgcgtgagcaaagacgacatcagggcgatgggacggatcctgtgcggcgaccatcctcgcattcgcgcctccccggggccacccctcttcccatcgcgccacgacggattgcgggcgacggtgctatggcggcgtgggctggggttgggggaccatgggggcggggtccgcggtgggttctggtcgcggcatggttgggcctcgctggatctgagctgccattgatgggttttctttcgagcatttgatttccaatgttctgtttttggtatgctctcactgcttcatgctcgtccctgtgcttgagctccgtcctccccagccatggtgctctacgcgcacgagctctacaatggcttgcactcccacctccaggcctctggcatcgacggcgtcaaggtcgacgtcattcacgtctggtgccgttcatctccatccgcttctcgcgtggggcttctgtcttgccaccggccagcctcgccggtgaagtccgccaccgtcctcaggtctccgagctctggagccggcctccttcattagtatcaaactccatccatgacgccggccatgcctccctggtggccacggccttctactccgcctccctggcactaacgcaagttcccgttcgtcggcgacccggccatggcgcacacgctggtttcctctgctcggcttctctggtgccgcgcacgcccttgctcgctgtccttcggctcggtctcatctacacccgagcccagcaccccctcgacaacatggcgtctcgcctctcttccctgcgtcgcatagaccgcgcccctgtgagcttcctacgtcggccatgttcagacgccaccaacatcaagcgctcgtcctcggttccatggccgtagcgcataggagtcccaatcccgattcaaactcggtgagctcccctacaagctcgcttctccctgcttgctgcactcacgtcgtcgtctacctgctcgttccacgacgtcgctcccagtcagcagctcgccggttttcctgcacgcaatcgcggatgtcgtcgcccggtccttgtctcttgccgagctcatcaccaccgtgagactctgtgttgctgtaatcggccgcgtctccccagtcatcttatgcgcactcatctccaaatttgaccgtggggccgactgtcgaccacgtcgttgcctcgcagcatttggacaccttgtcgtcactggaccacgtgttcgctcattaccacaccatttttagcatcacggttctgtaagactccacgcactcgtcaatacccggctgtcgatctccaccacacggtgccacttcggacctctggcctcgtcctactctgctccagcttgcatctaagcctagggtcaagttcgtacgccaccctgcttggtaaaataaagtgaatcggggagcgccagtgtttttggtaaattttgagttaaattactagctgttgatattgtgtgatggttgcaagcgctcgatatggaaagagggaattagatgaagaagaaagcgaagccgcacaacactcatctgatgttctacgacaagcccgagccaggacttatcagcattcttacgagtattgagtcacatttgatgctggcacgtgaattaactacgtgatgcagagaaccataactaagttgacctcaagatggtgcaaggagtggtcttcttcgtacaacgatgtcgtcagtcggaccaacctgaagggcagatagaacaagtgtcagaacaaaggctgatcgccaagtggtcgccacctaacaaacactaacctagtgttatccaggcaagccccggtgcatgcaacccct

SEQ ID NO: 37262 - DNA, 1008 bp, Zea Mays
aagctggatcaccctgggttggcaaaactgatcgccgcacatgcacaccctccggcttacttgatgttctttgacttcttcgagcctccaaatcttgcagaaaagatacatgtcgaggaatggatcccttctatccagcaagtggttacgatggccagtgatctagtgagcttcttactggtgtggtgccctatacagatctgagagcagaagcacaggcacacactgttcttgaaatgacatatactgaacaacaacttacagcagcaattgtttctcaaggattgcgtccagcacttgcccttcctgaatctggtgccccaccaactcttttgtcacttatccagcgttgctgggatcctgatcctgaaaagagaccatcatttgaagatataattgatgagctaaatatagttcaaaagcatatagtttcaaatgcttctgttccatcatctcctgtcagcaagactcaaaatggtaccatagaagtgcaccattatcaagaagcattgaactggttcaaccagggggagctttttgttaaaggatcaagtagatcagaccttaagaatctttggtctgattgttttgatcaatcttcagagtaccatccaacattaagttggggctcttttgcaacgtgtggtcgaagggaaaccatggaagacacccattttgtacttccccatgtgagcgaagaaaatgatgtttttgcctttggcatttttgatggccatagaggttcagcagccgctgaattttctgtccgagcagttcctggatttctcaagcaatttggtcagggtgcaagcccaactgacgctctttcagaagcgtttgtaaggactgacatagcatttcgagagaactaattctcaccggaagtcaaaaaggatattcaaaagattggcatcctggttgccacggcataacgcctgatagtgagaaaacaagcttttgtagcaaatgctgtggattgcgagcatccttgaccgtaagggcaaccat

SEQ ID NO: 37263 - DNA, 824 bp, Zea Mays
agataggcgcagtcaagcagaagctatcaatgggccattggcaatgataggactgactgctggattgatagtggaagctcagacaggaaaaggcatcttagggcagctagctggatatctgacggctatttctagtttatttggacaataatagtgggccatctttggagatttattttttcacgttccttggccaggagagctcttatctgttgcatccacccaatttttgtgggggagttaatccgagcccagacttgtatgtttatcaagcacgcatgggctgaacattaattatacatgtaacggggtcgttctatgtagcccaaccatttctgatgatagaacctgctaaagagcagttcttcatcatacttaaatgtgaaatgttaagtctttgagaactctcctttttgcccaaaccattgagcctgtaacatgtcgattggactcagaagtctctgactggttgtttgtatatgcaggagctgatgacacctgcaatggaatgatgagtctattgcttcgatttaacgtgtgattacatatatcttgaacttattataagccagtatgtcgcctgtagagtgtagacaggtacttttataatatataatcacaacttccatatgtactgatacattttatctttgttctgcttgctactgttttaattgaatacaagacatactatggaatatttaaatttgtcatttgtagtagttgtgtttgtaactgcaagctaaaaaacaatctgttgagcatgtgctatatgtaagtagcgtggatcggtttagggtccgtgcatgttaatgagatatgcg

SEQ ID NO: 37264 - DNA, 1805 bp, Zea Mays
gccacggcccaatcgccggctgacactcacaagaacctgcctccctcggtctggatcgctatctcttttctagcggctccagagggagggaaagctagcgcacagccgagagaagaaagcagagagggagggagaacaaagagagagagaaaaaaaaaaccagagaggttgagcaagaaccgaggcggatccgccttttgtccctcctgcccgagggctagcctgccgccgcccccgcgagagatcgagaggaggcgctgttcagttcaggggggtgagaagccgtgggggaagagatgatgcgggagacgtacatggacgtgctgccgccggtggaccacatagccgcctcacggagcggcggctggttcccgggcgcggcgcgtctctggacggcggcggagaacaagcagttcgagcgggcgctggccgggctcgacctctgccgcccggactgggagaaggtggcgcgggccatcccgggccggacggtgcgcgaggtcgtcagccacttcaagagcctccaggtcgacgtccagcagatcgagagcggcctggtgcccatgccggtctacggcgccggggccggctcgttcaccctgcagtgggacggctgctacggccccgcggactcgaggcacaacggctaccgcttcggaagcggaggctgcgggaggcggcaccacggccgcaccccggagcaggaccggaagaagggcgtgccgtggacggaggaggagcacaggctgttcctcttaggcctgaagaaatacggcaagggggactggaggaacatatcgcgcaactacgtccagacgcggacgcccacgcaggtggccagccacgcgcagaagtacttcatcaggctcaactccggcggcaaggacaagaggaggtccagcatccacgacatcaccacggtgaacctgacggacgacgagcgggcgccctcgccgtcgcggtcctctctgatcaccaccaccagccagccaaacgcgccggctccggccgcagcggtgataggcgggcccttctcgtcggcggcggcggccgaggccaagcagcaccagcacggcgctgggaacctgccaccgaaccggacctccgtggtgccggctgtttacaggatggacgattcgcaggaccacggcctgcagtgtggccctctgcgtcatcaactggtcgccagccaccacagcgttctgttttaggcgcaagcgcaatcccactttgaggcgcgccatggtcatggatccatccatcaggtgttgtctagtgtgtgtgtgtacgatgcgtgtgttctttgctgtagcttcagcgcctgtatcgaagtgattagccttttggggagggggggcgtaacggaaaggggatcttcggttccacggtggtccaggtccacaatttgttgttggtgatgccgagaacgtaacaaaaaaaaggacgccaagaattctgagtggacttggcattcaatcatggaccctgcttttgctcgccgtggcccgggatgatcagcagaacctaattctggatccttcttggtcggctgatgtatcccttgagtgaccttggtgaccatctcatcctgctgctgtctctgaagacggcgacgcgcttgtattggagggtttcagagttcagatcacattgctgtagtgtagtctagacatgtttacccatagtacgtaatcagtttttttttttggcactggcggctgccgaaatctgtgtctggacaggcttcatttctctcggatgaagagaagataaaaaacgaaatcgagtttgcgatgaaaaaaaaa

SEQ ID NO: 37265 - DNA, 565 bp, Zea Mays
ttccgagcgtgtgcttggtcaactgggccaccgcgcacaaaacccattgcagttgtagcagggactctttccccgtgccacggacgacaatgactgccgacgcggcgctcctcgccatcatcgtcgccttcctcctcccgctacgcctcgtctccctcggcctcagcctggcgtccgggcgtcacggtactagctccagacgcgtccgccgttcctgtgccgctttggccgtcgcagccgcgctcctcgcagtcatcttcgccctcccgcgtgaccacgtccgggagtgcgccgctccgatcgcttctgtctccagtgccggggatgatgacggcggtttccgcgaggagctgcggttggaggtcgagcagcttaagcagcagctggcgcggcttgaatctctttgggatagtaaatcgaaagctgtggatgataaacttgattctttagaggaggataatggccgtgtaatgagagcaatggcactcgatgtccagtctctgatcaatgagcgggaaaatatcaagaaacatgattttatcttcattactttgggggtccatag

SEQ ID NO: 37266 - DNA, 1748 bp, Zea Mays
caggagttggctgaacttgttcacaaggtccatttgctttgcctaatagcaaggggtagagtagttgacaaggcttgctatgatacactcattcaggcctcagttctttctcttgtaccatgccacttactatggagtcttgttgatgttccaaacctgaaagctgttaacctacgtagtcttgtgagctggttccatcgtactttttgtgtaactgcacaatccactgacaggggatcttttgaatcaaatttggctttcactattcaagatcatgtagggactgctgaagaggtttgttacaaatctggatgttgctggactcaagaccgatactaaagtgaagggaacattcagtcaagatgcatctaggctttgtacaagggcactaccatgtggttctccattatctggtgataatgtgattagttctcctgctctactgaaagataattctcaaggtattgcttgcagtggcacagaattgcacaaggcagagtgaattcagagtggtgggataatgttttggcgccactaaaacagatggaactggcagcaacaaacaactatgaagacatggaacttcaaaccagagccctaacagagcctcttcctaccagtcaacaggcctataaggaccatcacctttatgctctcgagaagtggcttcacaagaaccaaatttttcatcccaaaggtccagttctcggtttctgtaaaggacatcctgtttatccaagatcctgtgttcaaacactgcagtcaagacatggatggttgcgggagggcctgcaagtccgagaaaacgagttgcctgcaaaggtggttacacgtccaaagaggactttcaatgcccagtcagttcaatcaagtggcaacgaagatggtctaaaaccaaccttggaactatatggtgaatggcaactggaaccactgcaacttcctcatgctgtgaatggcgttgtgccaaagaatgaacgaggccaagttgatttatggtcagataagtgccttccgcctggtactgtacacttgaggttaccaagattattccaggttgcaaagagacttggcatcgactacgctcctgctatggtcggatttgattatcgcagtggtcggtgccttccagtctttgatgggattgttgtctgtaccgagttcagaagtgctatcctggaggcatatgcagaagaagaggagcagagacgagctgtggagaagaagcaggaggaggctcaagcactctccagatggtatcagctgctctgctccattgtaacaaggcagaggttgaaggactcctacaaaacaccttcacacgggattggtaacgaaggcctgcccgaaaatgataatgtccatagaagcactctcagcagccgatcctcagaaagggaacctagttcaagcaaactgcagacagatcatgaccatgaccatgaatttccaaaggaagaccagagctttgatgaggagaccttcgtgaggacgaaacgctgcccgtgtggtttttctatccaagtagaggagttgtaactttgataccaggaatgcacaagtgcacatgtttaactgtgttaacatatggcccctttcgtccatttgaaagtcggaatccaaaacgtagttttgaatctacttacccatttggatccttgcaattgaattccagtctaataatcataatttaggcacaaattaattaagctaaatgtagttttatgtggaatatatttgtatactac

SEQ ID NO: 37267 - DNA, 2042 bp, Zea Mays
ctcccaggctcccactagaaaagcacacccaccttctctctcttcaccagcctgtccccaacaatgcacaccaacatccactctctcgtcaggctcctctcccccaaaaatgagcgctgagttctgcgctgctgccggtgtcgtggccatggagctcggagtcggagatgtgctggggctgcagcaaggcatcgcaatcaccgcgccatcgcccagggacagcgacctgggtcttctcaagcgagcaggcctcacccaggctgcggctgctgccccctacccctcccccttccttgacgaggagaagatgctcaggttctccaaggcggctcacacattgcactcaggcttggattttggaggcccaggtgagcaggctttcctgctgtccaggaccaagatgccatttactccctcgcagtggatggagctggagcaccaggctctgatatacaagtacctcaatgcaaaggcccccccataccttccagcctgctcatttcaatcagcaagagcttcagatcatccaatagagtgagctggaggcctctgtatcaaggctacacaaatgcagactctgacccagaacctgggagatgccgacgaacggatggaaagaagtggcggtgctccaaggaagcaatggctgatcacaagtactgtgagcggcacatcaacagaaaccgtcaccgttcaagaaagcctgtggaaaatcaacctaagaagaccaccaaggaggtgcctgctgctgctggctcattgccatgtgctgggccacaaggtagcttgaagaaggcaaaagttaatgactccaagccaggcactgtcagctattgggcagatagtttaaacaggtaaatactatattcttacaccagagtcatctccttatataaggcaccctattttagcatgatatctgaataataaaatcccaatttaatacttgtgcatcctattaagagcatgcatcctggaataatgttagtatgttgaggttctagttaatattaatttttattttagttgccacttagcagtcataataattcccattccacaaccttgtactcattttcaggacaatgttgagcagagagaaagcaaacaaaccgacggaagatagctctttgctgcttacttctacgaacagccaacccaccttgtccctgctctctcagctgaagcagcaaaacaaaccagataagttaggccccacactggaaaatgagtcaaacccagacacaatattgaaagcctggggtggcaaccagcctagccacaagagcatttcctctacagagcgccatgatgctgaatccctccaatcagtccttcaaaatttcagcctagcccagaatgagaagatggagtcagaaaagaacaaatattctgattccgtgctagtttcgtcgactttctattctgcagacggtccaagagctacctgccttacacctaacatgacacaggtgaagcaggattgcatatcaagctcttgggagatgcctcaaggtggacctctaggcgaaatcttaacgaactccaagaatagcaaggacttaagcaagtgtaaaccaaggtcatatggttggttgttgaatcttgaccatgcaccatgattcctcaatccatgaagagcttgacatagatatcccatcatgtaggcaaacaatggtcagaaaaaggttatgaccacattgcttgccccatgcatgcttgctatctacatttgtatttctgttacgtagcatttagctagttgaattatcagttcttctggatacggctgtatcttaaacaagttctagtttgtgtcagatgatatcttgcttgctagatgtttcatgttccactttcaacaggaacttcagacaaccactttgattgacagaaaactgtttgaagaaccagctctagtaaacaaggttccaagaaactacatgcacgcttttctgactcttgtttttttttcaaacatacaggagagctgtgtcatcattatattaaatacgagtacatgttaaacagatgaccatgta

SEQ ID NO: 37268 - DNA, 1692 bp, Zea Mays
ccggggttcaccgtcgcgagctcttttggaaacgagggggcggcgctgctggtttcgtctaatccaccattccaccatgcttcttccttcccttcccggccggccgcaagcagggacttgatctcaagagacgcgcgcgtgtataaaatggccggccggcgcttgctggcctagatcctcacccatctatcgagctaggactgctagatcctcacctgcccgactctcgctcgtcggttcgatctttcccatagttgcaggaacgcacggtgctagtttcgagtgtagcgcggcaatatggaggcaaagagcgcggccgcggaggtgctcaggaagaccgacgctggcggagacaatgagaggtataggcatggggagctggggcgcgaggctgtggaggaggaggaggtgaaaccgcgaagggtggcggatgcgccgctgccggcggagaggaagaggaagcgcgcggcggacccggaggacgacggcagcgtgagcgacagcggcagcggcagcgaagggcctccgcagcagcagcagcaggtgaagccgtgtctttccccggtgccgcctctccaacggctcctgagtgcgtgccgcgccctgctcactggctcctcctccccgccgacgccttccgctgtcgccttgatccgtggcattatggacaagattgggccagacgacgtcgggctcagggacgagatccgcttcttcaacaagatgaacgccgctggtcttcaaaaccctcctatcgtcacatgcaaacctatttacgagggcgccaactttacgatcgcggtgttcttcttgccactgggagcggtcatgcctctccacgaccacccgggcatgacggtcttcacgaaggtgctcatcgggtcagcgcgcctggaggcctacgactgggtccgtccccgtgtcttggccggctgctgctcgggctcccgtcgccggacgctcgcgaagaaggtgcgggacgaccacggcgtcaccgcagcggcgtccgcctgggtgctgttccccaacagcggcgggaacatgcaccgcttcgcggccgcggaggacgcccactgcgcgttcctcgacgtcctcacgccgccctacgcgcccacggaccgaaggcgctgcaccttttaccaggacctcccctacgaacaccatcgtcctcgtccctgtacctgtaggtcgacagccacaggcggtgccatctgtgacgacgacgtgcttgttgcggaggagcagacgtgtcggctggcatggttggaggaggtcccgcagcctaggaacctgagggttgtctgcttgccgttccgaggcccaacgatcttctagcctcatcaacagcccatccggcaggcagaccctgcttactatctctagctatgagggaggcatagttgatcaaaaaaaaatattgtctttttccttttggagaataggatcccgtgctgataaatgatgatgtttacagtatgtagtgttaagctactctactgcgtcactgagacaaaacgtattcagctcttcacaggtggacgacaaagccactggcttctgtacttctgtttctgcgatgaaccagatcaccgccatagtcaatataataggctctaagtctgcattctcccctttcacatatctgcagccatagtcaattttccctgagttgtacacctgactattctcttg

SEQ ID NO: 37269 - DNA, 2644 bp, Zea Mays
agatgaaatgattataaagatgaatcagagcatcgcctgcctggatgaaaagaaacacacacacacacacaaagcgatcagtgcagtggtgaagacagtataagggcaaccaaactgttgataaaaaggtcttgaagtatatgtggaatttggcaacatatatgtggtgaccatgatgcaattgcagtgtgataactgaaagtttattcaccaaggaagaaaagtacctattagcacaacgttgattaataagactatatgtaatttgtgcttgaagggaagtcattccatattgcataatatgtattaataacaattaagtccaacgaactatgattctgtaccaacacaagtgagctagtttatgtaagaaacaatttccaccgactattagagttagaaaccaaagttgtgagcacaagcaaccagtatgtattcacaataggcatttatttctcaagcccaagagataaattaaagatacatcacattacaacagctatgacatgtttacacctagaaaatgtagtaggtgtgtagacaatcaaaactatagctagttagacaagagtatctgttatgtacgagtagtaaactaaagaaatttaactgtaggagtgtagtagaattgtaggaacataatacgcaggattcaaactattggtatgcacgcttagacactatcgcatgatgatgacctctcaacataattcacacacgcaaacacctcacccatttgaggttaccatctactctgcgcgctgcagcgcacagtattgaacttaaaagctaacggtcacaagtaaaaaggagccaggtagccctaaactgatcaagccgcacgctgtacgccagaatacaaccgactagggtcggtaaacgaaacgaaacatcattaatgatggaatcatgcggacctggacgacggcgagggcgaggaactgctccagcttgagggctggtttggtgaccggggatcccaagcggaagaaatccttttgctattcaaaattgaattgcaagggaattcctcccccatggatcccctagggatccctaatcaccaaatcagcccagggtgagctggtgccatagctttcgctggtacaggtcggcgagcgccgcgtaccattccgcgagctccggctgggtcgcgccctgcgcctccaggaactccaacgccgctgccatcgacagccaaagtcccccttttctttcgtcccggccaagaagacgagcacgggaagaaccgaagcacgaatgcacgacggaacgatctgctcggtcgcggtcgggctcgcaggcttcgcagcttctcaccgagcctgtatacacttgtatacttagaaggcccaacaccacccataaggcccacaagaggctgtagcgaagttggaatggatcactagtagagtagcaccagaaaggagtactccaccagaaagatagacacgtccgccgtctccgctccggttttcgctgtctcgctgccgtcctaggtttggagccaggtcaccggcgctaggagggcgtgaaatcgagtcgacggtcggcactcggcactcacgcgttctccacctactgctggcgctcctgtgaggcgacgccggaccggccaccccgcatgcgaacagcgcacggaccggccaccggtgtgacccctccatccaaggcttcagctccagaccgagccgccccgccaatcgccgtccgccgaaccgcctaggaatttgttttcctcatctaaagttactgcattgtattccatagaaatggctatggggttgattaatgctaatcctataatccatgagaaaaaagaaagacgcatccgacaggcaccagagaccacagatgaaaatgcggtagagtccatagaccagctggaaatatttgatcacattagagatataaaggatccagagcacccatactcactggaacagcttaatgtggtgactgaagactcaattgaactcaatgatgaaagcaatcatgtcagggttattttcaccccaacagtggagcactgcagtatggcaactattattggcctttgcatacgtgtgaaacttgtacggagtctccctccttattacaaggtggacataagggttgcccctggatcacacgcaactgaagctgctgtgaataagcaactgaatgacaaagaacgtgttgcggctgcattggaaaacccaaacctactggacatggttgaagagtgcttatcaccaacattcgattgaggtctcagttattgcacatctgggagccatggtgtttcatgttcagaagccacacaagcttattgccataggaattcactcctgaatattatatttgagggccatggtgtttcatgtgcatgattttttttgtcctccgtccctttgagttaatacaattgttatctttttggacatttgttggtgcttgtgacctccctgggcaaagggacatgtaatcagatcttgtgtagtagctttcagagcgtttccagtgccacgccattttgtggctgtgtacccccagtcaactgaacttgaccgtttcgcatgaagacgatacacttgcagcagcagcgcccaccaatgaacgcaatatactttcggtttcagtagcatgcaagcggaaagacgca

SEQ ID NO: 37270 - DNA, 4276 bp, Zea Mays
ctcccgcatcaaggaccggtccttctcaactccgcgccggagcccctccgcctcgggggcgcgatggatctcctcatcgcgcagatcaccaccgaccttcgctcctcggacgcactccggcagtcattggcgctgctgcaggccctgcagcagtgcgccgcggggcgggatgtctccgcgctcgcccgcaccgctgccaccgagatcctgtcggcaccctcctccgcagtctgcaagcgcctggctctcgacctcctccgcgcgctcccgctgccgccagacctcctcgacccgctcctcctctcctccctccgctccgacctctcctttccggaccccgacgtcgcctcctcttccatcgcctcgtttccatccttgccctcccaccttctcccatcgctcctctcctctgcccatgctgaaatcgctaatgcgctctcctcgcccgctgagtcgctgcgcctcggcgctgtcacatctctgtcctcgttcctcccgcgcgatgacctcgtgctcatgtgctccacaaacccctccctcatggcacacgccaccacgtggtgggcccgcctggccgagcttgcgctggactctgcagacgctgtttccgccggtgcgtttgaggcccttgcacggttgttccaggagctagaggggcgccgcatgagccggctagctggtgacaagcttgttgatggagaaggtgtgcttgcagtgcgggcccagtgggcggctgatgccattgatttcatttggtcaaggcgcaatatgctgattgcgcgctccgtggtgatgcctgcggagagcttccgacttactgtgcaccctctagtgcatgcagcgaaaatggttgcttctggtgtagtaaacacgctgcagcggattgccaagccaggggacactacaattgctgatagtgtggagtctagtgcggagaaattggttggagtgtcagacattgtctcgcacttgctgccattccttagttcacttgacccaccactggtgtttgaggtggggatcaatatgctggcacttgcagatgtccctggtggcaagccagagtgggcttcagctgccattattgcaatcctgacactatgggaccggcaagagttctcatcgatgagggagacaattgtaagggctgttgtgaccaatcttcatttgctggatcttggaatgcaggtctctctgttcaaaagactgcttcagatggtgagaaatttgagagcagaatcagatcgtatgcatgctctggcatgtatttgtcggactgctctttgtgttgatctttttgcaaaggaaagtgttcgaagaggtcagaagcctgttccaggaacagacgtgatatcactctttgaggatgtgaggctgaaggaagatctaaatagtgtaaccagcaaaaacttgttcagagaagagctagtggcttccctggtcgaaagttgtttccagctatcccttccactaccagagttgaagaattctgggacagagagcagagttataggagctttagcctacggaactggttatggtgcccttaattggacagaacctgctttggatgtggtggaagtttgcaggccctgtgttctttgggattgtgatggtcgtacctatgcagttgattgctatctaaagttgtttgggaggctttgtcatatatacgacaccagaggtggtgtgaagacaattaaagctggtgcatctcaagatcagattctgaatgagatgcgacttagaaatttgcagctacagcttatcagggaccttcgcgagttgtgatgaattcacatccatagttgttaaggtggcaagacgaggttcacactccacgtatatcttcacgcttgatatgggcaatttctgaacactttgatcttgaaggtctggatccccttttagctgatgacccagaggatccactgaatattatcatatctaacatgcacaagatattattcaacattgattcgtctgctactacatcaaataggatacaagatgtgcaggctgtgctaatttgtgctcaacgtttgggagcaagaaatacaagagcaggacaacttctcactaaagaactggaagaatttagggcaagtacttcagccgattctgtcaccaagcatcaatcacgttatgtgttgcaagtaataaaatatgtaacaaaccatcccaataacaggtgggttgctgtaggtgatgctacaggggattatccatttagtcaccacaaacttacagttcaattttcagaggcatctgctgcccaagatagaaaattggaggtattagttcataaggccattcaggagctttggaggccgcatcccagtcaattaactctcctacaaacaaagggaatcagtgccttgcataaagagcttccaaaagcctgtactttgaccggcagcagtgatccgtgctatatcgaagcatatcatttggcagatccaactgatggcagaatcaccctacatctgaagattttaaatttgactgagctagaactcaacagggtggacattcgtgttggcctctctggagcactgtattatatggatggtttctctcggactgttcgccacctcggaaatcttgtttcccaggatcctgtccaaagtagtgtgactgttggagtttcacattttgagagatgctcgctctgggttcaagttttgtattacccgttttatggaagtggtggatctgcagactatgaaggaaactatgcagaagaagaggattcgcagatgatgaggcagaagcgctcacttcggcctgagcttggggaaccagttgttttgcggtgccaaccctacaagttccctctcgccgagcttctgctaccattagaatgctctccagttgagtatttccggctatggcctagcctaccagccatggtggagtgcactggcacgtacacatatgaaggcagtggtttcaaggccacggccgctcaacagtatgacagctctcccttccttggtggactgaagtcaatttcttctaagcccttccatcaagtctgctcacatttcatccgaacagtagctggattccagttatgttatgcagcaaagacatggtttggtgggtttgtgggcatgatgatatttggggcaagtgaagtcagccggaatgttgatttgggtgatgagaccaccacaatgatctgcaaattcgtcatgcgtgcgtctaatgaatccatcacgagagagattgaatctgatctccagggctggctggatgatatcaccgacggtgctgtggaatacatgcctgaggatgaggtgaagagcgcggccgctgagcggctgaagatctccatggagaggatctccctgctcaaggcagccaagccaaaggtcccacctgcgaagaccgagcaagaggaggaagaggagcgaaagcagagcgaggaactagatgggtttgggaaccccaagggcccctcgaccctctccaagctcactgcggaggaagccgagcaccgagctctccaggctgccgtgctgcaggagtggcaccagctgtgcaaggagaaagctatgaaagcacaatattgtgtcgcgaacaaactttttgtaacagtagcatttttaagatctggcgtgaagatcaattatgcctcggctgatgctccagaggttaagaagaaaaggaagctccagtgttcgttggacatgcagccgatgtctacccaagctaagctagacatcagcgatgatgtggtggatgctggtttggtggatgatgtggaaggtggaggcatggtgaagacagtcaggtatgttggggaggaaatggaggaagatgatgatgatgatgagggagttcttgcattagtcggctatgccgccgatccagtcctgaccctagagggcgctccagcccccgagggtgctctagccctcgagggtgtcgtgcttggttctccttctgctgcttcaatggaagttcaggttgggtcgctaatgcctccgattgacgatgctgtggcaacaagttctaccctgcccatcagatctcgtccagacgatccaaccacttttggagaggccaccccgagtcaagttcctgaagatgctacaacaacttcgaccagcgttgggatcccaatgggtgttgcacttcgtctgggggatttggagcctttggcgcttgttcctacttcctttgtggcttctacggatgttgctacttctgggctatcttggcttcaccagctttggatcttccagtgtttctattgaatttgcaggta

SEQ ID NO: 37271 - DNA, 1376 bp, Zea Mays
tcagctcggcgcagcccgaaccctccctctaatcgcccgctaaaccgctccctccctccgccaaaaggccagtccgggggcttttcctatctccacttgttggcgacttggtagtagactcgcggatacgatccttctagacacttcgacgcgcccgttataaaggccggcgcatccgggccatgaccacacagccccttgctcattggctagggcggggaaggaaattgcgggaggatgcgaaggattcaatcaattatttctggggtggtctacagccaatgcatagtctctatctgtgtgtgtgttttgtgtttcccgtgcactctattcctttcgagaggcactctatgtcaggtgcctgaaatatggtttagcttcaggcaatgaagtggacgtcggatggagatccgagtgtccacgatgacagagaccgggttttgaatctctcgtctctccatctctcatgcgttcccaacttccaactccaatgccgtctccgctggctgatcagtgatcacctctgaccctctctggtgatgtgtacccattgttaatctctccaatgaagctaccctgcctgaccaggcccacaggctgtctcctgcatacggtggcaacacaccaacactgctggcctgccctaagacacatcttcgcgttgcgtccactggatacctgctttcttagtcagcagcatgccgaaaccctccatttgtgaaacctcagcggtgataggcggtggttgtcgaacgctggcatgaaggtgtgagctcccaactgctgaatcgtgttcctcttttacatgcacgtgtccaacaagaaccaagaaccgagattagcgctacctcagtacactgccggtgcaagataaacgaaggaagctgggattgcatggcactgcggtctgttatgtagccgtggaacagcaagacaaaaagacatggatattccttgtttggattggggtgtttgatccagaaacagtctcattgctaattgtttcattattactacaaatcttggtcgaggcgtgaatatccttgctcttgatataattatagtattttgaatccctattgtgttttttacttaagtgataaatgttgcaaagaaaccattagataattgttgaatgattagttattgattacattgattgattttgatttaatgaatcttaaataaaccagaagattcatgtgtatgaatatttgtgttgggaatttcttggtcacatgttttccgcataataatatcataaaactgtggaatgaaacagcttttgcatattccgctataactttttatagcacccctatcaaatttatggggtgtttggcatgcaaaactcgagtcaaatatttcaactcaag

SEQ ID NO: 37272 - DNA, 1521 bp, Zea Mays
ctcgtcagcctgccggtcgttgctacttagagggtgtaccaacttccgggcaggcatctgcatccaaagggcgctcgattctctagctagctaggatctagcaacacaaacccgtctgtccatatattatgggttggtaacaattaattagactgaagaagatcatctaacgaggatggacgcaaagaaaccatacatgctggctattactacagtagcaatctacaccggcatgtacgtggtctcaaaggctgccttcaaccagggaatgaacagcttcgtcttcgtcttctaccgccaggctgctgcatcgcttctcctcctgcccatcgcacttgttctagaaagtgcttattatatattaccgaattcgttcctcccaatcatccggcgcggccaggaaaaatgtgcgatccatgtcctctgggttgatcctgaagttgttcttgcttgccctaatctggaacacgttaggcatgaatctgtgcaatgcaagtgtgacgctcacgtcagcaaccgtggcgtcggcaacaggaaactctactcccgttatcaccttctgcctggcactgctactgaggatggaggtggtgaagttaaggagcgtctctggcatagccaaggtcaccggcgtagcactgtgcctggccggagcgttggtcatcgccctgtacacggggccgtcgctcagcccagtcaaccgccatcaccgtgcctctggcggcgcccatggcttcaaagctccaacccgtggggggacatgggttacaggcacgttcctgatgcttctgtccaacgtcacatggtccctgtggacggttctgcagggcgcgctgctaaaggaataccccaacaagctcctcgtcacgacctcccagtgcttgttcagcaccgcgcagtcgttcgtcgtcgcagcggtggccgagagggacttctcgaaatgggcgctcaagcttgacgtcagcttgatcgctgttgcttacaccgggtttctcgtaactggcgtatcctactacctgcaagcttggtgtgtgcagataaaaggacctgtcttccttgctgtctggaacccactctgctttgtgctaaccatattctgttcctccttcttcctcggcgagaatgttcacctcggcagcattgtgggtggaatcctcttggtctgtggcctttatagcgtgttatggggtaaaaccttggaggttcatcagactgtggaatctggtgataatacggtcggtgaagtgcaaaatggacaagaagagaagaatcatcaacagaaggtgctggagaagggacgccaagaggaagcatcaatgacagcacccggtgtagtgtgatcgattgcttgattccataaagctagcaatctatggttcatttatgtcatgtctgtggttcttgtacaaattgcctgtgagtcacaataattgtttcaagatctttaaattgttacatgttttaaaggccaaaataaataaaatttaggtgataggcaaaagtaggatgatttttccaact

SEQ ID NO: 37273 - DNA, 3223 bp, Zea Mays
ggggggtgtcgcgtctcacgagcatggcgtcgtctttggcagacttcgcgcaggtgttggaggcgtcgcgacttcacgagcatggtgtcacctccggcgggcttcgctcaggtgctgggggcatcgcgacttcgcgagcaaggcataatctccggcgggcgtcatgtgtgggcgggcaggcaaaggcaacacgagggcgtcgccaatccggctcgatccgccggtttaagggttccgatggagacctcggaggcggcggccgcgcatccgcagaaggacagtgtgaaggtggccgtcaacataaggccgctcatcacggtggagctgcaggatggctgcacggattgcgtcaccgtcacgccgggcgaacctcaggttcaaattgggccccacgtattcacctttgatcacgtctatggcagctcgggcccttcatcatcattaatatttgagcaatgcgtgcaccccttgatcgatgcattgttcagcggatacaatgccactgttctagcatatggccagaccggttctggcaagacatacacaatgggtactgactatagtggtgaagggaactgcggagggataattcctcaagttatggatacaatatttagaaaagttgacacctcaaaggatggctcagagtttttaattagagtatcttttattgagatattcaaggaagatgtttttgatttgctcgatgcaaatcaagctgctgtaagacttgatgcaggttctatggcaaaagcatcagcacctggcagagtgccgattcaaatccgagagactgcaactggaggcataacccttgctggtgtcacagaggctgaggtgaagtcaaaagaagaaatggcatcatatttgacacgtgggtcgtcgtcgcgtgcaacagcaagcacaaacatgaataggcagtcgagtcgctctcatgccatctttacaatatgcgttgaacaaaagagaacatctggtacatccgacaagtcagccaacggtgactatgatatactatcgtcaaagtttcatctagttgatcttgctggttctgaaagggctaaacgtactggagccgatggacataggcttaaagaagggatacacataaataaaggccttctagctcttggcttttttaagtgcattagcatgcatagccctgctgatataaaagcagaagaaaccataaacacactcaaaaatgccaatcgcgcacgcaacattcaaaacaaagcagtggtaatccgtgatccagctacagcagagatgcaaaaattgaggagccagctggagcagctgcaaactgaacttttgttttcccgcagtgggagtgcagcgttagaagaacttcagttgctgcagaaaaaagtctctcttcttgagctgaagaattctgagcttaacaatgaacttaaggagaaggaattgtcatatgagcagttggcagagcgggcacgcgctgctcagttggaaagggatcagttgatgctgaagattgaatctgtgaggaatggaaaatcattggatgatattgaaaatattgataacgaccaagacatggaccttttgaagggctacatatcaaaaatacagcagttggagagtgaactgatgcgtcaaaacttctccaatgcttgcagacatggcttacatgaccagcttgccatggaccaggacatttttctaaatgaattgggttctggatgtgaagagctggttcgtgctgagtgctggcggtgggcgagcaagggcgtgaacgtcaagtacgaggtccgcgacagccggcgagggtacaaggccggcgcgctccgggaaggcatgaagcgcgcctacgcccgcggctgcgacctggtggccatcttcgacgccgacttccagccggagccggacttcctgtggcgcgccgtgccgttccttctccacaacccggacctcgcgctcgtccaggcgcgctggaagttcgtgaacgcagacgaatgcctgatgacaaggatgcaggagatgtccctggactaccacttcgcagtggagcaggaagtcggctcctccacctacgccttcttcggcttcaacggaaccgctggcgtgtggcgcatatccgctttgaacgaggccggagggtggaaggacaggaccacggtggaggacatggatctggcagtccgagcaagcctcaaagggtggaagtttgtatacatcggtgacctcatgaaggtgacgctctggaagaaaatccacgtcatctacaacttcttcctcgtgcgcaagatcgtagcgcacgccgtgacgttcgtgttttactgcatcgtgatccccacgacggtcctggttcctgaggttcaagtgccaaagtggggttccgtctatatcccaaccgtaataacccttctcagtgctgttgccactccaaggtcagctcacttagttgtcttctggaccctcttcgagaatgtgatgtcgctgcatagaaccaaggccactttcatcggcctactggaggcaggcagggtgaacgagtgggtggtgacagaaaaactcggtgatgctctcaggaccaaagtgccaggcaagaaaccccgcatgaggataggagacaggttgcacgttctggagctcggtgtcgcagcttacctcctcttctgtggatgctatgacattgcgttcgggaacaaccgctactacatattcttgttcctccaatccatcgctttcttcatcgtcggcattggctatgtcggaacattcgtccctcactagctagctcgtagcagaatcattctgagaggctacccatcctgatgatgcatggttgtcttcaaccccttccggtttcatttcatggaaatcagttggtagataagatcgagcaaaccttctcttgtatgtaatgttgtcatgggaaaaaaaagaaaatacagtgtaaaggcacactggcagacaagccatagatatgagtaggtatgtgtgttgttgaaggaatgtgctgtgatgcgcatggggggattggtgatgacaagcaggccgttttgagtctccatgtcacctatgcagaatcagctgtagaaaaaaaggtagcaaattgtggaagtcgaaccaattgttttgcaaacataaaaaaaaaagatgaatgtttgttggcgagttcgttgtgagaacattgtaaagttgtacatgttttgttgtctcctcttacccttctttatttgtttcccatgtttat

SEQ ID NO: 37274 - DNA, 1100 bp, Zea Mays
cgtcgcagaatggaggagccggaggcggcaagcagcagtacggcttccggccgactgagcccgtcgggttcggcggcgctagcaggggcgacgccgtcgttgacgtcccgctcgagaccatgggggactctcggagcaaggtgaaggagctctcgtcgtgggaatcagatctgaagcggcgagaggcggatatcaagaggagggaagaggcgctgaagaatgctggcgtgccaatggaggagaagaactggccaccattcttccccatcatccaccatgatattgccaatgagataccagcaaatgtgcagaagttgcagtatcttgcatttgcaagctggcttggaattgtgctttgtttgtcctggaacttcgttgctgtcatagtctgctggatcaaggagggagattcaaagttgtttttccttgcaacaatctatgctttgcttggaattcctctgtcatatttgatatggtacaggccactctaccgtgcaatgaggactaacagtgctttcagttttggatggtttttcctgtgttacctgatccacattggtttttgcataattgctgccattgctccaccaattgtatttcatgggaaatcattaactggtattctggctgcgattgacactttctctgaacatgtgataattggatcttttactttgtggggtttgcactgttttgtctggagacactgctgagcattggggttcttcagaaagtgtacatgtacttcagagggaacaagtgaagccagtcatgatggagagttacgtttgttgagaaaatttggagttacttgtggctacttgtagcacatgttcattcgatggttttgtgcatacctgtcagtacaccttgaatctataatttcttatgtcagttattggtgccgagaattgtttttttaaggtggtatgggagtataggtttgcttacggatgggtgctgtggttcttcactagctattcttgaaacgcagaagatcatgcgcccaagtcatgtttcagaattaatttactgtactcatacatgctatcgttcccctttggtgcggcgccgtagctgccgacggaactgcagtggca

SEQ ID NO: 37275 - DNA, 1811 bp, Zea Mays
tttacttctcccgttcgtcccccgtgctctttctccctctcgtggcgctgggcgaccgcctacgcaggccaggcgccgtcgccctaagctacgccaggttcccgggtcttggtcggtcccttcaccggcgaagagcacccaccagacgcgccggtgcctggatccggaggaagtgctgcgggtttcggcggttcgtctctctcgttgtttccggcggggttatgaaggcggtgggatacaacctctacgatagcagcgggactgatgacgatctccctccagcacaaaatagaggattgagaggacgggttttcagtgggaatggccgagcatctgctggggcatttccttacatgagggcaaataatgatttggagagtgaaatacatcgagttgagcaagatgcatatactggtgttcttagggcatttaaagtgcaatctgatgcaatatcctgggaaaaagagagcttgattactgaactcaggaaagaactgagggtttctgatgaggagcatagggagctattaaataaagtcaatgaagatgggagcatccgtcaaatgagggagttaagacaggcaggtggaatcccaagtggtctgcatcgtggcaacagggttttatatgatgcagaacctgggcccactaccaagaggcaaagggcatctcattcgattccttcgcaatctgcaggcctccagtcccctatgatgccctcccactcagtttcatctgcaaaatggggtcctttgtcagcaagaggcaagaaggcgaagatggtgaattaaaatttgcctggctgattatcacattgccattaattattcagttgaagattgataaacactccttaaacagatggcacctgaagatataagatgggaatttgatggacatctttcaaatcatgatggctggggcccttctggccctatgctgaagaggcacatgaccaacaacggtgctatggcaggttcaatcaggggaagaggaaggttatcgataaatgagcctataaaagactatgctccacctcaaaatgacatcaataggaattttgattatattgacataccaaatactgaaagtgttgttactgaggtggagagggtgttggccaatccaaatatgcctgaaatcgagaaggcaaggaaactgctgaaagatcaggagcagtcattacttgatgcaattgccagacttgatgaagcatctgatagcgatagtggtaactgatatggctatggaagaccgaaggggttctgctggggtcctggggaatggaacggcattgctacttagttgttggaattggaagattaacatgcatctgtgtatcacctacctcgaccacagaacaaacaaaccacattatggcaaaaaaattgacatgccagaaaatggtgcctggaaactgttgatgcctgaaatgggatttgctggctacacaaaattgagcgcacgaggagcagggatatgcaaatgtcagaactgtttgaatggtgtttcctatgtagcgtagtaaaagtagcttaaatgttctagatgattagcacggatcacttagcattcctgattcagtataggtagatgtctaactctagcataatatccaacttggttgttcttgtactctaatgtgaaaaaggacgttgttcactcttttcatgttggctgcttggctaggactttgttgtgcacgcttttcatttatgctgctggacgtatcttattaactactaagagcatctctaagataggtcctaaacaaggttgtattttaaaatataggccctggagtcttaaaa

SEQ ID NO: 37276 - DNA, 2341 bp, Zea Mays
acaccgggccgccacacaaaatccccacacctgcctgcgtatcgcgctgcccacccaccgcacatccccgcctcccgccggccggccgcccgcctaacgactcgcggtcaccgcctgcgggccaccgtccgcccccagctcgcttacgatattgtacgttcgtggcgcggagcaccgtggtgttggcctagtacgtcgatttcacggtgacttcaccaccattgccgcccagtggctgcagaagctccccgccagcaacaagttcacctacaactgcgacggccacaccttcagttacctcatagagaaaggatttagtgtgggattaatctggacttggataaatgaagtataatgcaagaaatgtgggcaaataataccttggctgtgtggtggagaacaaggtgttttgcaactaacggctcttacgtttacaagtttgtgttttctttaacccttgaacattgaagtgaattgtgttgccacattgtttatgcattataggtatgaaagtatatttatcctggcaaaagattatgttagtttttgtgcctaaagaccatttatttcttttagttctttaaatgaatagctctagctttgcatgtactgaaattcattatgctcttgctgtacttgtagctgcttgctaatgtcaactaaaactacctgttgccaacttgatgagttgtgtgttaagcttgtttctctgaacatgtttttttgcctaattgtcatggcaaaagaaagaaaagaaaaagaaaaccgagagataaaaaaagagaagtctgacccaattgccctggaagcattgcaatctcctgccgtcctgtgttcacacactgtttgccatattctctcgttcaccttgcctggccctgctcgattcggccactttcatggagccaggtgtctgcatcactggggcggggcctagtgtcagcgcaaccaaacacgccggtgactgtcgccacccttctcccagctgtcaggtcttcgttgggccctttgcccacgacgagcacctgccacaccaagaatcccattaagtttactgctgctaccatttaaagggcagaactgccggtcttcaagctctttgttactcctgatcatctgtggcacaattgtcatcgggcaaaatgccatcagtttatctctacatccctaacattatcgggtattttaggatcatcataaatttcattgcatttgcggtttgctattccaacaaggctctctttgctgtcttgtacttcttcagctttgtccttgatggtgtggatggttggtttgcacggaagtttaatcaagcatcaacatttggagcagtgttggacatggttacagatagggttagcactgcttgtttattggcccttctttcccagttttacagacctggtttagtcttcttgatattgctcgggttggatattacgagccactggtttcagatgtacagttctttcttgtcaggtaagactagccacaaggatgtaaaacacacaggcaattggcttctgaaattatattatgggtacaggccattcatggccttctgctgtgtttcttgtgaggttttgtatattatcctctttctctttgctgatgagaagtcaacaagcttgcttagtgcatgcaaaggtctcctgaaccaaagccccatcattatcttggtgtttatttccacattagttggctgggcagtgaaacaagtcaccaatgtcatccagatgaaaacggctgcggatgcatgtgttgtgtacgacctgaagcgcagcaaatgaaaagcatgaagggaaaactctacggtttaactcagtcctgtgtggacgtatccaaagggaaaaactctccgaggggatacgtcttacgttccttgacatctttctgatgatgccttacgtggggccagaggatgacatgccgtgggaagagcagcatgtcataaagagaaccaacgcaaacaattgttttgtgaaggcggctattgatttgttgtcaagagtgttttattatgtcatacaaatgatgaattgatgatggtacctttgttacctgggctagccctttgtgtcaacatgaaagatgcttacgagccacatgttcccttctgaaatgaaggttttgagttgcaaaaatttacatattcccttctgaaagccagcaactgcacctcgagagggtttaatggttacttttaccccccaaaataggcactagctattattcggatgatttcccttttgctccttattaaacatcctttggttcagttttattgatagttttaatttttttacatgatctcccttagttcaaaaaaataaaattaaaa

SEQ ID NO: 37277 - DNA, 3419 bp, Zea Mays
gccgatccgaggccaaagggagggaggagacccctttccctctcgccgccgcacgatggtcgacaccaggcggagctccgcggccaagcgccggggcccgtccgaggactcctccccgtcgccgccgacgacgcaggcggacccgacgacggcgggcttgccggtggagcccgcgtcgcccccgccgtcgtccgggagccgatcgggcaagcgcgccaaggtcgcggttgcgcgggcggaggaccccggtgcgccgcgcggcaaggcggtggaccccgccgcggtcgacgtgctcgacagctccgtggcgaacctgcagggcgtggcgaggccgccggccgccaacgtggccgcgtcctccgccgtgtccaattccgtagggaggaggaagaggaatcagtctgtgagggcgatcccgacgggcgaggggacgctctggaagccgaggcccgccggtggccgcgctgaggcctggggcagattgatttcccagtcttccgagtatccctcaattccaatttatactactcatttcactattggcaatggcggaaagtgtgacttgaaactcactgagacatctcctgggccacttatttgcaaactgaagcatgttaagaggggtgctgcccttgagatctacatgaacaaagttgtccatgtcaatgggaaggccttggacaaagctgctaaagtcaccttgatcggtggtgatgaagtcatgtttgtttctcttgggacacatgcttatatatttcagcaacttctagaggaaaaagcaagcacaccatctttgtgttcaaaatgtgtcattcaacaagaacaatatccagttgtcaaagataaggagatagtcagcagtttatgtaagactgtgggggagcaaagctaccacccttctgaggaaaatatgacatttggtcgacaccaacttttgaaggatgatttgaagaaagcagctataagtgcaaggtctgagatctaccaagaattactggttaaggcacttaccaaatcctttggtgctaagctgcttgtcatagattattcgctgctgtctggtgggcagccttcaaagtcaaaggaatcaaaaccatacaaaaaaggtgatagggtgaggtacattggtcctattcaatcatcagggtttatgtttgagggacagagagctcctgattatggttcacagggtgaagtgaggcttacttttgcggaaaatggatcctcaaaagttggagtcagatttgataaacagatccccgggggcattgatcttggaggcagttgtgagcttgatcatggcctattctgttcagttgattctctatgcctcgatggtccaggatgggaagatagagccaaacattcatttgatgttgtgtttgagtttgcctctgaagaaagtcaacaggtgcctgtaatcctatttctgaaggatgttgagaaaatatgtggaaataattacacctaccatggtctaaagaataagcttgaaagtttcccagctggagtttttattgttgggtcccagattcagacagatgctcggaaagataagtcaaacaatgggtctccttggctcaagttctcatatagccaagcagcaatacttgaccttgcatttcaggatagctttggtcgggcgggtgaaaaaaataaagaagcactcaagatgtcaaagcatataactaaacttttcccaaataaagtgacaattgaatcacctgagtttctaacccgccatggtatggaatgtactgatttagaatcagtggtttgtgttaaagatcgtaatctgacaagcgaatgtgtcgataaaatagttggttatgctttgagttatcaactcaaggatcaccctattcaaactcctggaaaggatgcgagagttgtcctttccggtgtaagccttaagtatggaattgatttgttggaaagtatccaaagtggccctaagaagaagagcacaaagaagtcactcaaggatgttgtcacagagaatgaatttgaaaaacgtcttcttccagatgtcatccctccagatgagattggtgttacctttgaggatattggagcattagaaaatgtcaaggaaactttgcaggagttagttatgcttcctttgcaaaggcctgagttgttctccaaaggacaacttatgaagccatgtaaagggatattgctttttggtccacctggcaccggtaagaccatgcttgccaaagctgttgcaacagaggctggtgctaattttatcaacatatcaatgtcaagcattgcttcaaagtggtttggagagggagaaaaatatgtgaaagctgttttttcacttgcaagcaaaatttctcctagtgttattttcgtggatgaggttgatggcatgctgggtagacgtgagaatccaggggaacatgaggccatgcgcaagatgaaaaatgagtttatggtgaactgggatggtcttaggacaaaagacaaagaacgtgttctggtacttgctgccactaataggccatttgatcttgacgaggctgttgtcaggaggctccccaggaggttgatggttaacttgccagatgcacccaacagaaagaagattcttagcgtgatactagcaaaagaagatttggcagatgatgtagatctggaggcgttagcaaacctgacagatgggtattcaggcagtgatctgaagaacctgtgtataactgcagcacatcgtcccataagggaaattcttgaaagagagaagaaggagagaaccttagctgaagcagaaaataggccagccccacctcagtgctgtagcggcgacgttcgctccctaaagtttagtgatttcaagcacgcacatgagcaggtttgtgcgagtatatcatcggattcaaaaaatatgaatgagctcgttcaatggaacgacctctacggagaaggcgggtcgaggcacaagacaccgttgagctactttatgtagcctaacgtttttttagatgatttgtacatacagaagcagcctttgtataggtgtgtttccagttaattttgctggaaacatttattcatgtcgggtttcgtttctataatcatatcagcttgtgtctgcatctagtgtagcctgagcttctgattagttattaatttatttcagtccgttggatcttgcgtcctggtatagtctgtgaaaggtctcgacggagattcatttggatttatttaatagtctggatgatatggtaatgtttgtgtgggtgtgtgcgtgacagagaaggttttacccttccctctgcactaggtatggcaaagaggaaattctccacaggtcctacgaacgcttgtggtggccatttcttttccatcttcgttattcgtggggataaatcctatcggaattccaattataattagatagtacttgattt

SEQ ID NO: 37278 - DNA, 1009 bp, Zea Mays
ctcgccatagtgcggacggagagcccaggaactgaaagcctaatcgcaatcccactcgcagcaacgacctacgccgcccctaactccaatccagaaccccagagtccagaggcagaccggcaagctggacacctgcggcatggagcgggtggcgctgctccgcacctcaggccgccgcctcctacaccgctgccgcaggggcaggcccgtcgtcgtgcccgctgccgcggcctcatccttggcacgccgggcgtcctcgttctcactcccggcgcgcggctactcggctctgccccgcggcggcgcgcgattcctggtcgctgcggcgccgctgcactgctccggccggtactggccggccgctgcgccccagctcgcgcggaggctgtccgcctccgctgtatctacctcgccctctcccgtgccctatgatgacgtacatgagtatgccacaaagctcggatttgaaaaggtctctgaacagactatagatgagtgcaaatcaattgctgttctttacaagcacaagaagacgggtgctgaagtaatgtctgtgtcaaatgatgatgagaataaagtttttggcattgttttccgtacccctccgaaaaattcaactggcataccccacatccttgaacatagtgttctctgcggatcaagaaaatatcctttaaaagaaccgtttgtggagctcctaaagggtagtttgcatacattcctgaatgcgttcacatatcccgatcggacatgttatccggttgcatcaacaaacactaaggatttctacaacttggtagatgtatatcttgatgccgtctttttccctaaatgtgttgacgacttccaaacatttcaacaagaaggttggcactatgagcttgacaaccctgaagaagagataacatacaaaggtgtcgtcttcaatgagatgaaaggagtttactctcaacctgataacataatgggacgtgtatcccaacagctgaaatcaggtccagacctatag

SEQ ID NO: 37279 - DNA, 2137 bp, Zea Mays
cctctggcctcttcgcgcagagccgcacaccgacccacgccggccgcgcccaccaggcagccaggcaccacgacgcggcagcccccggcctcggaagccaagagccataccgcctctttttcctccaaaagccaaaccaccacaccccctaatctctcgctctcttcctttctcacccccgtgaccctgtctcgccccttctcgcctcgccgccgcagccgatgggctccggggaggagccgtcgcagatgcggagggcgctggtggactcgctcgcgggtgccatctccggcggcatctcccgcaccgtcacctcccccctcgacgtcatcaaaatccgcttccaggttcagttagaacccacaacctcgtggggtattcttcgaagggatatatatggaccttccaaatacactgggcttctgcaagcaaccaaagatattctcagagaggaaggtttaccgggattctggagaggaaatgtaccggctttgttgatgtatatgccatatacagctatacaattcactgtcctacacaaactaaaaacatttgcttctggttcatctaaaacagaggatcatttgcatttgagcccttacttatcctatgtaagtggagctctagcaggatgtgcagcaactatagggtcatatccatttgaccttctgaggactattcttgcatcacagggtgaaccaaaaatttaccccaacatgaggtctgcatttgttgatataattaaaacccgtggtgttcaagggctttattctggtctatctccaactcttgttgaaatcataccatatgctggtttgcagtttggttcatatgacactttcaaacgttctatgatgacatggaacagatataaatattcgcatcttaactttggaagcgaggatgattctgtatcaagtttccagctatttctttgtgggtttgctgctgggacattttcaaaggctgcatgccacccacttgatgttgtaaagaaaaggttccagattgaagggctaaaacgccatccaaggtatggagctcgaattgagagcagcacatacaagggcatgtaccatgccctaaaggagattgtcgcaaaggagggatttggaggcctttataagggccttttcccctctttggtgaaatcggcccctgctggtgctgtgacatttgtggcatatgaatacatctcagactggttagagtcgatactgatgtgaaaatcttcaatgcagtaatactttatccccctgttttttctgttgctgtttatattatttctccatgctgttatacacttgtgtctggaagaggctgcagttccattggatcttgcagtccatacgaggtttgggacttgggagcctgctaaaatcaactggataattcatgcttgtaaggtcctctcatgggtttttggcaaactattaggcgttacacaaatcggcaatcgagttggtcaccgaaaatttgcatttctagatgtctatgcactgagccctaccttttcttcaaacctgaagttttacgttttctttgttgatgtctgcatgctcgttcatgtccggagcagtgatagaacctgaaactgatttgcaggatagggagcaaggctggagttgagtgaggtcttgatggatcatggagctatcaagataccatgacgagaactttttgcacaccgtggacatggaggatggagaccggaaggtcaatcgtcaagtgcatacaattcctagagatccgatacatgtaaagccttacatagaaaagagctgttttgtcgtttcttattctttccccaattgcctaatgtggtggtagggcattcgttggcttgtaaaacaaggctgactacaactaacttagtgatcgcgacgcgtcatacatgactaagtcaaaagcagccggcagttttgctgggatcgtgttacgaatcttttctcggctgcagtcatgttttccttgcggcttgttggggctgcgtcttctacagtcttttttatttatatggattgcacctgcaacagactgcagcagctacggttgtagggcagccgaacaaatttcatggttgatggcagtcgtaatttattcaaccattttgttgagcaccatttatagtactgag

SEQ ID NO: 37280 - DNA, 4092 bp, Zea Mays
tttttttttttttcaccaagcaaattccgtgcagcaattgaggaggctttccttgctgaacgtggtttttttgatctcgaaacggatggggtatgctcaccgcgaaagtctgtaaataagcagtctgatcctattggttttcaggaagaggctgcttcaaataacgagcaagaatgccaatctgagtctcaggttgttggcaaatcggcactgtgttgtgatagctgtggtaatcgtctaccatccaaggtttcaaagaaaaggaagcaagcgggtgagcagatgctttgtatgcactgtgaaaagttattgcagtcgaaacaatactgtggcatatgcaagaaaatttggcaccacacagatggtggaaactgggtttgttgtgatgagtgccagatttgggttcacgttgaatgtgatctaacatgcaacaacgtcgaggatttggaaaatgcagattatttctgtccggattgcaaatcaaaaagtaaaacagttccagcaactgaaaatttgaatacttccacttcagaatgtgccagcacttctaagggaaaactgaccgcaatgatagctgtttgctgcaatggcgaggatgcactgtatgtacctgagaagcacatgatactatgtcaatgtaagtcttgcaaggaaaggatgatgagtctgaatgagtgggagaagcatactggctcaaggaaaaagaattggaagatgagtattagacaaaagagtactggggaactactcattaatttgctggatgatattccttgtgggacatcgaagtattctaacccaggcattaagaaagaagagctgctacaattgcaagctaatccttacagtcctgtctgtgctaaatggacaactgaacgatgtgctgtttgtcgatgggttgaggattgggactacaataaaattataatttgcaacagatgccaaatagctgttcatcaagagtgctatggagcatgtgctgtacaagatcttacaacatggctttgtcgagcatgtgaatccccccaacagaaaagagaatgttgtctatgccctgtcaaagggggcgctctcaagccaacagacattgatggactgtgggttcatgttacatgtgcctggtttcagcctaaagtatcatttccggttgatgagacgatggagccagctatgggaataatgagcatccctgtagaatactttaagaagacttgcgtcatatgcaagcaaatgcatggtgcctgcacacaatgctacaaatgctctacctattaccacgcaatatgtgcgtcaagagctggatattgcatggagttgcaatgctctgaaagaagtggcaggcacattacaaaaatggtttcatactgtgattttcatagtactcctgacccagacaatgtgttgatagtgaagacaccggaaggtgttttctctaccaaattttttctccaaaatggtgagaaacagacagctgcaagactcgtcaggaaggaaaatcaccaggagaaagtgcttcctcctataatttctgactgtctagtcgcaaagtgcctgacctatgaaatgtcgaaatacaagaaacaaccaggagaggctattgcccaccggattatgggacctcgtcaccactctcaggattttattgatggtcttaatgcatgcatggatcgtaaggatgaccaatctttttcaacatttaaagagcgacttcggtatttacagaaaactgaaaatttgagggtctcgtgtggtcgatctggaattcatggatgggggctcttcgccgcaaggaatattcaggagggtcaaatggttattgagtaccgtggcgaacaagttagacggtgtgttgctgacttgagggaagcacagtaccatagagaaaaaaaggattgctatttgttcaagataagcgaagatgttgtcatcgatgctaccgacaaaggaaacatagcgcgcctaattaatcactcgtgtatgccgaactgctatgctaggatcatgaccgtcagcgatgacaggagcgagatcattctgattgccaagagagacgtctctgccggagaagagctgacgtacgactacttgtttgaccctgatgagtccgaagactgcagggttccatgcctgtgcaaggctcctaactgccgtgggtacatgaactagaagactaaccaacctcagaaacagggactaaagactaacgtgaccccccttacagttacagaggccaaaggctggccatttttcccggaattcttccgttggcttctcggtttatatttactggaaagtttattagttctcgtggctgcccaagttttgaaccattttgtttagatattgcgattgagggcagccaccccattgtatattctttcattgttgtaataagataccagtataatcaagaatgctgactttgaaatggaaagaagaaaaaactcaacttgatgccgtcgtctgcctgtgacatcaatgtattaaccactcgctttggcctgtccatgtctggacttcgaaccagatgacctgatcaaaccgtggaactggcagtaatcttgctcttcaatccatctatcatcattaacaacatccgtgttgagccggcaggccgtgtgcccgtccgacgaccgggtcccgacaggagagtttaagcaggcagggcagggccgccgtggacgcgggaccgaagcagggccaccgccgctgcaccatgacgcgtctgctgctggcgtgcctggctctgctgctggcgcgggcggccgtggcgcgggagtacgcggccgtcttcagcttcggcgactccctgtcggacaccggcaacctgtgcgtggacggcatcccggactacttggccacggcgcacgcgccgtacggcatgacctacttcggctatcccacggggcgcgtctccgacggccgcgtcgtcatcgacttcatcgcgcaggagctggggctgccgctgctgccaccgtccaaggcgaagaacgcgacgttccgccgcggcgccaacttcgccatcacgggcgccacggcgctggacatggccttcttcgaggagcacgggctggcgcgcgccgtgtggagctccggctcgctccacacccagatcgggtggttccgggacatgaagcccaacatctgcagctccccgcaagagtgccgtgagctgttccggcggtcgctgttcgtggtgggcgagttcgggggcaacgactacgggtcgaccatcttctcgttccggccgctggaggaggtgcacgcgctggtgccgcatgtggtggacgtcatcgcgcggggcgtggaggagctgatcgcggagggggccgcggacctggtggtgccggggttgctccccaccggctgcttccccatgttcctgtccaccttcgtcggcaagccggccgcggcgtacgggccccgcagcgggtgcaacagggagctcaacacgctgtcgtgggtgcacaacgcggcgctgcagcgcaaggtggaggagctccgcgccaggcaccccgacgtgcgcatcgtctacgccgactactacacgcccgccatccggttcgtcctccacgctgaggagtacggcatgctgaggcagacgccgcgggcctgctgcggggcgccgggagtgggggagtacaacttcaacctgacgtccaagtgcggcgagccgggggcgtacgcgtgccaggacccctccaaccactggagctgggacggcgcccacctcacggaggccgcctacggccacatcgccaagggctggctctacgggccctacgccgacccgcccatccttcacccctgaatccttctccctccgatccgcccgccggcgccgggtaccgacatacgaataggcatacggatacacagcatgctagttaatctagtttgatttgcataagaagtttttactattgtactcgtagtgttttttaatacagtataaaattataaactgtacatgtaagtttgcgctatgttaacttctgtacataacttgggatcggagtatatataaacttgtactattacatgttgagtaataatatacagatcgatctctttcgacttttttaaaaaaga

SEQ ID NO: 37281 - DNA, 2877 bp, Zea Mays
aatcggatgaatctgcgtctaaaaaaagaaaaaaaaactcattgagaactgagatgagcagaggttgaagcatgtttgcaacgaatgaaggtagaaggcaaagatacgaagatatgcctgcaaaagtgagtttccttgtattgattgaagaaattcgttgataaatcttctatgatcatcaaatactgacacgattgacacccttgcattgtgtgcatcacagggatctataagtggaagttcatgtcagctttactaacagataggatccgaggcttgagtgcttgacttctcttcctcttccctcctgtatggatcaagccacagataattagccttctcctttactcttgcttcaactttctagtctgactctgatcttgcctttgctgagcttcaatggttagctctcatggatttcttctctccctgcaagcattaaccatggtttccacaattatgacaaacactggagtgatagccactcaagggcaagccttctgtccttcttcctcctgtgggcatcttcaagacatccgatctcctttccgtatgcaaggtgacccacaaggttgtggtttcccagaatacgagctggtttgtattgatagcaaggctataattcacatcaataatggacgatactttgtgactagcatctcctatagcaactctactttctgggtcgttgatgctaatttagataacagcagctgccccattcctgcgagcaaccaacgtccctatgtaaatggtttgccatccgaaggtcgcaccctgctggatcctgacacagtaacttgggcggcctttgtgagttgttcagagatgctaagtgacgtttcttccccgttcctcagttgctgtagtggtatttaccagcctgtcaactgccgaagtacgaagaattcttttgcttatgtcttcactaccacattctttcctatggttggagacatcaagccgtcatgtagatacttgtccatgattccttttggaagtcggcatgtcaagcgaccagataatgcaagctatgatgatattgtaaagtttatgaagaatggctttgctgtaaattttccttatcgcaatggacggtcgtatcatttggtcatcaacacatgcttgaaagatgcaaatggttacttcaacgataaaatatctaactcaagcattgtggaccagacattggctgcggtttttgggatcgaccttcgtttcttaagatgtgtaaatgattactcgtacagaagtaaattgttttgggctatggtcgccatgatatctactgtagtcattgtgaagttcgtgatagtatttggaatactatcgaggtttgtgtttgcaccattaactgtactgaccttcctcgcctacaagtactggaaaacaaggatatccattgacgcagtcgagaagtttctccagatgcaacaagctcttagcccagcaaggtatgcctacactgacatcaccgcaatcacaggacacttcagagagaagctgggccaaggaggctacggatccgtgtacagaggcgtgcttccaggtgacgtcagcgttgctgtcaaaatgctgagcaactcgctgtgcaacggagatgaattcatcagcgaagtgtccaccatcggaagcatccaccatgtcaacgtggtgcgtctggtggggttctgttcggaagaaaccaagagggcgctcatctacgagtacatgcctcgtggatctctcgataagcacatcttctcttccgagcaaagcttttcgtgggataagctcaatggaatagctttaggcatcgccagagggatcaactacttgcaccaaggctgtgagatgcagattctgcactttgacatcaaaccacacaacatccttttggacaacagcttcactcctaaagttgccgactttgggctagccaagctgtacccaagggacaacagctttgtgccggtgagtgccgcgcggggaaccattgggtacatagctccggagatgatctcccgtaatttcggcgtcgtttcgtgcaagtcagacgtctacagcttcgggatgctgttgctggagatggctggtggacggaggaacctagaccagcatgcagagaggagaagccagacgtactacccagcttgggtgtatagccatctaactcggcaggaggtgggcgagatctgcgaagctttcgatgtccacgaggtggagaggaagctgtgcgttgttgggctatggtgcattcagatgaagccacatgatcggccaacgatggctgaggtcgttgggatgcttgaagctggcgctgacggtctgcagatacctccccagccattcttctgtgggggtgagcttactggtagcacttcgtatttctcctcggagttgagcgcaatctcggagaatggatgaggttactggttccacaagatgaactgccaatgtgctacaagtagctagaatctgaaaaaaaatctgttgtacttggacgatgctcaatatttagtcggttgcagtgcactgtaattcgattctatgctgtaatgcgtctgcatcaggcaccagcagcttcttggatcaaagggatgagcatgtactcgtatgatgaattaaaaaatttggtggatttcatatggataatccgtgttgctcgtacacgagttcatcttttgttcttaacacattcattgataccagcaactatttgatcacgacaatttgcggatggtataagtggccatcgttgggggaccagttagccgcgtttcgagatttttttttttggtttttttttctgccaacgcactactccagtccactttgactaccagcacccattcgtcttgtcaaagccaaccattgttgaccaagcatgttcaggaa

SEQ ID NO: 37282 - DNA, 882 bp, Zea Mays
gaagacttggagcccttgaagcaacgctttccatcagccccagcttggggacaagctggtgctaaagggggggaatacctattttcagaagcccagtgttggcgatatcacggttccaaaaagctcgcttccgttggcttcactcccaactctttactcgctcactcccccgcgccactgatctctccttccgggaccctaattccgcaggaggccgcgccgggggagtgacgccgatgcagcgccgggtgggcatggcggacggcgaggctaggtgtcggacgctcggcgccgtcatcaaggagaaggatgaggagttcgcgctcttcctcgagatgcgccgacgcgagaaggagcgcggcgctgcggccgccgcggcggaccagcttctgctctccggggacgtcgcggcggagaacgggatgctgctcctcgacccgccgccacccgctgagcccaaaccggcggcgtacaaggtggctggcggcggatttaggagggcgcctgggggagtggacgacttcctcaatgcagacgccagcgacaagaacgattacgactggcttctgacaccaccaggaactccattattctcatctctaaaagttgagccaaaaaggtccctggtgagtcaagctggaacgccaaaggctcgtccaactgccttgaaatcaaggcaacttgatgttgtgatggaggaggggcaaggggaggaattggaggttatgttgtcggaatcagatgacagtgagtttgatcatgatgatgagtttccaccgtcaactgatggagatgagttgtcaaaaactgaaaagacaaagagaggaggaaagaggtcaagagctggtattcagttgtccccctccaagtgcaaggcgaata

SEQ ID NO: 37283 - DNA, 1756 bp, Zea Mays
aaaaaaaatggatgctttcatggggtcagtgctgggtgccctcctggccgtgctcgcctccacgctgctgatcggagcgctgttctttctggtgtggaagccctacgtcgtcacccggtggtttcggggccagggcatcgggggcccaagctacaggttcctcgtcggctccctgccggagatcaagcggatgaaagccgccggcagcaagatcacactcgacgtcggctcccatgacttcgtccccatcgtgcagccgcagtaccgtagatgggtatccgattacgggaagacatttctgtactggttcggcgcggtgccgaccatctgcgtcgccgaggtgggcctggtgaagcaggtgctcgcggagaggacaggcctgttccccaaggactacatgaacgacagcatggaggtactccttggcaagggtctcgttctcgccaacggcgaagactggaaacgccaccgcgaggtggtgcacccggccttcaagcccgacaagctcaagacgatgtcggtggtcatggccgacctggtgcagcggatgatgcagcaatggcgatctcagatacagcgggccagcaaccatgaggctgaaattgaactcagcagcgagttctcggagctgacttcagatgtcatcgcgcacacggccttcggtaccagctacaaggagggtaaggaggtgttcgtcgcgcagaaggagctccaagaactcacattctcgacatggcttgatatccctgctcctgcttgtctaagccgacgagttgaagagctggacaagaaggtgaggagcatgctcatggcgataatcgaagggcgccttgccgcgaggggcaccagtggatacggcaacgatctgctcggcctgatgctccaagcgcgcgctctggagcaagaagggcaccagatgctcaccacggaggagatcgtggacgagtgcaagaccttcatcttcgctgggcaggacaccacctcgcacctcctcacctggaccatgttcctgcttagcaggtactctgagtggcaacacaggctgagggaggaggtgctgagagagtgtggcgatgcagtgccaaatccggacacagtcaccaagctcaaactggttaacatggttcttctcgagtcattgaggctctacagccccgtggtgttcataagaagggccgtaggctcagacatcctgctccgcagcacgagggtgcccaagggaacaatgctgtcgataccaattgcattgctgcacagggacaaggatgtctggggccaagatgctgacgagttcaaccctgacaggttcgagcatggcgtgtccaatgccgctgccaaacaccccaatgccctgctgtccttctcccaggggcctagggcttgcatcggccagaacttcgcgatgcttgaggcccgtatcgggatcgccatgatccttcagaggttctcgtttgagctctcgccaaactatgtccatgcacccaaggaagcggtcacccttatgcccaggttcgggcttcccatcatcctgaggaaccttcacgattgagatgtgctaccataaatatatatacgcactgccacttccttttgcccgaggtttgtcacactaaacaaacacttgtgggtatttggtatgtcattatgtgatgctgttgtatttttttactttatttacggtttgctttagtttcttacgcagaatgtaatgaataaaaacttgtcagggagattacctgcaataattatagttgtg

SEQ ID NO: 37284 - DNA, 1061 bp, Zea Mays
cagcgagaaactcacgaaaagagaggagccgggaagcaaagcgccgacgactacgccgcaagtcccaacccaacccaccctatccagaatccaggtatatcagatgactcgacatgtcagttctcgatgtttcaaatgctacagtatgttaaataacaggcaaaaggttgagtggaacaataggggtttctctacactccatgcattggtagctgctgccgtttctttctacctggtcatgatctctgacctcttcaatgaagatgcgcacaatagcataataattgacagaaaatcatggctatccgattgcatgtttggggtctcgatcggttactttttgacagacttgacgatgatcatgctgtattttccttctttaggtggaaatgagtatctcttgcatcacggactttctatgtatgcaattggtcttgctttattgagtggcaaagcacacatgtacatcctcatggtcctcttcaccgaaatcacgactccctttgtgaacctcagatggtatttggacgttgctggtcagaagacttgcaatctttacttatacaatggtgtggctctatttgttggatggctggtatgggtatttgaattttccaccccgagaggtactaccagttagcctgggcatctgtggaaatccattgacttctgacaatgcgagatccatcttcagcttagggttctacagcttggtggcagtgccgtcggtggttgcggtgatgaacgtattttggttctggaagatactcaaggggatggtgaaaaccctttctaggaggaagcacagcgaaaatgggagaacagattagaaggaatgaaggaaggatgctactgaactgtacacatgttcatctcaacgcacttacggcactcgcattcatttctcacacagatgtaattatcttgtcttgccgtcaaagattcaaagtcggaatcccgcaactcttaaattgttgcaacagtgccacatgcaccgttactgaatatatattggccactgtcagtgtcagcgtgctcgcttgggagctgattacacgcgc

SEQ ID NO: 37285 - DNA, 8309 bp, Zea Mays
cccttcaaggccataaaagcagcaaaaagcaaagcacatgatctaagatctaaatactatctatgatccactatgcctttcatcagcatagtgactacaagctaatgcatttcaggcatacctctagtgtgttccagatccaaaaacgaattatcaaaactgatcaagagtagataaaggatcaccagttgcatcatcaaatataacaagcggaactacagcagtatctttcttcggaaatgcctgtagagaagaatgtcaagtaatttgtggcaggtttagagctattgatgaagcatttcagtatcccaactaagccatgttcttgtaagctacttactgcatgcccaaccaaaatcaatgttcaagcttcaatgcaattatagaataaactacctactgctaattagtggaaactgcagaagcaggaaccatttgtggacaatttatcctgacaagttcctttttcctcaagtacgcaggagaactgcgataagaaacaaactaaaatcactttattacaaatttagagcacaataaattgaatttcaatgacaccatgttatataattgaaattagccctgttggtttccttaccttctaaaaataacattacagcgcagaggtcaaactaactcagatatcctccatctatcattctactgcctagttaatatgataccatccttacagtccacaaacaccaagtgaaccgacaaaaaagagcgctaactaaataacaatgttacattaggtgctaggcagtgaccttcagcctaaagcttaggcgaggcaagcctaggtgtttcacaaatagacaaacatatacaaatattacctcaaaggaaaagaaaaaacaggagattacaggcctagggttggatagaaaggcccatcaaaagcagcctagtccatcaaaaacagcctagcccaccttataccttcccagcttatccatccgctctctgccctgtcgcaccttcctctgctctcaggcgcctacttcctccctaccaccttgaccaccgccagcctcctctctgctgcctccagcaccacctgcctattccagccatgcctgccacctccaccactgactgcctccttccggccgcatctgctaccaccgccatcacccccgtccctgcctcccccgctaccaaactcagtgcccctgcctccgccaccggcactggcgcccactgctcccgccacgtccccatcaccaccctcttttcacctattcctgcctccttcctgctgctcaacatccctgcctgccgggatcggcacataggtacaccgggtcgctaccaagggctcacctacaccccaaggcgggtcgctaccaagggctcacctacaccccaaggcgcctacacctaaacctaatcgtgcgtaagtggccgcagaataccaccttttggaacactgctaaataatgatctaatactaaacaacttttaatcctgaaaatcaactgcggacaacatctatgccaatatagttagcctacatagcaaaaacaaaaaaaaataacaaacatttgcaaccataatatataattccaaccaacatatatgacatagtcctggctgtatgctcagtaagtggagcatgcggatgtgtgcccagcccagaccacctagattcaagttctcgtcaaggcaaatttatgtgcctattttcttctgaataataaaatggtacctaggtcctcctaggttgagctagtttttttaataatccttgaaataacttctctctgtgctcaaataaatagtcaaatacaaatcatgaatattttttctataactttgtgcttaggggcaaacccagtgccaaaggctcccacatattggcagagggataaacggagaagctgcttcaaaccagcgacctggtgaggcttgcccttctaatgacactactgtaactttgtgtttacatgggaaaactcttctgatagcacatctcaagtagcattcatgattttttaacaaaaataatttttactggtttctggggtgacgcgcacaatagttaatacaaactgatgtaaactttatgaaatggtactggtaatatttcacacatacccctcttttatttctttcatcacattctactgaggcaagttcacagttaaatggtggtttgaaaactaatttccagcaagaatataaatgctttgaatcacaacttctacaacaaatattacatcacagatattagttaattaaagaaactataattcaagtccaaaacaaactacaagagtaccttcaaaaaccggtcaacgtaggctgtaaaaagggcatagcatttcttagaagataccacatggaaaataaaaaaaaaccttcttgctcagaaacaatttaaatttgtagacataaagttacaaagaaatttgttatatcccatacattttttttacatgaaagacatgttgaaccttatatccttttcaagctcgacatatctaaagcgttcaactcagtttcttgggcgtctttacttgaggtcctgcagcacatggggtttggacgaaagtggtataacctgctctgccttcttctctccacctcctccacaaaacttctggttaatggtgtgcctggagaattcattctgcatcatcgggggctgaggcaagggggtcctttatccccagtgttgttcttgctagtcatggaggcattgaatgccttaatcactaaagctgtccaagcatatttcctacagccgctggctgttcagcaggctaagcaccggatttctttatatgtggatgatgccatcttgttcctcaggccaaatcgagatgatctgcttctcatatctcagctgttgaaggcttttggttatgcgtcaggcctccagaccaatctcgctaaaagctcagtgtgccccattaattgcacaattgaagacttgaaggtcatttctgagctcttggattgtgaaatcaggaatttaccttgcacctacctggggatacctcttactattcggaaaccaaccaagagtgcctgctgcctttgattgataaaatagcagcttgcctcccaaaatggaaggcttctctcatgagccgagccggttagcttgtgatggtccgtgctgttttttctgccatccctatccatgatatgctagctctggatctccccaaatgggtgatcaaagctattgataagctgtgacggggcttcttgtggggaggtcatcaaaatgctaatggaggcaattgccctgtgtcttgggagaaggttcaaatgccgttgcagtgtgatggcctaggggttctcaaccttgaaaaaatgggatgggccttacacatccgatggctttggctacaaaaaaaaaacagattcttcacggccttgggaagggctgcccattcaggttccctataaggcctgagctctctttcatgtggcggtgcaaacaaaggtcggaaatggtgttgataccaaattctggactgaccggtggctgcacggtagctctgtgggagaactggaccctaatctttttcagttaattcctaagagagcaagaagacaacgcgctgtttctcaagccctatctaacaggcgttgggtcactgacatccagggagccctcacagtccaggtgattgtcgaatacctgaagctttggatgttggtggaaggttttaccttgcaaccagcccttcctgatcatcacttttggaagttcacaagttcaggacagtattctagtaaatctgcttataacaccttttttcttgggaactgttacgattgaaccttgcaaaaatacttggaaaacttgggcacctctccggtgcaaattcttcatatggctggcaatcaagaacagagtttggacgacggatcgcttgctgaaacatgggttgccacatcctagtgtctgcctcctttgtgaccaggaagatgagtcagctcaacacattatagtgtcttgcgtcttctcccgggagacttggaccaaaatcctctgttttgttggactgcaggccgctgctccacaaattgagaaattttgctcgctggtggggatgtgcagtcaacaaagtgccaaagtagaagagaaaaggatttctctaatcattcttgttgcttggacaatttggagacataggaatgtgtgcgttttgagggtcttagtcctagtatttccttggtgtgtcaggaagtagcagaggagagtgagctctagtgtatggccacaaacacggccctccatgagctgctcagcaggaagccaaggctggaagcctgagcagccctgtgtggtcgttcttttaggtttagtgcgtggcgcgtatgttaccttttggtgatgtgttgcggggagggggggggcttctttccacccctcgggtgttgtatctttttcttcttaaatgaaatgacacgcaactctcctgtgtaattcgagaaaaaaaagatatgttgcagtgtgttaaccatagatgatttttttggggtagctgtacgtaaagctgcaatttcaaggaatacagacgcaactactgaatttaaacttgcaccttaagccacaatcgtctcatataacctaagtgattcacacacagctgtcagatattcaagtcgtatttatatctgtaatacttgcaaaatccaaaataatattgcacatatgtactctggaaaacagatggacaacagattgtcaaatagagctgaccttgtgacacattccagtgcaaatagcaactaaatcagcacaatttcattgttagcatcacagaagagttatgcaaagggtgcaacagtaaacatttgactctgtaggaaaaaataatgtagactgcatagtaaagcagatacttcccaccttttcttttcttcttgtagcctttgcgtatcaatagcattcttattctcttccaacccaaggtgggaactttgagatgcagtaactggagagctaatgacactcggactgctctttcttctgtaacgcttccgtgatggaggtggactattgcgcctcctaggagatggagaacagctctcacgccttctcggggatgggaaagggctcctccttctgcaagacaaagatgagcactgtaaggataaaattaggatcatcacaacaatagacaaggaattaccattatctcttgaagccctaaaacatgggcaaaagcagttaccttagacactgttacaggggtagagcattccacagcaatacagcacagagtaaaatctttgtagattccatgcgttttacgaaaacaactcttgttagtctgtataggcaggtaatgcaaaacatggcataactatatctaagcttcatctgctgatatattccatgctgcatcgaagcatttttattttaattctgtaatgcaaaagcatccaaatcattttccccttggaaatcagaaatcatggtgttatgaaatttgacgttcataatcatatttaattcaagtatgatatggcacaatatactaccacactatccacctctaacagtcacaaaccaagctatagtacaaaattcgaatgaaggcgatcagcatcgcctcaaattttttacagtacaaaccccaaaaaaataaaacgaagactcgccagatttctgtggcgtgtgtcgggagatgtggtcacctatacgaggggcgatagggggacctgctacggctagggcttcggtccctacggcccctccggccgcggtaccgctcgggtgatggcgaccgccgacgccggcgcggcggagacagcgaccgcgacaggtcgcgttgcatcgtgcgcgacgcgatctagagcctcagcggagccggatctggacgaaaccagacgatcggagccttcggagaggggcggagtctggcttgctggctggaaagcgggaggacgcaggccaggtcaggtagagtcgcccgccgccgcacgcgggggccgatgaggtgggggatgctcgcagcccgcggaatctatctgtgggaagttgtaattaacctccaaggctacgcccaggtatacaaggtgggcgctggggagaagcaaaagcaatcgggccaccaatcccacagcgtgatatgaccgcccggtccagctcagcccaggcccatgtgagtcgtccgacccggatgagtccagatccagacccaacgtgaccgcgagtccctcaagatcacacagtaccggcaggcggcagcaattggagtgtttacgccgagacttgaaaacggcatcagtagcaaacggaggcgaccacgagcgacggggccagccgcggtccccaacgtcagaggatctcgttccagctgcggcagggcggccaacaccggcacctcatgggcgccgacgacgaagccgccgccgccatggaggcgcaagagagggaggcggagatcgagaaggccatgcgcgcccgcgtcgcagacttcaagaagcaggccgactccttgactcttgaaggcgttaggagagcactggaaaaggacctggatttgaagatatattcacttgatgcacataaaaagtttataaagcaatgtgtagacaaagtttttgctgaatctgctgatgaaaatgcaaatgatgatgcattagaggattctgatgctaaagatgatcatttatcaaaagaagggacagatgttgctaaaccaatgcctgtttcaaataaaatgtcctccaatgctgatgtcgtaacatccagcaagacaggaaaggatcctgaagaagaaaagaatcaaacttccagcagtgatattagtgaagacatgataaaagaagccattgaaaaaagggcatcttattttagaaagaactctgagagttcggcgtactttggaagaagatctcaagcttcagaagaaagctttagatgcctataagaattttattactacaggattagacaagattttgcaagaacctgcaaatgggacaaagaaaaaaagtaaaaatggatcttccaaggatactgacaaaacaagtaaaggctctaaaagagtccatgaagaatcagatagctctgaattaaatgatagaaagagtgatatggataatagcgacgtggattcaaggccaagaaagaaaagggcagaaaaggctaaagtcaccaaaaaacagaaaatagttacaaatgagaggaaactgtcaactccaaaggctaaaaaggttgcaaaacaagatttgggtagcagtactgaagaacagggtggcaattcagcagaagaggataattctcattcatccgctgaggaagataataagagaaaacggcaacagactccagcttatgggaaacaagcagagcatctgaaatcgataatcaagtcttgtggaatgactattccacctactgtgtatcggagagtcaagcaagctgctgagaacaagcgtgaggcctgtttgataaaggagttacaggatatacttgaaaaggaaggattgtcaaaaaatccttctgaaaaagaaattaaagcagtgaagaagagaaaagaaagagcaaaggaacttgagggcatagacatgagtaatattattactagttcgcgtcggagaagtacatcaagtttcatacccctgccaccaccgccgcaaatagaagtggatagtgatgatgatgaagacgatgacgatgatgcagaaggcaatgatgcagaaggcgatgatgatgatgcagaaggcgatgatgaagacgatgcagaaggcgatgatgatgatgcggaaggcgatgatgcagaagacgatgatgaagttgatgaggagaatgtcaaaggtcgagatgaaggtgataatgatactgccgaagctgccaacggttctgctgatgatgctgaaaaggagaacaattgattccggccccagaataggttcagcttcatgttggcttcggcaagttggcctcgttcgtggatgtctggatgtagccagttgctcaggagttctcttctgacgtttatttatgtgtgcgtgatgggaacatttgttggcttcagctttgggtgaaacatgaggaacatattgtccttgtagtgatgtgcaatgtcacattcgtcctcttagcatcttgttcgcgattgtgtagattacaacaacagtcgcaaaacatataagttagcagtaatcaagtactgattggtttattagtttctgatatagtataaacctcgtaggtgaaagattggaattactatgcgcttcatgcttttgccttgttttttcttaggtagtgtttattttccgtggcatggtggcatctggggttttttgcagttctgattggcgttgtg

SEQ ID NO: 37286 - DNA, 5403 bp, Zea Mays
ctccgcctctccacgctactggatacttccgatgcctgttccgctgtttctcttctcccgtgtcttctcccgtttacctgccgtgtgcgactactaggaggtcgccgccgccgtacgctcagcttctctgcgccggcgacaagcacccaccacaccaggattgtgtttattggatttgagtgtctgattgtgtcagtcaaatttgagttcatcacatccagcccccgcaaccccgtccgtgggcttccccatgcgctgtgtggcactacggtagccgaccctcagcagatcttgcgcggctgtcctcaccagtcgccaacggcctcctcgcccagtcgaccttctcagacagcacccctcgacagcacccaagcaaccgaccgaagtgagcagtgactcagttaggtaagttcagagataatgtttcattttttctacgaattttatgaatacatgctcctcttatatgaactgcaactatctctaccctagaacagacatcaacatgtacatgactattaaatttcctgttacattgttctacctatattgtaacaaatgtcctttcactgttgtcattatgtcaacttagttaattatatgggcactaatatattttttatttataaatacaccaacaatttacgaggagctgcgcccattcgttttcaaaattctaattgtaatgtccacttcttcagtaggtaagttcagaaataatgtttcattttttctacgaattttatgaatacatgctcctcttatatgaactgccactatctctaccctagaacagacatcaacatgtacatgactattaaatttcctattacattgttctacctatattgtagcatatgtcctttcactgttgatttgttcgcttcacacaaaaaatagtgaacgtcgattccagcccaaactttcgtttggtccacccagtcttgctgtagacactgtagttaaaatgctctaccaactttattcaggtctcttattcctagacctgcaatctcctttgccatggtcgatttcaataatttaaaacatgttgataatgagtgccatatatattcttagcgactcttgatcaagttcatatatgaatgaatcacagattcacagtgtacggaagggagccacttaatacttagtaaaacaccatcaggtaaccactttgtagttcaagtgagctgaatcgcccaaattcaagatagtgtatctctacatgctagtatgatttctttaaatatgcattgtgtgagtatatgctagatcacaatcttttactttcacaataggttcttgctgtcagtgaccacaatttggtttagttacaatgactatagcatgacctttacgatcatgccctcaagcatccagttttttttaccatatggatatgtgtggatacaatagcagttagttttattgtctatcccaattaagaatggccacaatgtagcatttgattgacatacacctctaatatatcgtacataagcaagaatatgtgaatacagtagcggtttgtttcattacctgaatttatttattaagaatggccataaaaaagggtgtttcgttacctatatatgaacacatactacactatatacaaattcaaaccaagtgtaactctggcatattgtttctaaaaacactaaccgttagttcatgtgatgttcatcctctttgagatttcatcagactgtgtttctaacaatggacaaaaaaggaataactaatgagttcaaacaatactattatgtccttcactaggaaactggtcagtacatagtttgcctctttatatataatataaatttaacaatgcaatttatagcttctttctccgatatatacaagctaaaaaaataagtgttcaactgtgtaggaacagtgagatcaatgattcaatgcctgcacctagatatgacatgtggtgattctgttgactgtactttaaactcaagttgtgaacaactaaactcaaactatgagtaattcattgtaacatataactgttgtcttttttacaatgttcactattgtcttgtgcatgtatcgggtttgttatgctcctagaaccttcgtagcgacagccgccgaacctcgtggcgcaaaaacaattttttttttgaaaaacaggtattatgctggtaaaggcttatgtggctgtagacatgttcaactaatatcttttttccgcatatttgtcaatgatccaatttgttattttcaaactttatttaccatgaagattactaattgtatattgttataattcaagtttggttatatcccttcatcatataaaaagtatcctacaatcaaaaattacgcgcgctgggcgcgcgccaaccactagtatcatttaagagaaagcaagttcgatactacaaggactcacaagccacacttttgagggccatttcttctttactagattgaatacttgcactggccagtttaatttaccataaaattcctctatatatttcacttgtatgcatgctgtcgcgatcattctcctttgtctagtgctgtgattttacaaggaagctagacagtagtcgtattaccgtttgcattctcggtttgaggcaaccgaattccctttccaacttaatttccaaagctgcatccaaacctcctttgcaaataggcacaaaaatgcaccgtcgttaatcgctattaatcacacaaaacatacgttggaatttggattgtattgctactttttgtatcttcaagcttgtctgctgtgatatccttgcctgaaccaagagccaagggataatggttttttgaaaagaaaaaaaaattaaatgtgaaagagggcaaaagaaaatttcggccacgtgaaccacatcttccttcgccacatccggagctcatgtttattaactgccacgagcccacaaacgtggcgcgccctgcgccgtacgatgccacagtagcctatattttacactttcccaaaccaaaaactatcctgtctgtcttaatcccgttccaatcgctgttacctgataattaccgcagcgatcgaaacgaaccagcctcaaacccatttccttcccgtgcttccttgttcctcctcatcccaaaattcgcaagcgccgattccaatcaggaaaccggaaacctttcttcctccgcaattcaatccggcgggccccgaagccggcgccaatggcggccgccgccatctctcacctccgccggggcgcgcagcaccacgcagtgctatgcatctcgctgtcgcgccgccgcttctcctcctccgccgtggccgcggcctccccgctcgccgcggccgcgcgccgcctcctctccacgacggcagactccgccaccgcgtccacgtcgggggagcactacaagccgccgcccttcgaccccttccgcgccgccaccctatcgccctctgctccgccgctagagtcggcccggctcgaggatgagcccccgagcagtccgccgccgcaggatgaggcggccgcgtccgtggcggcgcacgagcaggcgacgctggcctgccaggagctggaattggagggcctcaaggcgggggtggaggcggtgaagagcagggaggagtcgccggaggagaaggaggcgtggtggctgctcagccgagcggtcgtcaactactgcggtagcgccgtcgggacggtggccgcgaacgatccgtccaccagccagatgctcaattatgaccaggtgttcattagggacttcgtgccatcggccatcgcgttcctcctcaagggtgagagcgatattgtgaagaacttcctgctccacacgttgcagctccagagttgggagaagactgtggattgctatagtcctggtcaagggttgatgcctgctagtttcaaagttagatctgtacctttagatggcaatagcgaagcatttgaggaggttcttgacccagattttggagagtcagctattggacgtgtagcacctgttgactctggtctttggtggataattctgttaagggcatatggaaaaattactggagactatgctctacaagaaagggttgatgtgcagacaggcatcaggctaatactgaatttgtgcttgtctgatggatttgacatgtttcctacattgcttgtaactgatggatcatgtatgattgatcggcggatgggaatccatggtcatcctctggagatccaggctctgttctattctgctttacgctgtgcccgagaaatgattggggtaaccgatggatccaagaacttgatccgtgctattaacaacaggctcagtgctctgtcatttcacatcagggagtattattgggttgatatgaagaagataaatgagatttatcgctataagactgaggagtattcccatgatgctattaacaaattcaacatctacccagagcaaattccatcttggcttgcagactggattcctgtgaaaggcggttaccttataggcaatctgcagccagctcacatggatttcaggtttttctccctagggaatctgtgggcgattgtctcatctcttgctactcaaaggcaagcagagggtattctgaaccttattgaagccaaatgggatgacatagtagccaacatgcctcttaaaatatgttaccctgcactagagtatgaggaatggcgtatcatcactggcagtgatcccaaaaacacgccctggtcgtatcataatggtggatcttggcctacattgttatggcagttcaccttggcttgtatcaagatgggtaggcgtgacttggcacggagggcagttgaggtggcagaaaagaggctctcagatgacaagtggccagagtattatgacaccaggacaggaaggttcattgggaagcaatcacggctatatcaaacttggagcattgctggatatcttagctctaagatgttattggactgtccggagatggcatccatactagtatgcgatgaagacttcgagctgctggaaggttgtgcttgcagcttgaataagaatgctcgcaccaaatgctcacgtcgtgcggccaagtcgcaggttcttgtgtagttccatgcctgttcttgacccaaaagctgcaacgctccttcaacttgttgtaattgttcgtcacagaagctggcactagttactagttacttaagcagaatgatcacaaaccacctatgccgatttttttggcgagttcgtggttgatccatttatacaggagtatatgttgttgtctgtacattttatctaatggattttatgtatcctgctggtcaactcaagttgattggtagttttttttatgtaagcagacagcatgtaaatatcaccgctcgttacaagtgtactaaaagaaaagttagagagacataatgacggaatgag

SEQ ID NO: 37287 - DNA, 1644 bp, Zea Mays
aacaaatgttgcttgcaaatgttcgtgacttcgtgtggtccctagtgagggctggagcgaaaccgcccgctgtctcgcgtccgtcagacagcacgcacagacgcaggcgggcgacgcacggcagtgttgccaatggactcgcgctgcccccatctgctactgctcctccctctcctcctcttggccgccctcctgcccccgccgtcgtcgggggtgccggaggtcatctggctgccgacgagcgggggagcggggcccttgtcctgcgcgccgccggaccccgccgtgtacgaccgccccgtcatcggcatcgtctcgcacccaggggacggtgcgggcggcaggatcagcaacaccaccgcgacctcctacatcggcgcctcctacgtcaagttcgtcgaggccgccggctcgcgcgtcatcccactcgtctacaacgagcccgaagaccgcctcctcgagaaattgagtttgttgaatggagtgctgttcactggtgggtcagagaaggaaggtgtatattttgacacgataaaaagagtatttcagtatgttttggacaagaatgatgcaggtgaaccatttcctttgtttgcccaatgtcttggctttgagcttgtaagcatgattgtcagcaaggacaataatatcttggaggcatttgacgcccaggatcaagcatcaactcttcagtttcccagctatgctttggagggttcagtttttcaaaggcaggggactacaagaccacatgcactccagcagagtgcggttaatttaaagaatgactgggaataaatttcttatgggaagatgtggtttgacactgacctcatcaagaaagtcagcaccaactgtcttgtcatgcaaaatcacagatatggtatatcaccaaggcgatatcgagagaacgatgcactatcaagtttcttcaaaatcttgactacatcacctgatgaaaacggcaaggtctatgtctcaactgtacaagccaataattatccaatcacttgcacgcaatggcatcctgagaaagccatttttgagtggaggaaaccaatgatcccacacagcgaagatgcagtacaggttactcaacattttgccaatcattttatcagccaagcacgcaagtctccaaacaggcctcctgccgacaaagtgctggataacttaatttacaactacagtccgacatttaccgggaaaaaatcgaaatcgtttgaggaggtctacatcttctcctgagactggattgaacgcctgagtgtcttcaggaatctgtagttctgcactacattgctattgtagtgtaaccgtgcattagtattacccgtggtaccagaagttgtatttgtatagattcgttggactgcctgtattgcagtaacctttccaccgtatgggtggctctatagaatgcctataagcagcgcaataataatgataatgtaagactgaaaaaaaatacttgtatggagattttctgaatttaaaagtttctccaaatcaggtgaaggtcgaatgttcctggacctgattcatgaaatccatcgaatccaatttgtttggagtgacgtctttgctatggcgctatggcttggctcaagcatcttgcgtcgagaacgtcaccgtgttacctag

SEQ ID NO: 37288 - DNA, 2673 bp, Zea Mays
aaacaacaggcggttggattgggacatcaacacgccgacaccatacaacttaactcgccggttggactgggacatcaacacggcaccacactcaccgccgacacagagtacccaaacaaacacaggcagcggcaaccccacacgagagcatataaaactgctaaaggtcatcgttgtcaagcaaggatgcagagcatccagcaactccgacttcccaaagcagctgacagacgaaccaaacgaaaagctttgtgtctcaactcactaactatttcatatttcagcccactaactatcagtgtctcaactctcacgtctaattgtgttcagtcatgaggatgctagcaataagatatctgcataggactgttgctgcaaaagccgatacgattatggcgctgaagctatgcaggaggctatcaggatttattgttggtgcgaattctagatgttgtaggctaagtgatgttgataagtttgctttactgttccaaaactgcacagatgtgaggtctctgaagaagctccatgctcgtgttctgacacttggacttggcagggatgttattcttggctctgaaattttgatttgttatgctagtttaggtgtcctgtgcaagacaagactttgtttccaaggcttcttaaataatgatcttgctgagtggaattcagtcatggttgacatttttagggctggttatcctgaggaagctattcttttgtacagaggattgaagttgcgtcagattgacttagatgagaaaactgttacttttggcttgaagagctgcattgaacttcggaatttgttattgggcaaaggaatgcatgcagactcagtaaagcttggcctcagtagggataaatttgttggttcttctcttgttgggttatactctaagcttgccagaatggatgattcacagaaggcatttgaagagattctggacaaggacatcgtttcttacacctcgatgatcactggttattctgaaaatatggattctacttcatggaatgcatttaaaattgttagtgacatgtcgtggagcaacttggaagtaaatcgtgtgactctggttagcttactgcaagttgcgggtaatctgggagcaattagagaagggaaatcagtacattgctattcaataaggagagatattggtatctcagatgaagttctagagaccagccttgttcacatgtacatgcaatgtggagcttgccaattagcatctgctgtcttgaaaaattcggcgcaatctgtggcttcctggaatgcaatgcttgctggtcttgttcgaaccggacagagtggaaatgcaatacactatctttatatcatgctatatgagcataaggtagttccagattctgtaacctatgcaaatgtgatatctgcttgtgctgagctatgcaattcaggctatgctgccagtgttcatgcctacataattagaaggtctattcctctagatgtagttttggccacagctcttatcaaagtatacttgaaatgcactagaattacgatatccaagcgtctctttaatcaattggtggttaaagatacagtctcctataacgccatgatctatggttatctccaaaatggcatggtcaatgaagctattgcgttgctcaaagaaatggtgacagaatgtgttgcaccaaattttgtgaccattcttagtctgcttgcagctatcgctgatcacaaagattttgctagagggaggtggattcacgggttttcaattagacatggtttttgttccaatgtcgacattgcaaatcaaatcatacgtatgtattctggttgtggaaagattgcatcagcaaggattgtatttgcttcatttgaaaacaaaaatttaatttcatggactaccatgatgatgggatgcttattctgtggacatggaggtcaaacagttgaattatttcaattattaatgcaacaacacgacaataaacctgattctatcgctgttatgactgcaattcaggctgtttctgagtttggacatttgaaaggtgtaaagcaagttcattgctttgtctaccgtgccttgttggagaaagatacgaagaccatgaattctttgataactgcatatgccaaatgtggcaggttggatttatcagtaagtttgttcttgagtttggaacacagagatctagattcatggaattctatgatcagcgcttatgggatgcatggattttatactaaggtacttgaaatgtttaagctgatggaagaaggaaatattaatcctgatgggttaacattttcttcagtgctttctgcatgcagtcatgctggtctaattaaggagggtctgcatatttttcagtcaatgacctcaatgtattcagttcgtccacaggaagagcattatggttgctttgttgatttaatgagtcgagcgggacatcttgaagaaggatacaagttcataaagttatctaccttaaatgacaaatctagtgtactttgtgctttactttctgcatgcagaacttatggaaatacaatgcttgggcaggttattagcaatgagctccttgaggttggacaacagaatccaggaaaatgcaaagttcacagtgcctttaccaacacgcatacacactatcggcttcttatgaagaaaaaggagataa

SEQ ID NO: 37289 - DNA, 1750 bp, Zea Mays
atatgttcgaaggtcttcggtaaatcttcagctgagggggtgaatttctcactgctggctccaactgagtggaaaatttttcttagtcgttgaatgcatttgttgctaaattccaaacatttttcttgaaggcccgccaatagttttttcaaatctgaattttgttgagcttcggcttcaagttttgcattaagttcttgcttttcttgttcaaactgctcagattggcagagaagcttcgtgttcagttctgttatttttgcttcggcttccgccaataaaccttcagttgcctggagctcaaagttctttttctcaatagcagctgattgctcctttattttgctttctaaattttcaattataacttcgtgcttcttgtcttcaaaatcttgctgcattttcaaagctttgctcaacagcatactctgcacgaaaacaaccttcgttagacatgttttcattattaaaaacaataaaagttaagggaaaagtagttcaccttgaaattggaataagataaactaccaacgatatgttgtcgtcggtagcggctaatgtccgtttctagcttcggaaaaccgatactctttgacagagtactgataactttggctccagtttggtttcggatacaatctaatttttcatcatcaatacctccgaagaggagtgttcctggtttgtacccgcaagatttggcatactctttaagctcttctatttcgggttttgacaatttttctccaactaaattttgaaacatgaaggcctcgtcctctgaagcttcgtcaacaatttccttttctttccccggcactgcggccatagtctcttcggcggcagtggcagcttcttctgtggccatgtctagcagtattttgtcaatgtgttcgattgtgctttccaggttcaaatcttcaattgaggcagcttcggcagccgcgacctccgaaggtgtgatttcaatatttgttctttcctcagccgctgatgtcttctgagctgaagctcttggtggtgtcttgtcaatgacctcggtcacagtgatgattctttgtctctttgctttagtcgttttcttcgttttttcaggctccttttccttctgaaaaaactttgtcagttgaggccccaatggacttagcttcgcaggcagggattcagtcattaccttcaaaatttcctccacgtcaagggcagagggtgatgcgggggtttcttcttcgtcggatattttttgcttcggagaagacgctttcctcttcttcggaattttcttctttgattctttctcatcttcatttaaggcttcagttatccttttccttttctggcccccgacacctttattcagattttcatagtcagggtattcaaaacccaaggcgtccagcactcggttcagtcttcgcttcggacgggtgccgaaggccgcagtcatcaattgatcttcttttttggagtagttgccaagtatttcattacacattacttcaattgtatccagccactcttggcaaggtgttttaaagtatttcttaaacttgaaatagtaaggtaaacgcacaagttcaccttctttcttctccccctttagcttcggcatttcccattcttttaaactaggaaaaaccttgaaagccaaaaactcctgaaccaggtctcttgtactgatatgctctgcaataattctgaattcattcaacgcttgttgtgttggaccttctggtgtcatgttgcaacgagg

SEQ ID NO: 37290 - DNA, 703 bp, Zea Mays
caccgctgccgcgtgcgcgccccaagccggccgagccgcccaggctgcgctcgacgcccacaccgaaggccgtgccgctaggagtccctgccccgcgacgacccaacgcgcccgacgctaggacgcgacaccgaagacaccggcgccctgcacgccgtgtccgagccagccgctccgaccccgcgcgtccgtttcttcttcacaatttattggaacatcgctgcatccgtttccctcccctcattcctcctctccccattatgagcagaaaacagcagcaccattgatggccatgaagaacagccgaccctttctctcccctccctctctctataaaagggcagcgagtctctccgttctccctacccaagctcgcccccatctctctcactctcctcgccgttagagccaccgccgccgtcgccggacttcgtcatcgccggagctgtggagttcaccggagctacgccatccgccgtccgaagtcgagcccctgctcttctcttctccacccggccgaacccccgtcgaactctccccgtcacacgtgcgaacccaaggttgaagactcaaattaatttgtgtattttcaaaatacttttgattcgattcatgaattgtatatttagtttgttgtaatatgaatacgtgtgatccgaaattcatgtgtatgtgcgttatggaattttggtagagatatgtg

SEQ ID NO: 37291 - DNA, 1961 bp, Zea Mays
cagcccccgccccacacccagcccccgccacctgagtacctgacacacagcgaaacgccgaaaccgcgtcaagttccccttctgcgatcccccaatcgccgtaaccctagactcgccaccgccggcgcgatgctccgctcgccgggcaattcgccccgccgcctctcacgtcgcccacacccgcgcactccacccctcgcccggcctccccgccccctccaccgcccctcctcgaagcgccgccggtcggaagtgctcgacgaggacacctacgtcgccgccatcgagcgcatcatcgagcgcgactacttccccgacctgccccgcctccgggaccgcctcgactggctgcaggccgtgcggtcccacgacccgctcatcctacgcgacgcgcagctcaagatcctagaccgccgccgccgcgcccagcgccacgcggcggggcccgtccccacgccgacgccggccacctccaccgcgctccgctccccgtcctttctcaccacccccgccggatccgtcgccggcggcgtgggaggtcccgacgccgaccacgacgacgacgtcgcggccgcggtctccctcgacggcttcttccgccgcttcaccagcgaggacaacgactccttctcgcgcatcctagacaaggtgaaccagcgccgccgcgagcgctacgcgcacctgctggagccgccgccgcctaccgaggcggggagcaaagcgtcagagggcgccaagcgcgacaggatcacggacgggtacggtacatcggggcagccaccgagtacgctcgagggcgccaagttcacggcaaagaaccagctcatgtactacccggctgaccagggggaagcgcccctcacggaggaggagcgcgcagagcggctcagggggatgaccaaggagataaacaagccgaacaccaggctacatggcagagccacggctgatgacgcgaggcccaaggaggagggggctgccatactttacgcgctagttgcaggctctactccgggagggatggcctaccacgaccctgacaagttgaagaagtacgatctggaggacctgaggaagaccccgaaccctttctacctcgagtcggacaagaaggccggcaacgggtacagttttgtgaggacgccgtcgccggcacccggcgtggacgagtcgccgttcatgacgtggggtgagatcgatggaacgccgctgaggctggactcggatgagacgccgggcggtagcgagagagcgcatttcaagatgccgccgcctcctgctcgcgatgtcaaggcgcacctgctttcgagggacgccgctcggaaaataaaggagcggtctaataccttccataggccgcccctaccctcccctgcgaggggtgtcagcgcaagccctagaaccctctcgcgggccgcacaaaaattcgtgaggaacgccatcaccaagtcggcaaagtcctccagcgccattgacgaatctctccgtgcaagctacagaggctcgaccccatctgcgagcactcccaagtcaaggttttcaaaagaccctggcctcgcatcgcgttctccatccacaagggtttgcatacattcatctcctaccttaatagtaggtgacagtctgaagatgccaaaactgaaacaaaacctacaaacgatgagatcacaccttctgaagaaaatacagacaaaccagctcacagcagtaacgaagcaccctcgaaggaggtgatccatctcgccatcgttcaaaagatcctcaaatttcggccattcagtgcgggagtatccgcagcatggagcatatcatcacaaggacaaggagctccagataaaaaaaagccgttttcttgttcaatacctccagtgtacatttaggtagctcattgacccgtccaaacgaggtggcttgtatacttgctgagttcatctatatatatctgagctaacatatcgatc

SEQ ID NO: 37292 - DNA, 2003 bp, Zea Mays
cgaagaggaagcgagctgggcaagcaatcgacgcgagaagatcagaaggtgggggcaccagaaccgcactttatatgatttcttgtggtggtggagattttgacgactttcttgatgcgtttttttttggccttcgctcttttggtacggtaattagcaaatttattaggagatggttaaatgctattatatactagaagtagaaatgatttgtcttatgaatggtttgctgattgggagcttggaggctgtttagagttgtactggcagtgactaacaaccttcttctgcttgtgttgcttaattttgaagaaatggttccttgtggggttttttttccgaaaagatatgggcttagaggcggcaccgcagcgacgtgaagtgggcggccgtgacttacaaacggccacaagaaggttcctgaacgtgttgccgctcagacgctcagctgagcgtgacgccgtcattttccccctttttttccttcttcctattcttgttttttatgtgaaccataatttgttgcggtagaaataggcacagatataacatgactggattaatatgctttaataataaggaaatttgatttggagatggggccggaaatgatagagcaggatggatggtaggaaaaggaaggggaaattcagaaattctctcaggcgtatggctatggagtgcctgtgctctggtgagcagttgaaggcgtcagatgagaccatgcggtcatctgattctacgatcacaaaggatttctcggccagtgggtactcttcttggaatggagagattgagcagtaccttgataatggcaacatagaggaagccgagttgtcgctccgggagggcatttgcctaaattatgaggacccaataaggcaagaaaacggcaaagagcacaatagttctcatatgcctaattattcccttgattcatgattataactttgcctcctgatttaatgaccctttcctatcatttgagatatacaggtcaccctaaggcataaaagaagaaaggccatttcttgtggagatttatgcagatgacataaatccaactacaactataaaagggaagcactacatcggctctggtgtgcttaactatatctttgattcgcgaatatagttttgttattaaattagtgaaaattcaagctatatccttttgtgctctctgacattatgacatttgtttagcaagtactttagtgaaaagatttcaccatatgcatgtccatgtttatgacaaatcatagttatccgttacattacatcgatgtaatcttcacacaaagtctcaacaatatttggttgctcacttacaccccaccctagattaacatgttctgaattttctttgttcactgctgcaattgacacatgctaaatggcaatttctttataatgatccaattgagtttgtaattgcacatgtttttgccaagtttcatcaagtactgctccaacagaacaagcaatcatggaatattgagctaaggcactggagtctcaagaaaaggtctaggaatcctaagaatggatggataacgatgcttaaatatggatgacatcatttatgtcttgataaccatctacatgccggtgataatgttttttgacattcattcatggggctcacctttctaatgtgtaagaaagaaaactacgttgatcttaatctgagttgtgtgttgatggttgatgtagtaaagaaggggcacttagacattgttgttcatggatttatgtactgccaacaaaccttctcttctgattcttataggcggtgcctggctgtaatggcttgcatgtattttatgcattgactacatgataagaaccgtgcacgttgttgatggcccaattattacctctgaatcaaggtaatgtttacctttatcgtgttgtcttttgttctatagaatcattgtggatgactgtttgtaaaattgctatggcaaatatttactgttatcatcgtatataacatcaaa

SEQ ID NO: 37293 - DNA, 4288 bp, Zea Mays
atggaggccctcggcgccccgcccccgccgcgtttcactgtggccgacctcctccggctccgccgtcccacaaccggcgcctcctccctcctttgcctctccgtccccacctccacctccacatcccgaccccgtaaaaagcacaagctctccgccccagtcccaacctggagcaccggcacggtcccgttcgcgccgatgtcccaccccgtgctcctttccggcacgctctccctcccctccgcctcctccccgatctcctgccgcagcaactgcttttccttctccgacccatgccccaccgctgcctccccggccaccgcggccgcctccgtctgctgctgcatcctcgacttcgatcccgccgctctgggccgcgtgatccgtgtccttgcgtggaactacctaccctcactgcgcctccacgccgagccgggcgtactcgaagtggtccgctggcacctcgaggagtccgctcctcccgtgaaatatagcttcctggcgacggtccccttccgtttcccggatcaagagcccgacttggctacccgcggctgcgcatttggtttggtcaggtccgtcagcattgtgttcagtatgccgcttgccaaggctgatgcaggaagcagaaattcagttgggtttctggcggagattttgtgttgtgggtgtcgccgctgctgcagggcgacaccgccggaagatgcccagactcacatgtttgagacgatgaaatttgtctactttgtggatgcgtctagcatgtggcggccggttctagtgtggcttgtggggaggctggtgtacatttctgggttaagtaaaaaaatggtttctgttggggacaaagcctcacacacaattttggtgtcatctgcgaagacaaccatggcatggtgcccatcctacaggggcagtctgccattggataacttacctgaaaagtgcggtggagagtatgctggggttatcactggaatttattcacagggtctggtggttgagctggatgacactgcatggctgctgattgatgatcagaagcttctgccaccacattcccttcgagttggtgccattgtctctgtaaagaactttcgagcagtgtgtctgaactttgcttggacacgggttgttctgcttgcaacttgcagtaaaacctgcattactgtaaactgtttttccttggtggattccaaaattcatttgaagacagataacaagggcctcttaggaacgtttgttgactcattggagatgcctgctcgattttggatgttacttctgatatcatgctttaaacagaagtttactaaattattttctgataaagagattttgggttcacaaaataagcaagggttggttcatgcttatgctactaaaattctcacgtcaaagtgccaacctcaggaaagtttaataataaaattctgcagacataactgtagtagcttaagccttggatctaaactggaggcttgcaaattggtcgtaccattctctaatttagtctgcaagtgtgaatcattgtggatattatcgatgcttaaattatggaacggttctgaaaaagtgggcaagagccagggtttcttatgcgatggggtttcctataccagcagtaccaaaagaataatttcgagtgaagatctggattttatattagtgggaagcatcaagacttctccgctgtcagggagactgcagttggttgattccactggatgtatagatgtttttatacctgatctcccgcctaatgagagcttgcatgacatatatgagattgtcaattacaaactagctcttgaaggcccgatggcttacatagatcattatgatgttgctgatgccctatcctgtaaagctgtgtttcagaagcttccttacaaaaaaagattgcatcacctcaatatttatgttatagttcaatggaggcaattaattcatattggcccttcctcgtgtattccttcttatattaattataggatcaggttgtttcacttgctgaagttgtcccacatatttcctgtgaatagcaacattcaatgttcaaacatgccagggtctagcctgtatgctgaagctgtaatacttccatatgttttgaagtttattgggcaaggcgaatttcttgagcatgctgagggctttataatgtcacactctactttactaggtaattctgaagcctctgtggcaaaatcatgcaatattccatgttcgctaagctttggcagcaccaacctttgtggtactctggtgtctacctatgcctctggatcagaaggtactgttctaaatgaacctattgtactaagaaaagaatactcaaggatcttgttggagttcgaggcaggaatttttaagaaatatcagttaccgcgaatcaatggttcctatattctccaatgtcccagtcgaagttttacttgcaccatgggaaactgtggatgtttgcaaggtggtaaagtctcgattgatgctcaagatagactttggagcttcgccattaccattggtggtaatataaacatcaaggggtcaattggggatcaatctattggagttacttcaatgaagatggatgagatattttccagaaatatggtcgatgatgagctaagattagttcagccttggaatgacttctaccgtaattcttattttcatttggatttttcttatgaggcaataagcaaaaagatggaagattataacaccgtatgtcatgtattgaatgggctgtgtgtttcctccagtgaagttttaagtgtgtcatcatgtgttgatattatgatgcctaaagatgcttctgtgtccgctgacttcaaaactaaagaagtggttcatggagatttattaatatcagtacagggaaaagtagaaaatatacattcacttgtctgtaagtgggaaagatgcattcctggtaatgagaagtacagtctatgtatccatattgctgataataatcatgcggtatatatccgtggatactcaaacaaacattttactgttggcattggaccaggggcaacagtgacattccaccgcatccgtttcaaacagcatggattattcttaacctctgagacatacattgagcttcaccgtgcttgttctttcatcagaagtattttacagacagtagacccatgcaatttcactgcagggtagcaactatccttgtgctggtattgaacaaatcgactaatcagggtgaaactccaaatgtaaaagttcggctagctggttttattctggatgatggatcatccctgtgctgtggctgggctgatgatgctagggcagaattattgcttaggctgcaggaaattgtgcatctggatgcttctgttaatttaaagctttcaaaaggaggagagaatagcacaaaattaaaatatactattggatgctgtcttgaaaaaatgttgaagcagcacacaagtgttaccgtaaagaactgtggaattcctcctgatttctattgccgagatttggatgcatcttctgtttcggacaaagccttaagtcgcttggaagacaaacttctgaaatttattgtccttaatgcttgttgcaagggatctctgaatgttatggcatcagctctgagcccagatgatataaatgggttcaatgtggagctccctgttccagtgcagaacatgcggatgctttggatagaagaagttttcccagtagatcccttggaagaagctcgcagactacatgatattttggaaaacagctagtgttcacacattctggatagttagtatgcagcataaaaaaaagaggatggattgtccagaactccagatcgtactgccacttcgctgagattttcgcaaaggaaaacttgtttcacactcagtatccagaaaaggatggtttgtccagatagggccgccaccttgaagttgatcccagattggtcctccacattttccaaagagatgtactcacggcgaacgagcgatatatccttttgatgctgatactgatctctgacgtatgaagaagggacataaatttggctgttcgatctcttttgctgaacgagcgggccttttgtatccaatgtcccaagctccccaaagcaacgcaatgtgtatattctacttgcattattatgtcccaacgttaattttggcttatatcatgcttcctctttcgtatcctactactgttactataatctgatggtgtcaagatcaactgtgtagtttggacacacacaccaaagtgactggactatcttcacgtatcaacg

SEQ ID NO: 37294 - DNA, 5772 bp, Zea Mays
agactaccaccactcgctttcgtctcttccccctcttcccccaccttaccaaggcaccaacctcgctggcatgctcgccgtctctccctctccccctcctcgccttcctctcctcaccttaacccacctctgcgctttccctctcctcccacctcgacgccgcggcctctctcgcctccgcagccaccgcagtggcacccctctcgtcctgctccgcgcgcgcgcagtgcgtcacgctggtatcgtgatcgacatcgacgagatggtcgagaatgaggaccgtgacctacccgtggacgtatcgttcacgaggaggcttcctcccgcgctcactttcggtgacggcctcgacgcactgctgcgggccgccaacgaggtcaaggccaccccgcctgctggcgccaggagcggcgtgatcaggttcgaggtacttgttccacccagtacaaaggcacttaagtggtgctctcagtttagaggatcatcattgtttccccagttttatttatcaagggaactgaggtctgctccatcatgtcaacttgaaatctgtggcattggttccacaatctgctttcatggttcctacctaataaataatgaatttgatttggtatcaagatatatttcttctgattcacacttgataaaggcttatggattcgtagacatgaattatgacaaggaactaccatcaatagaggagaaacttgactcatattacttcttcatccctcaatttgagttgaacgagtttgatagttgttccatattatcatctaccctggtttgggatgattctatttctcatacgttcgaggacgcggtttctttatttaaatcttgttttgatcagatacaaaatagctatgattcttcagctagcatttcttacaaaggcttggtaccaagtcacatttctggagacgcacatttgtcagagactggaaatgctcagttggtgtatgtggatgcagaagtactagcctcaatagatgccaaaggtagtgtgcaaaaggtatccccttaaccttgaagtttttgatatctgatcggtcatttgttagattttcgccacagttattctattattcaaacatggagttatatttgcaacacaacacgattgaatctttcatcaaagagttgctctaacataaatttggcatgggcatcccttatagttgaagaatgtgttaggctcggtttcacgtacttctgtatagctccagggtcaagatcatccccgcttgcactttctgctacaggccatcctttgacaaaatgcatatcatgttacgatgaacgttcacttggatttcatgctcttggctatgggagaggttctcgaaagccagcagtagtaatcacatcatcaggaaccgctgtatcaaatcttctcccttcggtggttgaggctagtcaagatttcataccaattatattactcacagctgaccgtcctcctgagttgcatgatgctggagctaaccaagccatcaatcaggtcaatcattttggtacctttgtaagatatttttttaacctccctccacctggagaccgaatcaatgcaagaatggtgctcactacacttgattcagcagcctactatgcaatgcaagcaccacaaggccccgtgcatataaactgtgcttttagagaaccactagattacactaatcaacattggaatgttgattgtttgctaggtttggataagtggtttaaaaatagtgaaccatatactaaatacgtaagaatgaaaacagtttctgcattgggtaattactcttgctcagtaatggaggtcctggagatcatagagaaggcagaacaagggcttcttttagtgggtgctattcatacggatgaagatatgtgggctgtagctttactagctaggcacctatcctggccagttgctacagacattctgtctggactgcgattgcggaaagttgtaaattcattaccagggcttgataagagcattttgtttatagaccacattgatcaaattctgttgtctgagtctgctaaaaactggatacgccctgatgtcattgttcagattggtagccgcattactagcaaacgagtgggaatgtttcttgagacttccttcccatcttcctacatattgatcgataggcatccatgtcgtcatgatccttcacatgttgttactcacagaatacaagctaatgtagcagaatttgctgctaggttgtgccggtgtacttttcaaaggaagagaagcagatggacagaatttttgaccattcttaattcagtggtttgtcaggagataatgtttcagatacatgcgaagtgctcacttacagaaccatatgttgctcatgtaattggggagtcactttatggtgatgctgtcatgtttgttgggaacagcatggtcatccgagacttagacatgtttggcaacggttggatggattacactacaaatggaaataatgtgatgacacatcattttccagattttgttggcactgtagtggctgggaacagaggagcaagtggtattgatggtttaatcagcacagcagtcggatttgctgttgggtcaaacaagcatgtattttgtgtggttggtgacatatcttttcttcatgatacaaatggattggcacttctcaatcaaagggcatggcggaaacctatgacaataattgttgtcaacaaccatggtggtgcaatcttcagccttctaccagttgcaaaaactacttcaccacaaattttggagaaattcttctacacctctcatgacatatcaatttccaaactatgtgctgcacacagggtaaaacattttctagttcaaacaaaagcagagcttcatgatgcgttggtgaaatccaatatggaacaggttgattgtgtggtagaaataaacaatagtattgatagcaatgccgagtttcataggttcatgagcatgttctctaactattctacaagtcagtatctgggctatcttctgggagttccacgttttaagaatgaggtagatgccatgcctgttgacagaattgatgcagtggaatacatgttgtacagaatccagctttctgcaccacgtacttcaggactatctgatggtagattcattcatgaaggatttgttctgaagcttcgtgtggaggataacattgtgggatttggtgaggttgcaccaatcgaaattcatgaagaggatctgttggatgtcgaagagcaaattagatatcttctccatagggtgaaagattctgtgctagatattattcccttactgagagggtccttttccaattggatatggacaagcctcggggttcctccttcttcgatattcccaagtgttaaatgcggtttggagatggctattcttaatttacttgcatcacaacggaaatgtagtttgttcaaagttctctctggttgtgacctgttctgccgagacgagaatgtggttgaatataatcagaacagttctgcaagcatacaaatttgtgcactcgtagattgcaatggctctccaatggaagtagcacttggtgtcgccaaactggttgctgaaggttttaccacatttaaactgaaggttgggcgccgtgaaagccccattgaggatgcaactgttcttcataaaataagagaagttgtggggtaccagatcaatatccgtgttgatgcaaatcagaaatggacatatgaacaggcagttgaatttggatccagggtacaaagtcttcatttggaatacattgaggaaccagtgagctctgtatatgatctcatcaagttctgtgaaaagaatgtcttgcctgttgcacttgatgagactattgacaaccttaggggggatgtaatttgtaagcttcatcaatttgttcatccaggaataattgctcttgttataaagcctagtgttgttggaggttttgagaatgcagctcatattgccaaatgggcgcagctacatgataagatggccgtcatcagtagcacgtatgagagttctataggtttggcatcctatatacagttagcacattatgttgaccaacagagctctatagtctccagaataagaaacaaagatacatgtagagccactgcacatggacttggaacatatcagtggttaagggaagatgtatcagaacaaaagttaaagatccatgcatccccacttggtgacggaatccgagccacagtagaagatgcccatggttatcttcaccatttaaacataaacaatgagaagataaaaagtacgtatggtgaagaaaaacataggtcatattctatccaagttgatgtggacgattgttcttatctagtcaaacttcgagaggctggtgatcatacaaatgaaaaggttgtccttttacttcatggatttcttggtacaagtgaagactgggttcccacgatgaaagctcttgcccccagtgcacgggtaattgcaattgatcttcctggtcatggcgagtcacagatactgcaacgtcacaaaaattcagaacaacctgctgtaacagttcaactagttgcagatttgttgttgaagttgatataccacataactaatggtgaggtggtggtggttggctattcaatgggtgcaaggattgcactccacatggcactaaatcaagatcacaagatccgtggagctgttacaatatcaggaagtcctggactgagagatgaagcaagcagaagacgccgtattgctattgataaatcaagagcccagttcctgatgtgttgtggacttgaatgttttcttcagacatggtactctggaaaactgtggaccagtctacgagagcatcctgagtttaattctctggtgaggacacgcagtaaacacaaaaacatcaaagctctagctaaggttcttgcagactcaagcgtggggagacaaaagtcccctgtgggaagacctgaagcacttgaagaggcctttactcgtcgttgctggtgaaaaggacgcaaagttcaaagacatctcgcagaaaatgcgcacggagataatgagccacgcagaatgcggatctgatggtcctaaagggaaggaactttgtgaagtgctcattatcccagatagcggccatgctgtgcatgttgagaaccctcttcctttggtgagagccgtgaggaagttcttactgaagctgtattgaggagaacatctgagtagaaccggtaaatggagcatcatgcaggtatattggtgtcctcacatatgcaggtgaagaaaggtttcaaattcgtgccgcccaagaagaactgaaatttggtctccgtctcgtccaatttgtcgtcgttggatcgttgcagtaactttttcccgtttggccttagtgttaatagcgtggctggtagatccaactggtgatgcctcttacgagggtttttgaaccccaatggactggcttccctttggtgattgtcagggttctgcatttcctagagataaattctcagcatgttcagacctggagtgccgtgccctttgtacaaggattccttttctagagttgtatgaaataaatgctcgctctcgagaagcggatttggtcaaaatctcactccactaccgagctgcggcgattcatcaagaagaccttcgtgccgatccctttgtgtaaataaaagtagcctcatctttctttgtcttgttgggatccgggaaccggccgactgtcgatcaagtgcgctttctgtgcgattcctgactgccaatttaag

SEQ ID NO: 37295 - DNA, 179 bp, Zea Mays
gtgaagagcaggtggtccaagaggcgccctataacgagttgatctagggtggtgtctcccagtcagcttgatggcgccaaggaataatttttagtttgttttattgttatcatttatttctgtaagacttccgctatgtaataacgatacttgtgacatttatctctatacactttgtc

SEQ ID NO: 37296 - DNA, 771 bp, Zea Mays
aattaatgtgaccaaactttagttcagaagaattttggttggaggcgacgacgatttgtttcttgctctcgtggtttcggacttctggtctggaggtcccccagcagcccaggctccacctctccacggcagcaccaacgctccattctgtcagccacagcccacgccgctgaacggccggagatcgccccccactccctctcgccggacggttgcagatcagcggggcggggccggggccgggaggagggcggacgacccggggctcctcaagagggccttcgacagggtgttccgcttcgtccgcctcgccgagttcgagatcttcttcgtcctcttcttcctcatcgccttcttcctcttcaaggacctcatggcacggcctcaatacaatcagctgtttgtcaagaagcctgatctagatgattcctggccttagtacccaaataacctggtatttttctttgagctgtgttgccagtacattctttgaaggcctgcgtggccggctggtcacccccctttgttgtcaggagcatgttttatgattacctagagtattctcttcagtgacgatgaatatatttagccagtcattttcttcagttaaagaggaagattttcatgtcaatactggtatgcggcggcgatactgtggttggtgccagccgttattgtttgcactgtttatgtgttgtgaagccccatgagttcgaggtgagatgaccatatgattaagtgcagttctttttaatggcatctagtgtttct

SEQ ID NO: 37297 - DNA, 3347 bp, Zea Mays
cttgcttcctcattggaatttcgttgtttccatgccagatcacagtttacttggagcagcacatttaccgggacttaagaagtgagcagtacggctttgcaaaagtggtgatgttgatatatcgcagactgtcggtttcctgtaaagaacagataccaaaagaggcaggacgatttgcgcattgttgggtgtgaaaccttgtttgattttactgtcaatcaggtggatggtacatatcagttcaatttggaagggctggtcccaagactgtgtgaaatagcccaagaagtaggagaagatgaaagggcaagtgccctacgagcggcagccctgcaatctctttcagctatgatctggtttatgggggagctttctcatatctcgtcagagtttgacaatgttgttcaagttgtactggaaaactacaaacctcagaagatgcaaaatgatgatcaaagtaccaatgatgctgacaaccagttggtgcaggaagaccagaaggctgagcacccgccttcccctttcattatcactccggccccctcttgggagaacatagttaatgccaagggaggaatcaacctgccagaggaagatgttagggatcctaaggtttggtccagaatctgtgtgcacaatatggccaagctttctagggaggcaaccacattccgccgcatcttggaatgtttgtttcggtactttggtaacaatagttcatggttatcagaaaatggacttgctttgtgtgtcttgttggacatgcaacttttagtagaaagttcaggacaaaatatgcatttaatgttgtcacttttgataaaacatattgagcacaagacaatgttgaagcagccagacatgcagcttagcatcgtggaggtggcagctacccttgcagaacaatccagtgctatcgcttcaccagcaactgtaggtgccataagtgatcttgtgaggcatttgaaaaggacattccatattactcttggcagcaaagatatggaattagtaaaatggaacgaaaaattccggaagggcatagatgaatgcctagttcagctgtcaaagaaggtgtctgatgctgggccagttcttgacatgatggctgttatgctagaaaacattgcgagcactcctgttgtagctagatcaactgcagctgctgtttatcgcacagctcagataatcgcttctgtgccaaatttgcaatatcagaataaggtgtttcctgaagctctgtttcatcagttgctgttaacaatgatccaccccgaccatgaagctcgtgttgctgcacaccgcatatttgctattgtcttagtcccatcttctgtttcaccttcgattcaagccagtccctcaggccaggtaaagaaacatgacatgcagaggacactctctagggccgtctctgtgttttcttcttcggctgctatctttgacaagatgaaaaaggacaagcactcagaaaattcacaaggagaaagcaaggacaatagtttgcatagcgttggtgaagggaccggacaaccaaagaatcaaaaccttcatgtgtctcaaagccgacgtagtagcatgagaatttctaatttttccatgaaaagaggcccttcaatggccatgagagctccttcagtagctatcagagctccttcaatatctctgagaggtccttcaatgtcttcaagagcatcttctgtgtctgtaaaggaagaccaaatttccccaaagaaatccgacgaggaaacggaatcagtgttggtgaagctgagcgcccgtcagatcacacttttgctatcatccatttgggctcaagcaacatcccctgaaaatactcctgtgaactatgaagccattgctcatacttacagtttgcttctactgttctctggatccaaggcatcaacttttgaggctcttacccagagttttcaggttgcattttctttgaggagctatgcgctcactgaagcagattcattacaaccgtctcggcgtcggtcattgtttactctgtcgacagccatgattattttctcgtcaagagcttacaatgtgttgccactcattccaatctgtaaacaaatgatcaatgatcgcgcggccgatccattccttcgtttggtggatgagagcaaacttacagctgtcaaggattgttcaaatgatccttcaaaaatatatggatcaccagaggacaacgctaatgcactgaagtccctctcagaaatagaactgtcagaaagtcaatctcgagaatgcatagtctccacaatcatgaacaacattgcaaatatgatggatgcggagttgcataatgtgagaagccaactgctaagtgatttcactcccgatgacatgtgtcctacaagcactcagttctttgaaatgcatgttgataatccttcagggtttcatgagactggtcaccatgaagagggtttgctgattgacctggggaatgaccatgatgcttttggggaagcttcggaaggcgcagaagctcgcacatcttctgtacctgcatcagatcttctgagtatcgatcagctccttgaaacggttggtgcagaaccagcacctcaggctggagtagtgtcggcagacattggattcaaggatatgactagccactgcgaagccctgacgatcgggaaacagcagaaaatgtctgccttcatgagcttccagcaaagcgtgcaagctgcaggggtgccaggcagccagcccaaccagacgacggagctggaccttttccaagacctgcagttgcctcaggccggggcgcagagcacaaacccattctctgatgagagcgttcagggatacccacagtacatgaacgggcccaacggcgacaacgcacagccaggccaggacttccaacagcagtctctgaagctaccggcggcgagcccgtacgacaatttcctaagggctgctggctgttaggagtccagttacatggacgacaaccacctcacctcaagatagtcccaacggaagatcctgcaatttttccacattttgcagggaaagaagaggggtatgtccgcgtgtgaggtcttagctagagactcaaaccgggttcgacacccattctttatgtatagctgtacgtggttgggctttgagccctttgctgctgctgctgttgttttcaccaatgcaacgtgtagagagggactgtgggggagcagtgccttctaccagactgtacatgtaacatgttgcagaaatatatgaagaaaaaatgacgtttgaaggatagatctggtgtagctcgtcgagttaccagatgatgggatcaaagaagcctttcatatttgcggtggaagttcgtt

SEQ ID NO: 37298 - DNA, 1237 bp, Zea Mays
ctcgattttgacatgcacgtagtaagctgggattcttcgtatagaccggattaaaaccctaggccctagccaccgcccaccgtcgcctcagcaaatcctcctcccgtttcaccatgccgccctgctgctcccccaccacctccgccgtcaccgctgcggcggcatctcccggcgcctcgcgcagcgggggcctcctgcgccgctcgcgcccagcccccgccgccgtggagatagcaagttacttggggctagaacttgggaagataaccataaagaggagagcatctgctaagaatatcactgcagttatcccttattttggttatgcaagggctgacaggaagtcccagggcagggaatctatagctgcaaaacttgtagctaatatgattaccgaagctggtgccaaccgtgtccttgtttgtgatcttcattctagtcaagcaatgggatactttgacatcccagtagatcacgtttatggccagcctgttattcttgattatctcgccagcaagacaatatgttcagatgacttggtagttgtatctcctgatgttggaggtgttgccagggcacgtgcctttgccaaaaagctgtcagatgcacctctagctattgtagataaaagaaggcaaggacataatgtcgctgaggtgatgaatcttattggagacgtgagaggaaaagtggctgttatgatggatgatatgatcgacacagcaggtaccatttccaaaggagctgagctactgcaccaggaaggcgcccgagaagtatatgcttgctgcacacatggtgtttttagcccacccgccatcgaaaggctatcaagtggattgttccaagaagtaatcatcacaaacaccatccctctgaaggaggagaagagttttccgcagctgactattctttcggttgctaacctcttgggggaaacaatctggcgcgttcacgatgattgctcggttggtcatgagccatactccagcttggatattgactgatgcttaagttgtggcagctcgcaaccttctctttcttttcttttggcctcggtttttgtctgtgcgtgtaataagcaatgtttttgtggaattctgttagcgcagaacctcagccttgtatttgagtgacagcacataagatgacattccagattgtagtgcagtgtttcagctatcctcaatcacagcacataatatgtgtttgcttgcagtattattaggctttatat

SEQ ID NO: 37299 - DNA, 491 bp, Zea Mays
tgcgtactcagggttttattccctgttgtttttcaggtcatagttttgtgctgctgatggtggtgttaagtgccggtgggctcgaccttcttataagtttaaccgaactatcttctccctcggatcccttcgagtcactggccgaccccgaagcaaaaaaggaagatgaaattactaagatggccgaagctattatggacgaagctgttactcgactactaaacgaggctgcagaagcagttttaaaagaagaatggctattattgtaaaaacatttggaatattaatgtaatatttgctgaacaaagtgtgtaatattttgtagttttgaatgtaatatataaactgtttgtaatttaattctttacgatgcatgaaactttacgtacatatcgtttttgagccttcggcgaaaaaacaccttcccttcttttcatgcttcgtgaagaatatccatattccgtaaaaacatccaatctccgtaagcaata

SEQ ID NO: 37300 - DNA, 1654 bp, Zea Mays
acatgcaacagtgttgcagcgtggattgttctcatcaatcatcacatggcaaaaggcgccttgggctccttgtcaagtgtccagataagcagccactccacgccacgctccactgcgacattcaccaccagcctatccctgcaaaacccgtcaaaagcgccagcgtgcatgaaagacgccactcgcggtaccagcgcggtggaggaggcactggcggcccatcgtccgcgccgagcgatggcgtccccgctcctgtgcgtcctcctctacctactccgccaccttacggcctgccacgccgccagggacatcatcacgccggaccgcccgctggcgggcaacgagacgctggtctcgggcggcgagggcaacttcgcgctcggcttcttcaccccgccgggcgccaacagcacctacctcggcgtgtggtacaacaaggtctccctccgcaccgtggtgtgggtggccaaccgcgaggccccgatcgcgggcgccgtcggggacaaccccggcgccacgctctccgtctccgccggcggcacgctcgccattgccgcggggaacaggaccgtcgtgtggtccgtggagccggcgtccaggctggcgagcccggccgcccagatcctggacaacggcaacctggtgctcaaggacggtgccggcggcgtggcgtgggaggggttcgactacccgacggacacgctgctcccggagatgaagctggggatcgactacgtgaaagggaagaacaggacgctgacgtcgtggaaaagcccgtcggacccctccccgggccccgtggccatggtgatggacaccagcggcgacccgcaggtgttcatctggaacggcggcgagaaggtctggcggtccgggccctgggacggcgtccagttcaccggcgtgccggacacggccacctactccggcttcaccttcagcttcgtaaacagcgcgcgggaggtgacgtacagcttccaggtgcacaacgtgtccatcatctcgcacctgggcgtcgtgagcacggggaactacgggctgctgcagcgctcgacgtgggtggaggcggcgcgggcgtggaacctgtactggtacgcccccaaggaccagtgcgacgcggtgtcgccgtgcgggcccaacggcgtgtgcgacaccaacaacatgccggtctgctcctgcctccgcggcttcaccccgaggacccccgccgcgtgggcgctgcgggacggccgcgacgggtgcgtgcggtccacgccgctggactgccgcaacggcaccgacggcttcgtcacggtgcgccacgccaaggtgcccgacacggagcggagcgcggtggactggagcctgacgctggaccagtgccggcaggcgtgcctccgcaactgctcctgcaccgcgtacgccagcgccaacgtcagcggcggcgccggcggtgggcgccgcgccggcgccggctcgggctgcgtcatgtggaccacggggctcaccgacctgcgcgtgtaccccgacttcggccaggacctcttcgtccgcctcgccgccgtggatctcgcggggaaagcgacaggcaagtctcccttttccgggtgtgctcaagcctcaagcacaaagaaggacgaccgttgcatagtacttgtacgaatggcgagactgg

SEQ ID NO: 37301 - DNA, 2228 bp, Zea Mays
gtgtcaatccatacgatcgtatctaaagatgccagttgcgtctgtctccctccattcttgcccatctctacctgacacggcgacagatcgtcagttcgtcaccgcccaatcagtctcccagcatttaccggctcctccgcacctgctgctccagttccagctctcccaacaccaacatgctcggcctccggcgcctccccgctgtctccggccgcctcgcgccggaggtcacctccgtctctgcggcctcctcccacagcgccgtcttctttcgcaccctccaaatcctcgtccagcaggggcccgtccgcctccaaaagctctctgctccggacaccgggatcgtggagctgaggctggagcggccggaggccaagaatgccatagggaaggagatgctccaggggctgcggagcgcgatccaggaggtggaggccgacacggctgcaaacgtcgtcttggtgacgagctcggtgcccaaggttttctgcgcgggcgctgatctcaaggaaaggaggttgatgggtcctagtgaagttcgggacttcgttaattccttaaggtctacattttcatcctttgaggtttgttgcaaaataacaatatattcttctgtttctgtacagttgctctcagatttttggaaatttaggaaatccatggtgatgaaaagtgaaactctagataaagctatccagaccaatgttcatttcgtatgcattctcaattgcattttaactgacaagtgttgcataaactctccaatagatgtaaatttttgtatcatgtttaagcaggcactgtctattcctacaattgctgttgtcgaaggggttgcttttggtggcgggttagaattggctctgtcatgtgatcttcgcatatgtggtagtgattttaatctgcatcaatcttatgcttacgggaatagatttggttcgtttctttcaccaaatgaatcatttttattttcaaaatgattcaaggcaaggatgcaaaattcagtttgccagagactggccttgctattatcccagggtatgtcaccaagcctgttctttactttgcaagttctttatacatacttatgatgttttgtctcaaataaagctggaactgcagtagccatgtgaatttatttataactacaagtcaaacctgttcctgctatacaatttccttgccttagtgcatgcattccacccttcataacaatgtttaaaatttcagccttgattctgactttattgaaacataaaggatgttgtatcaatctttatatctgagtggcatatcacggtgaaattaccttgtgaattatttggaggtctagattcaaatgacattttcagcccttgacatccatttgatacaatatacagtgctggaggaacacagcgccttcctaggattgttggaaggtcaagagcaaaagaactaatattcactggtcgtagattcgatgcggtggaggctgtaactatgggtcagtttaacgtcctgagatctgcttcctgctgttacgacttcttcctcaagggcaacttttatcgattctttgaagggtcatgtatgctcacattgcaggagtagtaaactactgtgttcctgccggcgacgcttatcaaaaggctcttgaacttgcgcgggagataaaccagaaaggcccgttagcagtaaaaatggctaagaaggccatcgatcaaggggcagaggtagacttgccctcagcattggccgttgaagaagaatgctaccagcaagtcctgcacactgaggatcgtcttgagggtctagccgcattcgccgagaaaagaaagcctatatataaagggaagtagggccgtgtatggtcttagattcataataatagaaagtcgcattaacatgccatccaataatagtggcatgattgcatgacattgatatgtgcaaattcatgtctctctgtaactttcaggaaataagataagatgtatcagcgctgctacctatgtgttctgaacgaggtgaatttggctgcggctttagacttaagatagacagattagacagctgggctgattggagtccatttcccttacgaatgtgagatttgagttggacctcaataatcattactgataaaagtaagcccaaataccgctgtgagattgttaaaattagcatcgagacagtgtttaagggcatgcacaatcacattgattctatccatagctcattgattc

SEQ ID NO: 37302 - DNA, 2309 bp, Zea Mays
aaacgctactacgagctcactagctggtagtactccagaaacgacacctcgccaactagtccagtccagtgccaaagagcgcggcagccgttttggcaagcatggcggtggtggtggcgggcagcagggcgagagcggagcaggcgaggcggcagtggcgggagcaggagcccagaagccccgagatggccgcgccaccgccaaggtcgaccatgccgcggccggcgagggcggcggcggtcgtctactacctggccaggaacgggcacctcgagcacccgcacttcatggaggtcgcgctttcctgccccgacggcctccacctccgagatgtgatggatcggctcgacgcgctgagaggcaaagggatggcgcgcatgtactcgtgggcgtccaagaggagctaccggaacggcttcgtgtggcacgacctggcggaggacgattacatccacccggtggtcgcccgggagtacgtgctcaagggcaccgagcgcctgcacccggcgctgctcgacgcggcggccgcgtcctcctcgtcctccgccggctcgcaggagacgcccaccacgtcgtcctccgccaggtgggaggcgcaccggatgacgatgaagggcgcgtgcggcggggctgaccttggcgagtacgtggcggcgtacatgggcgaggagcgcggcgcggacgccgcgacgcagaccgaggacgacggccgcggccgccagaggcgcgtccagtcccccgccgcgcaggaggagctgagcagggcggagacgtcgccgccgacggcgtcgacgagccccgaggcgctggccaaggcggacgggcgcgccgtgctggagggcgccgtcagcggaagcggccgggccagggcgtcctccgtgctgatgcagctcatctcgtgcgggtccgtatccgtgcgggacgcgcgcgcctccccggtgatgccgcgcgcgcaccaccaccaccgcccaccccggccgccggccgtggaggcaccgtcgtaccgccgcgccaagctcgtggtggaggacaaggagtacttcagcgggagcatcgtggagaccgcgacgaagcgctcgccggccgacggtgtgacgtcccgggacgacctggccgttctccggcggtcggcgtcgtacaacgcggaaaggctttgtcagcagcaggacctttgctttgaagcagtggtccagacgccgcctgcgctagctgcgcctaatctgatccgtgctgaatgctgagcagacgacatggcagcagcaggatgataaagctggagctggcgaaggaggccggggacatgcacggccgctgcatcccgcggaaggcccaagcgcaaggacgacgacggatacctggtcatctcctgcagcgcgcaggggaataacaagggatgacgcggggccgtcttggttcgttggtagctagcgcatggccatcatcatgcggcgcggcgacgagcttaggctagctagctggtcccccggcggccggcgagaacggcgacctggcgagcgtgcatgtgtgcctttctttcttgcgtcgggaacagtaagtagatgagtgtccaccactgctactccagtttggtgtcgtctgctttctttagatgctctgatagcgattggtgaaatgcctgtgattttacgtgtgagctagcaccttcatgtcgatacgtgttactgcgtgtctgcctcgtgctcgttcgtggtctgagctgtttagtgcctactgcctagtcatcatctcattctctctttttgtgctactgggtttcaaaaggctattcttcacgtgttcacggactgtaccgtacaggcgtgcgtgatgagcccgcccaggccgtgctgctgcgtgaatccgtgaccgtgatggatgtagtgcaatctgcaatggtagcacggcgccgacgcgttatgctatcattacttacctcccgtcctcagattcctcccagcagtccccagttctttgatacgtagaatctggatgctcgattgcgtcagttcattcccctctgatctgaggtgaggttcttgatcgagtgtaaaaataaaataaaaaatgaagcctgaccagacagttcggtccctactattactgcttcaccttacaatttgtctgcctccaaaccagcacggtccccaacgatgggatcagctccctcctcctgaacctgaagcctgatccaatttctctcacaccagtctctttccagactgatgttagcgactactgtacagtgtttttttttagcttgcaaaggtggcaatctcggggaagatgtggcaaattgagtgacgagttga

SEQ ID NO: 37303 - DNA, 1164 bp, Zea Mays
cctcgagatcccaggttccgaagagttcctggaactcatcaagagtgcacttcttacagccctagaagggagtacttcttacagcctgtttgtgttattttgcacttcttacagcctgtttgtgagcttggtattcctcctgaaaacatcactgcaaaccaattgttatttggcacattgagggactttttaattcttactagtgtgctaacctttgtttgtgttcaggaccatggctacaagacaattgttacgattggtgatggcgcaactgatctggaggatactcaggttttttgtttcttcagtcagatatcatacacgagtacaaatgagattaatgattggataggagctccgaacgcgagccatagacgggagttgatgccactgggcgatggatggtcgcatcctcaggacctcggcgtgcaacaacagcgactgtcatttttctcatcgcctacttcaatagcctacaacattagcagcgaaggatcgacaaaggtggcatctgaggcagcagatataggaagaccagccttgtttccagcttctggtttatcaaacacttttgggttcaaggttcaggacaagcaagggagaatgcaaagatttaactgtgaaatgagcagcttgacagacctgataactagcattcttcagagggtcggcgatgacattgacagaaaacacctgccacaaatttcgtatgaagatgaggaccatgataaggtcatattgtcgtcggacagtgaccttatagctgccatagaccacacaagacagatcggttggaagagcctaaggctgcacttggactacgcccgccagaagagaggggacggttcctcagacttcgagtacgctggcaaggatgcatgggcttctgcatactttggagtcatcaaacatctaacatttacacttgaactgtttggtgaaatgcttgggagaaagaggccagcaagaatggagtcatggaacatcggcaggaggggtgcagcagcggcaaccgatgtatcccttgaacaatctggttttgacaagatgcaaatcaatctagtgtacactgtattccacacttttacagattgtttggctaattacaagattatctcagtgttttggtttggatttagagtacacttatgtatgaaatattga

SEQ ID NO: 37304 - DNA, 787 bp, Zea Mays
cttcaacatgtgcgatccagccaccagaaaattctccccacgctcgcttgagtagcagcgctcgactccctgctcgtcggccaccaggacgacatctccacgcgccgagttcctcccatggctatcccaaaccctagccgagatcccctcctgtgtcggccactatctccttcaccaggcgctctcctccacctacagctcgccccatctcctcctctccccatggcggctcccctcggatccctccctccatggctaccgtcgcccccaagcccgcggtcttgccgagctcgcccaacccttccccatcttctctccacctctctgatgatcagcgcccttaccccatggtgccagagacgccaccctctcctaacggcatgctcccagcgcctcctccccacgctcgtcttggcatggaggtcaaccatgggatgcatcacaccaacctcaccggccataccccctgctcctccccaccgtccgcagccccaacgtcatcgccgtgtttagtcatgagagaaaggttctaaggtttggttggaaaagaaagctatagcacgtcgaccaccaggtgtttgatgaattagatgaatcaacgcttgttgcggttattgtgaagtttcggttcatatgagcttttggaggtacgctagatgattatgcgagctgaaggacatggatcagagcgaaccataagatgatattggtggattaatcttgtggatgcatcaagccaacaccagaatggaagatgctcaccaagtggtcgtcaattaacaacact

SEQ ID NO: 37305 - DNA, 2333 bp, Zea Mays
ttgtaacgaggatggacagccaggataactcatggatgtgggccccgggtatcttcagatctctccggcaaactacaagcatgtgaagatatgtatggcctagcttatctatcagatggagagagagaggtgttgccaagtccaaaaaatcctgatatctttaatcgcggcaaaaaaaaactgcgtggcatatctgcttcacatgtttttaggtaggcttcttgtttcattaaaccaaccagatttggctctccgattggcttggctgctggctgcacttggttccctgatctttcctcgaattggataaacaaatagcaacgcagcagcatacctcctgctaactaaccatctccagctcctcatctttttgcattgccgccctggtatcttgcttacccatcatctttcacacagcctgtcagccattgcattgctagcttttcttcacttctggttggcatctcttcttgtttctagtacaaaaggacgctgtttgcttcataagcacgaggagagatacatcgtggaagctactcaccaagtgtcttactcagaaccctttgatcataagcacgaggagagatacaaaagggcgctgtttgcttcataggctctgagatgagtaatgggtgctgaggatagagttgcgcaagcttcctcccattctgcgtccctgctaacatctggagattgccagtggctatgatctgtaaccaaagaagagggaaagtgtgagattagcagctggttcagtgttagctcagtatccatcattcacttaatcctctccaccttgttggagataaaggggataatcatcgtgaaatatataaaaggtagagataacatccaggaaataaccagatcattgctgagagctggtgagcaagagcttctatgcaccttggaagagccaatggacgagcactgcgtacgagacagcaaggactcagttcggacaacaatcgtggagcatgataaggtcttcagacagcaggtgcatgagttgcatcgtttgtatcatgtacaaaaatcattgatggctgcatgcgataaccatggttatcagacgagaacagaagaaactcacagaatggtgcaggggtcaaagttgaatctcaagagcagtccttcaacatcagggacaaatcaatcagctcgccttggtaatgcacaacactcaactccccagcaagtaactgaagattcgagtcttcacgaatgcaagccagtaaactgcctcagcctctttagtgaagaaaactcaacagtcaaagaaagatttcacagggagacccataaatcagttgaagacgaaagttggagtgcatctgtagagagtgatcttgacctcaaactaagcattgggcccagttcacattcaccaaaaacacagcactgggtattctcaggaagcgaggaaagaaaaccttctggtcagcatcgatgagagcaagctagtgaacatccaatcatttagtttgatgtcgtgagaatcgaaacacagcacacaatagtttcgtatgctcagaaagctgaagcctccattgaaaatggcatgtggatctgtggaaatacaggcctcaagaaaaaatgaacttctaactcacatggcgcctggccaacaacaaatggcccagaaatgcttccatcagattttgatcagaattatttagtcactagtgatctgtataaaaaatgtagagcctcccaggtaccaatactttctgtgggtagaactgcactaatgtaatgccaagcagaggattgatgacaattcagttctttcttgtcatgtgcataacttttgagtttcagaaccaaagcgataaagaaacatttgataagtattgtttttgaaagaacccaaaaaaaaatcctttcagttctccaacaaattatatatttgtattcaatagtatacttagtatttttttaatgacccaccatgattgatgccttgctatttgtatttgaactgtgtgcagttcatgcttttaactatcatttttttcaaaatcaacatgtccacttctgcaatcaaacacccacttcctcattaccaatgcactgccaactaaatctgccctgttcttagctttggcatgttttgaatcattccatacaaagattgacatcatttaactgctctggattcataaacagcgttctaagctttgccttgctgttcagagttgaccttcatatattaaaaaaaagccagataaacaagccgggcaaggtactattaattgatggaggtttattctcacatgtttattttctactaataaaatccatatcctgcattcaccaaaatccgccgcatg

SEQ ID NO: 37306 - DNA, 658 bp, Zea Mays
gagtccctgtcgcgcgccgcgccatttttggcgttgtgttgtttcgtctttccggcggattcgctctttgcctcagaacattgaccggccccctctggcaacggcaggaggtgggggagcgcgcgcccggcggccggaccaaagttaccgacgcagccggcaaaggggcacgcacgcaccaccgtgcgccaggccggagaccgggcggccaagaaagggacacggctgcggcatcgccccgtggcgcccatgactgacgcgcccggccggctggcatgttctcggctcgtggcgagtcacatgaacttgggaatctagagttattaagagggtgtttggtacgtcgaatggtgtttggtttgagaaataaatcagtccatcgtcttcttatttctcactttttcatttcaacagcaaaatgaggtggtgatgaatcaacttattcattttacaacctaaacaaaaaagtaatgagtgagaagataatggactagtttattcatcgaaccaaaaactatatataagttatggcgtagatttttttcattctcccctctcttttccagtttcaagagactcccggctatgtggattttttattcatatttttataatatattataaaaattatattagagatttgttttctaaagctaag

SEQ ID NO: 37307 - DNA, 1649 bp, Zea Mays
cgtgttttacgtcacttccttctctatatactacgtttcgatttcgaggcgggtcggcttcttcttcaccggttgatttgttccgctgctttgcgcctccgtgctctcgcagatcccttggggccgtctcgcctccgcgcgacgccggcagcgagctgagtttggtttcgccgggttgctcggtttgcggtttattcttcccgcgattttagtttttgcgtcgatcctgtttcgtcctcgccttctcagcgtgtgggttgcaggattttgggtccgatccggtcttaggcgttcgtcatggcgtcgtgtggcgaggagatggaggcaggtcagtcttctgtcagatccggcggttcattggttatcgagagattagttgaagggtgtaggtttgcttatggttcattcctcgttttggttcattcctcgtttttcgttttgatgtcaccatattggtgtgaagattgccaccggacttttactataaggttgttgatccttcattggagatgctgctggctggatctgcaggggcaacaaagttttggaagtagattgaggcgttgactggactgatgttcatagtatcgggagaagatcgttcggatatatatatttacctaaatcgctcatctgttagttcatactcattttttgtccgctgcaattcttaattgcttaaattggggctggtggttttctccagcaactcgattgaatggatggatgggtcggaggcgagtttgatcctgcttctccttgtgcaatcaggagttcggaactgtttagagttccttgcgggcagaagagttttggaactagattgaggcgttaactggactgatgttcatagtatcgggagaagatcgttcggatatatctacctaaatcgctcttctactattggttcatatttaatttctgtccgctgcaatttttagttaattatattggggctgatggttttctccagcaacaagattattatatggatggatggatggatggtgttcaagcgccttgcctgtcctgtcttgccctttgtcccttcgtcgcctcgggcctcggcgtgctcgcattttccattacttcgtttcgattttgagccgggtatcatcttcacctgttgttttgttccgctgctttgcgcctccgtgctcccgcagatccctttgggccgtttcgcctccgcgcgacgctgggagcgagctgacgtgtgggttgcaggattgggtccgatcggtgttgtgagagttcgtcatgatggcgtgtggcgaggagatacaggcaggttcactattattgttgatttcgggtttaaggatattctgaaaacaatggttcctaatagaagattaactatggcatgttttggtttgagtccggccattccatgatttttattagagctgatcttgtggcaattgagcatcttctgcctaggccaaattggatggattcctagttttattggcaaacataactgtggcatgttttgagtccgatcatgcaatgatttttattggagcatcttctgccaaatagatggaagactcactagttttgttggacgaaattaactggaagcttgtgatgttttacaattggcacacgttgaatgttcagtcctgtgactaaataaaatactc

SEQ ID NO: 37308 - DNA, 754 bp, Zea Mays
ttttgcttccaaccagcggcagctaggccgcaggcggcatggcaaggacgccaggggcagatcaggcggggagctgggcgctgccgagcatcggccgccgcggcggcggcgtttccggcgacctcctcccggcgttcggcgagctctcccctaccggcggtaacagcaacaccatcaacccttacgactgccgctacaggtggtggcagagtttcctgatcggtccggtgctctactcggcgtggtcgtcgccgttcgagctggccctcgacagggcggccaccacgccggttgtcgtcgcgagcctggtcatggacgcgttcttcgccgccgacatcgccgtctccttcttcgtcgcctacttcgacagatccgccaatctcttcgtcgacgaccgcaggaagatcgccaccaggtacctcaagcggccgtcgttcgcgatggacgtggcctcgacgatcccgttcaacgtgatctaccagctggtgagcggcaggagcactgggtggttcaggtacctcaaccttctccgcctgtggagactgcagcgcgtcagcaagctctttgcgaggttggagaaggacatacgattcgactatttctacaccaggctcatcaagctatgcggcgtgacgttgctggcgctgcactcctcggcgtgcatcttcctgtggatggcgttccaccacggcgacagggagcacacctggctcggcagccaggtgcgcgacttcgcggacggcagcgtctgggt

SEQ ID NO: 37309 - DNA, 1599 bp, Zea Mays
ctacaaatagtccattgccggagcattgttatggcaaattcaggtgaagcgaagcgaagcgaagcagctagcaatgtcggggatggcggcgcgcatcggcgagtggaagccggtgatggcgatgctcatcttcgacctcatctccgccgtgacgacggccctgatcaagaaggcgctgcaggaggggctggaccgcctggtgcttatcacgctgcggcagctcgtggccaccgtcttcctcgcgccgatcgcctacttcagagagcggagcacgaggcctaagctgacactggagatcctagtctacctcttcttcagcgcagcgtttggcgccgctctctcccagtacaccttcttctacgggctgcagtacaccaccgcgacgttcgccataactttcaccaacgtggctcctgtgctcactttcctcattgcagtcttgctaagggtggagtcactgagcatgaagaacaaggcaggagcagcgaagatcgccgggacgctgacgtcgttcgccggcgtcatgctcctcaccctctacaagggcgtctcactgacgcaccaccaagctggagaagcgagcccggaggatcacagcctcggagcagcagcagcatcgccgtctgacaggaagagctggacgctgggcaccctggcattgctcgccaactgcctgtgcttctccttctggctcctgctgcagtccaggctgaccaagaagtacccggcgctctactccagcacggcctacatgttcctcatcagctcgatgcagggaggggccctcacggcggccattcagaggcgagcgtcggtgtggcttctcacaaggccgatagagatcgtcacggtcttatatacaggaatcatggggtccggagtgggctacgtgctgatgacgtggtgcgtggagaagcgagggccggtgttcacgtcagccttcatccctgtcatccagatcatggtcgccatggtcgacttcttctttctccatgagaatctctatctcgggaggtaagctagctagctgcttttactataccacatcactcagcatccttatcaccagctgtagaatatattgtgaagctagctgctggctagcaaaatggatggatggcctccatccagcaggccatgccacacacacacacacactcagaagatagaggtatagcatgcagctagctgtgtctctggaattgcaatggatggaccaaattgcgtcacttttctgtgctgttgatgcatgcatgcagtgttctgggatccatactcttgatcctgggcctctatattctgctgtggggaaagaagagggatgcctcatcatcagcggctgccaaggaagaggaagatggagagaaagaagatgaggaggaggaggacaaagagaagcaagtcagatcatgaggaccagaccactctcatatatatatggattaggaccaaattaaagatacagttcttcggaatgtgtgatgatctatacttgacagatatatatatatatatatatatatatatatatatatatatatatatagtatttgtttaatatataactctgctagtatatatagtatttgttctgaattc

SEQ ID NO: 37310 - DNA, 278 bp, Zea Mays
tttaaatctgaattcacagtaataaacttaatcatatgcttttgagtcctagaaaaagataatggcaccaggttcggatagtaagtcagttcatttttattttagaattggtctctcttatttttggtcaaattctagaatgatcagatgctcgacaaaggcatggtggtgatgggagctcctcaaggccaacaaaatggtttcaaggaggcagccaactcggtggagttcctaggttctctactatgtgtaatctcatatcaagattaatgagtatc

SEQ ID NO: 37311 - DNA, 2174 bp, Zea Mays
acccgttgtcgccttccctcgcctcccgcacgccagtccctgctgccctgccctcttccgccgcgtcgtcccctcctacgttcccctctccctcggtccgcctagatctcgccagggtttgccgcgtctcgtcttgatttttgctccggaaccagggctccatcggggcagagaggcaggaggggtaggccatcccggaaagtggcggatctgggtgttatcggaggaagagcatcgtgtagcgtttctgtcggtggcaggcatcgacgaggtgtgatttagaaggcatttgtgagtacggcatggactgcgtcggagctgtggacagcagcggaaccgatgatgatcttccacaatcatatcagaacagcagaggcatgaaaggcagtggacgcatcactggtaatggaagagatagtgttggtgcttctctgtatactagagttcaacctcagacagacatggaaacacaaatacatgagcttgagcaagaagcatattgttcagttcttagagcattcaaggctcaatctgatgctataacatgggaaaaagaaagtctcattactgagcttaggaaggagctacaagtatctgacaaggaacacagggagttgctaaacaaagttaatggcgatgatattattcgaagaataaggaaatggagagagtcaactggtgggcttatgattaatttggtgaataattctcagcgtacacatgaccctattcccagccctacgacatctgctcgcaagaggcaaaagatgtctcaacccattctctctgcatgtgtacctgcaccatctgctatgcattcacagcctttaactgcaccgatgcaaccatcatcttcaggagcaaaaaagggagctcaacccggcacaaaagtgaagaagaccaaaccaggccagaagatacctggtggctctgcagtcaaatctatgccatcttctgctggtcctggtgggcgaggaactattatcaataggaatatgtctgctggccttccacctgaaagttcacaattaaatccattaattggtcgtaaagtcatgactcggtggcctgacgataatagcttttatgaagctgaaataactgactatgatgcatcaaaggatatctatacactggtttatgacataaatacagcagacgagacatgggaatgggttgacttcaaggagatggcacctgaggatataagatgggatggcgaggagcctgatttaaaccttataggtcgtggtgctcccgtccatggtatgaagtcaagcagtcgtggtggccccatgtcaggtaccggaagagacagaggtccccaaaagaactcattcaagaaagattatccatcacaaaacggtattgggaagaagagtgttgactacatagaaattctccatacagagacactcataaaggaggtggagcgggttttcagttcagccaaccctgacccccttgagatggagagggctaagaaagcgctaaaggagcacgaacaatcattaattgatgcgattgcaaggcttgctgaggcgtctgatgcagatgatcgtgtgcgatctttggagtataaccgtggatggaggaaccaacatggaggaagatatgcggatgatatgaccatggacggccacatggctggagatgcagatgccatgtaaacctgccaatgtgtacacaaaattccttcattagcttattttttgcctgttgtaaaatcttgacgctaatttttctctctctagatttagccgtaggtacttctgattggtcctaaccaaagaaacagttaggatcaccactctgattgttcagcttttgtagtagaattacgcccagctcatcctttacactgtaaatttagatttggagctgattttgtcggtcgctagacatttgataagcatctgccgtggcctgtttggtttcctagtgcaaacggaaggcatttttgctaatgttgtactacctccatttttttatttgacgcaggttggttcaattttatactaaaaaaatataaaaaatcggagggagtagctagtaatgttgtgttatagcacaaagggtgtaataggatcaactatggatagctgtcgaatacagacatgactggatgctcggttacaaatactaataagaggctgtttggttatatgtttttg

SEQ ID NO: 37312 - DNA, 2130 bp, Zea Mays
ctctctaacaatactaatactactgcatcaatgtttgtatgtatagagagagcgcaccttatattataggtatagaataaaaagtggttacgccttatattatgggacagagggagtatctagctagctagttagttattgtgtgtgttgctcacctcagtacttctgcctgttcctttgccgccttgctctgcagggagatacccaaggaggtttacaacaacttggacactggcagccaggatgagaaatggtgggagggagtggacctccaaaagctcattctggctcacaataatcttgaggtgttaagagaagaccttaggaacttgtcttcgcttgttgttctaaatataagtcacaacaagatatcttcccttccagcagctatcggagatctcccgttgctaaaatcactggacatgtctttcaatcaaataaacactctgcccgaagagattgggcctggctactgctttagtcaaggttgacttctcaaacaattgccttactgagcttccacctaacctcgccacatgcccggacttgtccgaactcaaggcatcaaacaacaacatatccagagtaccagatgtacttgctggctgttccaagttaagtaaattggatctagagggtaacaagcttgtggcactttctgaaaacatgtttgtgtcatggacaatgctcacagaattgaatctcgcaaagaatctacttacagccatcccaggtagcattggagcacttccaaaactaatccgcttggacatgcatcagaataaaataacatcgattcccccttccataaaaggttgctcttcgctagccgagttgtatatgggaaataacttattgtcttcaataccagctgatattggcacgttatcaaagttaggcatacttgatctccattctaatcagctaaaggagtatccagttggagcctgcaacctcaaattatctttccttgatctatcaaataactcattatctggtctaccagctgaactaggtaaaatgactaccctaagaaagcttctgcttactggaaatcctatgaggacacttaggagttcattggtttctggaccaacaacaacattgctgaagtatctgcgcagccggctttcatccgatgaggaaggatccagaagcaccccaactaaagatgaccaaattgctgcagcaaggcgcttgtccttatcttcaaaggaactggacttgagtggccttggagtgaccagtgtaccagctgccgcgtgggagacaagtgatgtggtgaaactggatctttctaaaaattcaatagaagatctaccaaatgagttgtcattatgctcatcacttcaatccttagttttgtctaataacaagataaaaaggtggcctcacacagtggtttcctcccttccctgtctgtcttccttaaagctggacaataaccccttggtagagatatcatccactgatcttgtgcctctgtccaaacttgaagtacttgatctaagtggcaatgcttcagcacttcctgaaccttctgcagtttctgcattaccacagctgcaagagctttacctaagacgaatgaaactccatgaatttcctaatggtttgctgggcctaaaactgcttaggattcttgacctgagtcagaatcaccttacaactgtgccggagggcatcaagaatttcactgcactcattgagcttgatctgtctgacaacaatataacagcactcccagcggagctgggattgcttgaagctaacctgcaagtgctgaaactggatggaaatccgctaagaagcataagacgaactctgttggagcgaggaacgaaagcagttctcaagtacctcaaagaaaaattgccgtctgaataatatttatagaacaaactattgttggagtaatggaataaaatgtttttttgccactgtatctcagttttctggactgaattttgtgcaaaagtatctggaccttgtgtgagaagagagctttgtgagtgtgttgttggatatactggttatagtccacatgttttattggaacaaaaatattttctctgttcaatctttacatggacacaacctggaaagatgttatccaccgttgtatcgttc

SEQ ID NO: 37313 - DNA, 653 bp, Zea Mays
tataatgccatgggaagtcctaatctgtagtacagatagatggagtacacagcgacatatttagccctggtgctgaaagggggagccacacacttctgattcaagtattatttacccgctatgaattcaaagtcggcactcacgatggccttggacacaatcctgagcaacaagatgttgaaatactatttggacctggctatactggtcttgcggatcttgggaatagatactttgagaaacagagtttgaaagctgcatttgctactgcactagctgatccaacagtagacctaaacatgcaaatcaatcatcattctggctagcatgcacccaaggttgaccaaactgattcgacagttttgggatgagatcataacgttcgtccgacttttgcagagatcattacagaactccaagatattctacaccatatctaggcaccgaagggatctctgaatgtgatctagcatgtgttgcttttgggtatccattatggcatgttattttcttaatatagttttaatatccattgacagatgttgacttccatatctatactactctattaaaaacctaatgatatagctaagatcacaaatggattacaaattcttttgttataacaatataacacatatttgtacataaat

SEQ ID NO: 37314 - DNA, 1886 bp, Zea Mays
gtacatgcatttgtattctattaatttttagagtgatttattatttatcaaatcatgtcattaatgtacagaaatcacttctactgagtatgagaaacaaagggcagcaaatgtgatgaggaacaatcagatgttccaacggcttgggattaatcagttacgcacaatgatgactgctacaagagtaaagagcaaatatgatggtccagaggaatcagggtctttgtttgatggcgaggatagtgaaggctctgagccagaggaggattcccatgttgcacaaggtgtacgtagccacaacccaactcatgttgctgacaaacctacacaacaaacacgagattccaaaagggttgtggcccctgatgttcatggacaacagattagattcactaggcaaaggagtgctgccataaatcaacaatcctccctaagcctaactactactacacaagctggttcaagagccaccacaaaccaagaatccacccaaaacttggctgctgcaacacaatttacttcaagtgttgccactgagcaagattacaccgcaggcctgactactactgcacaacctacttctcccacacaagctgaggtcaatgacaacaatagagatgaagaattggtaccaaggcaaagaagtaggggcaaacaacttgaatccttgagcagagggttaggcactaagattccaatccaaatctctaatgggaagcgaaggccagagccacctattcagactgcaaagtttgcatcggagggtgggatcatattgaggcaacacattccaatatttccgcactggaaggagtacaagaagcaagagaacgagggtaaaattacagactacattgggaagcttgctggtcaattcaccatggatgttgagagtaatgcagtaaaagatgcatgtgttgatatgctaaagggtggacagcgccaaatgaggtataggctgaaaaaaaagtacttcactggagttcctgcaaatcaagtgaggactacatcacctgtttcatgtatcactgatgatcaatggagagagttggtacaaatgtggtctagcccaaaccacaagaacaattgtgtgaagaacaaacttaatcgtgagaaggtgcaatttccacagtgcacaggatctcaatcatatgttgcaaaagcttatgtagtgagacaagaaaaatataaagatgtcgaacctagtgcaattgatcttttcaaggagatgcattgcagcaagaaaaaaggatttagtgaagttgttcagaaagccataggtgatatggaagcaatggtggcaacaccagctgaagatggacagcttacaaagtctgcaacagaagttgtttccaatgtactgcctggttcaagtaaatttcttcacaatgctggccttttgccctcctccaagagaagcaacacagggactgtttcagcaagaatgcaagagcttcagtctcaattggacaatgagaggcgagaaaaagatggacttcgagaagatatggataccttaaaagccaagtcacaagcatctgaggcaaccattgctaatcaatcaactgagattgcagatttaaagaagtccttagcagaaaatagcatcctacttcgacagatattaagtattagtcgtgatcagctgaatccttaagcatgcttgctaagatgctggtgtcaaccatcctgaatacacatctcacaaaactgtggacctctttttatccttatgtttgctatatggaactgcaacttacagtctattatatgtgttctcttgctatagagttttagtacttgtctggttaaagaattatgaaccatgttcttttgtgtgttggacatattatgcttgaaatatatggatgttggaaaaagttgtg

SEQ ID NO: 37315 - DNA, 689 bp, Zea Mays
tcacccctcaaaaaattccagctgccactctcttctcctttctcccccaggcaccttcttcctccttgcgcagggcggcagcagccaccagcgagccctgctccatgggcgtcacccctcaccttcttcctccccacggctgcagctcttccactcctccctcacgccagcagcagccccctgttcatggctgccagcccttgctccccttttgccccactgcgcagcagctctgcgctccacctcccatggacgcccagaaattccagcagcaaggactccatagcagcagcagcttgaccctctgctcccagccatggcgcccaaaaaaaaatcccctagccgagccacctctcccagccagcgcccctgttcccttgctccttctccctcgcacagcagcagctcgccccaccttccctcgctgcgcagctcctcggcgaaacgccgctgttcctgcaagccccggcttcctcgctgctaccgctgcgcgcatgccaagtgctcggcataatgtcaagggagatgtgttgttgcagcacgttgtgacgctccccgggtgttcactgtttttggcgcagacccgctcgcgacatcgtcgaccctcgccaccgtcaaaatcacgctccgcgtttggccgttcgacgaaatgccaagccttatggacagcccatgtgactagcctcgat

SEQ ID NO: 37316 - DNA, 2793 bp, Zea Mays
ctgttcgtccttttgaaatagctaggtttacaagtaacgtttgcacaacaatagtgaactaggtacacactacaagatgacaactgaggtcaatcaaaacttttttgcatggtcacaggaggaaacttcggtgcaagatctttcacagggaacatcacaaatgtttggtcatggttccatatcttttggaagatttgacttggaatcattagaatgggagaaatggtctgtatttaccaatgacaggcgtcatgaagagtttggaaagttcaatggattagttgcgaagaagaaggcatactttgaagaatactttaagaggattagggagcttaaggctttacagcaacaggaccagcaaactgaacttcatctggagtactgtggtgatggcagcgattctagtcaaacaggagaatatgaaccagctgcagcccatggagctcctactgaatctgaaacacttgttgaagattccacaaagcagacagcagctgcaaccacgtttgaacatggaacggaatgctacggttatcatgagaatgggagtttagttaatgaaatttctgcaccaacccatttttcacctgttggtgatttgcagcatataggcaaacaaatgaaaggaagtgttagtggcaaaatggatatattgaagcaagatgctaattccagccaagatgttcctatgatccatgagattatgatcactcctaacaaacgagcaattgagaaagactctcgggttggtcaggcttcaaaaacaatttcgaagactgtcaaggtgacttctagtaatgtttctgatcacacatacgtttccaagggaccctgttcaggcgagcctagtgtgataaaccagatggcgaaaccagaaaatatcctgtcattgcggaggccaagagaagcaaccagtgatttagttggcaccacagcaagaagtggtattacaggtgtaagaagaccttcagcagcattacaacggccctctaccaaagaacggcgacctgtcacaaaagatgcttcaaggaagcatgctgaagttaccaccccatgccgtccatctacttctgaaagacgcacggtgaccggagagtcggcactaaagcctgaaaacaatgctattccatgtcgacctgttaccgctcacagacgccctatcaccaaagaatcagcaacaaggcaatgcagcattgctacaccacgccggccttctactgctgacaggcgccctgccaccaaagatctaacaccaaagctatccaacattgctgccccacatcgaccttctactgctcacaggcgccctatatccaaagagtcggcaccaaagcatttcaatgttgctagcccacatagaccttctactgttgaaaggcacactagtggcagagatatgacatcgaagtatgttggtattgctacctcatatctgccatctgctgtcaaacagcgccctatcactggagagggtgcacataagcatgctgatgttgtcaccctgagctgttctactgctgataggcgccccattagagacgttgcaccaaagtatgccactttagctctgccaaggagaccgtctactgccgagaggcaccccattgctagagatattgcaccaaagaatggtttatcactcagaccttctactgcagagaggcgaaccattgctagaaatgttgaaccaaagcatgcaccggcacagaggccttctactgctgagagacgtcctgttaccagagagactgtactgaagcaagctaatgttgccaactcatgtttacctttgacgccagatagacgcctcaccaaaaaaggtgacatttccacccttgagtgcccttctacaggaggaaggtgccctatcaccagtggtactgcactctggtcaagaacaatgccgtactattcaaagggtgctttggtcacagaagttactccccagaagacaataactcccagggttgttagaaacagcaagctagaaaacctaagctatgcaaaagaaagggtggaacttcaagtggatagaaagcaaaagtcaagtctttttaacctgtcctcgaagaaaacattgacttccaacgttagagatgaccaaggtcttgaaatgttcaaaaagccaaacaaggaggggggagttcgggctcatgcatacaaatcaaataatgcaactacttcatggaccggaaatgtaaagacaaaggctcctgtgcctccgcctctgccaccgcgccgaccgtactgcactgagaagaaaccgaatgtcaacagttcacctgttggtggaagaaagacaaaggcctcagctccacactggcactgaccccattatctaggatcctgcagcataactctgaagccgtgaaggtcacatcacatgctgctttgaaccgttgagagatgttcatctgtttgctgtccgcgtacctgtcttcgtcctgcacgtctcttctggaactgattgccagccctgtaataaccagcggatgaaatctgatgaaaagttgggattttgctgatgttcggctccagaacaagctgcagccactagactacagtgacatgcctcccatttggcgtcttcaaagtagtgttcatcacttcgttcttcaaccccattcttaatgactcgcggtccaacgtattagctctcacccctaacatattcaacctaacatattcagcagcatgtagagtggctgatgtaagtgcatgtacaactctattcaatagagagtcttttttgaaaggtttttagggctaattaaaaaatataaaagatgtgct

SEQ ID NO: 37317 - DNA, 2037 bp, Zea Mays
gcagcagtgtgagagctcgattcgttgccgtccacttgtctcacggcctgtcgccatctccttcctggttttttcatccgaccatccccggctcctccgcgccgtcggcgacgactccatcgagtcactcggccgcagcaaccggcgaccatgtaccgagtcgcctccgggctcggcgccctcaagaggcatggggcaaatgctcaaatgatgaatgctgcaattaggtgtgccagcacaagtgttgcacagaggtcttcgggtggcttctggacctggttgactggtgcgcgttcaaatgaaatacctcctccagatttcacacttccaggagtgactattcctcctccgctgcctgaccatgtggaggctggcaaaacaagagtcacaacacttcccaatggtgttaaaatagcctctgagacatctgcgggatcatcttgttctgttggagtttatgttgattgtggttctgtatatgaagcacctgaaacaacaggcgccagtcaactgttgaagacaatggccttcacaaccactgccaacaggagtgagttgcgggttgtgcgtgaaattgaggcaataggtggcagtgccaaagcatctgctagccgtgagatgatgagctacacttacggagccctgaagacttacatgcctgaaatggttgaggtgcttattgattgtgtacgcaaccctgcttttcttgattgggaggtcaaggaacagattttgaggctacaggcagagcttgcaaaatcatcaagttttcctgaaaattttcttttggaggctcttcattctactggctattctggtgctttagcaaatccactaattgtgccagaatattcagttagcagattgaatgcagatgtcctggaacaatttataactgagaactacactgcttcccgaattgttctagctgcatcaggcgttgatcatgatgaattggtatctattgccgaaccccttctgtctgacattcccagtgtatctggaacaacaaggccaaaatcaacctacattggtggagaatacagaagaagtgcagattcatcgagcacagacgttgcattggcattcgaggtcccaagtggttggctcaaagaaaaagattgcgtcactgtatcagttcttcaggcacttctgggtggtggtggcaagttttcttggggaaggcaaggaaaggggttacattcacgtctaaaccgcctcgtaaatgaatttgatcagatcaagtcaatctctgctttcaaggatgttcacagtaatactggcatctttggaatccatacatctactgatgcatcatttgttcctaaagctattgacctagcagccagagagctcacttcccttgcaactcctggacaagttgaccaaagccaactggaccgcgctaaagcctcagctaaatatgcgatactggcaaatttggaatcacaggcatcgctaacagaggacatggggcgccaagttttggcatttggtgaaaggaaacctgctgagcaccttctcaaggctgtagatggtgttactatgaaagatataacgtctgttgctgaaaagatcatttcatccccattgacaatggcatctcatggaaacgttctgaatatgcctacttatgagtcggtcagtggcaagttccgctcaaaatgaggagtacatgacccttcccttcattttatcaccttgtttgctggacaagttttaccagtaccttgtcattcacgtctaggccatggttcttggtcagtttcagaagaaataagcaacctcatgcagttttgttcgtgaaacctgtgatcacttcacaattattcccttttctcattcttttgcggaacattcgtgtggttaatgctggtgatagaccagtaacgtgcttgtaaatttaaccgaaccctggcccctcattcggtaccaaggccccaagagaatgtacaaaattgtcgtaaaactcttgacaaaaatgttgtcgcacatgaataatgattctacagaactgaagtttgcatgaaaaaaaac

SEQ ID NO: 37318 - DNA, 2273 bp, Zea Mays
gccatcgcgcgctcgcctccctccccgcgcccgcagtccccgccgcaatccccgcgtccgcgcccgcagtccccgccgccgagcagtcccgccgcgccccctctccctgcaaaccccgccacgacgcagcaactgatccaccatcgacgcgcgcgccgcgcgccccgacgcggaacgctggatcccgcgcagcagaaggcggccaaccagtcgccgtcgcccccggcccccaccccgcctgctgcagcaagcggcgtccgctaccgcatgccctcgtccccggacctcctcctccccgccgacgctaccaagatgcgccgctactccgcgctgcccaacggcggccgccaggagacgttggccgaccgcgtgcaccgctaccagggcgtcatgctcgtcatcctcgcctcgctcgcgctcgtctctctcgtcctcctcctcatgccacgctcacccgctggcaccatgggcggcgcccggggcagacaggtacgcactcccccgcccggtgacccgttgccggacttggagtcacgctgcctagactcgcccgctgggtggattcgtcgcgttggaggtcggattgtgaccacgccgtccagttaggatgtcgtcgtctccagatccaggggatggggttgctcggcatggcggccaagggcccctcgcccacgcgtcgcctcctatcgcagccgcacttggccatctcctcgctggtggcctccgtggctctgatccactgcttcctcaacacccggagatggttgacgtcgccttcgccgtctcctcgccagtggcctccaccagccccgcagtccaagacaaagccgcgacatgagtcaacccaagtccggtcgcacctacaccgatgaccgtacccaacgtattcaatctctctattcggcaacaccttaaaaagtggattgcaggcttagataatttttggaacacaacattgctccaaaaaagtttttctgaagaaaaggtatcaatctgcagtttggtaagtgagtctgaatctgcagcaccaaggacttcaataattagtttgaacctgcacttacagttctatgggtcttctcaattcttaataatattatatttttaatgaataattgaatatatattgagtctgtgtcatagattcagtcgccttaacaccctttgttgttttcccacttaagttagttaatgagatgaatggatggaaattacgtagtgaatgtatgataagtccaggctacatgttaaaagacacacttggctacttgagctctgtatttccatgaagaaatcttattgacgggtgctttcatctgctatttggatccgttgctgatggatcttacaaagaagaagttgagctttaagaggaacgtggtgtcattgtcatctgagctcaagggtgtgaggagcaagcttgcttcctaggagcagttgtttgtaagggaatctcaaactagaaagcttgcggagacaaaaacaaggagcatggaagaggaagtaatcaagctgcagaaatgcttataggacaaggatgaacaactgcattcattcacaagtagcacagaacagtaccatcatgagttggatgatcttagaacacatctgtcatttactcaagctacaggagaagcaggaacccaactgaaccttcaacttgcttgttctgggagatctgtgagcaagcgagttgtcctataacagttggctcctcacaatgggtattcgacatgagccccatccctgccacagacttgggaaaggcacagtgatttttatggtgacatgaagacattcctcttcaaattatatctttaagcaaccaattttcgccctactggtgcaaacaagaatttgcaatgggtatggtgcataaaaaagtaggaaccacaatgagattgtgatgctgcacatggcacatcaaggtgcgcaagatatgtaccatagaaattatcgtaaagtgcacacagctgtatgtatagatgtttagaagtgaccgaagttaggcttgctcaaccggggcaatgatttacttagcctgctgaaatgtactataggtagcattcaagtttgtgaccatcatgcaagtacatgtgggtttgttgaaattgtgtggtcatcggagatgtagcaaaatgttccctatcgagagctcgtgtactatatttgttttatgaacttaattttgttgatgtaggactattacaaagttctagagacaacttaatttttattacaacataatatgtggtcatacatatgttaatgtt

SEQ ID NO: 37319 - DNA, 1978 bp, Zea Mays
ggtaactggtacccatgccatgtctggacccttcgccgagactcgccgtcctcccgcccgtcgacccctctcctcctgccgcagcgcgcccctctccgaccacccgcctccgcattcctcccccgccaccggcgcccacttccatgaactagcatcccctttcttcgcccagtacccacctgcttcctcccccccccccccttctctttcggcttgggtgcccatggagaccagcggtgcggccgccgccgccactgaagtgggctggtacgtgctcggcccgaaccaggagagcgtcggaccctacgcgcttgctgagcttcgagagcattttgcaaacggttatctcaatgagagcacaatgctctgggcagaagggaggaaggcttggatggcactctcgtccatccctgacttacactcggcagtcacagcgaaggatcgatttgaacaagaaggaggttacggaagctgaggcagaggtcaaggccttgaaaggcagtgatgtggatcagcaagatgatgagcggccagcaaccccaccggacggagagtcagaatttactgatgatgatggcaccatttacaaatgggaccgtactttgagggcatgggttcctcaaaatgatgcatctggtagcaaggaaggttatgctgttgaagagatgacttttgcacttgaggaagaagtatttcaggcacctgatatcctgggtccttctgcattagaagaaatcgacactctgtctgaaagcaaaaacaaaggatcagacaaagcagaaacgagaggagacaagaaacgaaaatcttctgagaagccatctgagaaaaaggaagctaacaaacctccagacagttggtttgatctcaaagttaacacacatgtctacataactggtttacctgatgatgttacagtggaggagattgtagagacattttccaagtgtggaataataaaggaggacccagaaactaaaaagccacgggtgaagatttatactgataaggaaaccggcaggaagaagggtgatgccttggtaacatatttcaaggaaccttctgtagctttagcggttcaattgttggatgggacatcattccgttctggtggtaagactcctatgtctgtaagtccagccaaatttgagcagaaaggcgatgttttcatttcaaagaaaagtgacaagcaaaagaaaaggaagataaaaaaggttgaagacaaaatgcttggatggggtgggcatgatgataagaagctgatgattcctactacagtaattttaaggcacatgttcactcctgctgagttaagagctgatgaagagcttctttctgagcttgagactgatgttagagaggaatgcatcaagtttggtcctgtggataatgtcaaggtttgtgaaaatcatccacagggtgtcattttggtgaaattcaaagatagaaaagatggtgccaaatgcatagagaagatgaacggtagatggtttgctgggcagcaaatccatgcgagtgaagatgatggttctgttaaccatactcttatccgtgattacgatgcagaggtgtcaagactggaccgatttggagaagagttagaagaatccacataaaggatgtataaatatacctgggattgctgcctcgtatgataagatagcagcaggagcttagttgtattttgcctcattcataggttgggtctttcctttgcccgattgacatcagaaagaaaaaaagttattcgatgtcagttatgagccatgagcacgtcgtttgttgctgcaagcctgcagctgaaagaggttcattgtttccgatgctaacatgtaacacctgccatttagtacggagcagtacccagcttgttagttgattattgttttacacttttgaggaagatatcactttctttgtcatctttcattcacatattatttctttttgctttacattatcagttgatatattcttc

SEQ ID NO: 37320 - DNA, 1985 bp, Zea Mays
attgttttgggtccggaaaataaaatccaattttctcagtctcgagcgcccgcgtccctcgccccgtcgcgacttcgcgagtcgccccgtcccaggctcccagcgaccccgccctccggcagtccggcgcgggggctcctctccgatccggtgagccgaacgaggaccccaactccccgaagaaagcggccacagccagagccagggtggctcggctctcctctcacagactgcgccgcagcgcctagcgctcggctggcagccgccccggccggtcggccccgcccctgctgcctacatccgcctgcagccagaagatctgcctccagcgaccgccctgcctgcccttgtggcttctgtggttctgcacaccagcacacgcacttgtccccaaacaacggcggcggcgatgagtatctcagaagagcttcccggcgaaggatctgacggtgaggaggaggtcttcatcaacgaggaggacatcatccacgagataaccatcgacgaagaagttgattccgaagacatcgatgattctacatacgcatttcaaggccaccaagatgaagtcttcattgtcgcctgcagtcctacagattcatcacttgtggcttctggaggcaaagatgataggggattcctgtggaggattggatcagaagagggtgccctggagctgactggacataaggatactgtcggcacagtggctttcagttcagatggaaatttgttggcttgtggaagttttgatgggcaaataaatgtgtggaatacagctacacgaactctcaagggaacccttgagggttccgggtcaggttttgagtggcttaaatggcattctcggggacatttgataatcgcaggatcagaggattgtaatgtatggatgtggaatgccgaccataatgccattctgaatacctttgctggacatagtaacacagtgacatgtggtgattttactccagatggtaaacttatatgcactggatcggatgatgcgtctttgaggatatgggacccaagaagtgcacaaagcagacatgttgttcgaggccatggctaccattctgatggattgacatgcttatcgatgacttcggattcacaaacggttgttagcggctccaaggacagttctgtgcacattgtgaatttaaactcgggccaggtcgttggctcattagcaggccacaccaattctattgagtgccttggtatctcgtcaagctatggctgggtagctacagggagcatggatcaaaagctgatcatctgggacctcacgcaccaatccagccgatgcatttgcgaacatgatgagggcgtgacatcgctgacatggctaggttcgtcaaggtacgttgcgtcaggatgcattgacggcaaggtgcgcatctgggacagcctctctggagcctgcgccagggagttcagtgggcatgcagatgtagtacagtcgctggccatcactgctgacggcaacaccatggtctccgcctcatcagatggctccgcccgtgtgtttgacatctccatgttcaagtgaaggaaaccgggacggagtacatgtttatgctatggcttgattgtgatgcacgattgatcatggcatgccatggtaatatgcgattgtactactctgctcatggaaaaatcgtgcatttgtattgcatatgactccacttgtagtatctattacagcagaacaaaggatgtatttatatatattccgtttttcccctttggagagaaggaatcaattgtgatagcagtgatagaattcggacgggaattctgtctcaaaattatattaatatgagctagtttgggaaccccattttcctaagggcctgtttatttgattggaattgggttgaattgaaatttaattcttggctgatttgtttggcaagttatagaattggaaattaactttccatctatttcttgggctggaattagaagccaaaaaaaca

SEQ ID NO: 37321 - DNA, 349 bp, Zea Mays
cgagtgatatatataactgataaaagcctaaaaagccttcaccgtcagcaagttcttgagtgcaatagttacagcattcacccgttgcgttgtcatcaggtggtgctggccatctacttggctccgcctgaatggcctgcgcggctgcgcccatgattctgacgctgacgggcggcgttggtggggcgtacgcgaccggcaatctggcatgcatgcgcgcgcgcgcgcatgatcttgttgatcggcagcagggcgtttattatttcagcatggctgcttgccaataagggctcccttctagtgcaggaattaatgatgcaacgacgacgcagcatgatacggcaatccc

SEQ ID NO: 37322 - DNA, 995 bp, Zea Mays
cccagagccctttgtttactcgcgcgccacgacacatgaacaccagagagttatcaggtcgtctagtgaactcgacctcggccaaattcacggaactagaagtcgacttctttaaattgagtgtcatgccagcttagcccatccatcgcgaacccagtccaccgcgcactactctgtttcgtccatcagagcgtgagttcacaggagttccctgaaatcggtcgtcagcgccaccgtgataccctccgccgtggccagagctgttcagtagatcagccagaatagatcatcgtcattactgaacaccgccggaaccagccttcacgtcgactagctcttctgcgcttcctccgttcaacttcgcgcgagtactgcaactctggtgagccaatgctgcttttcaagtcggtgaattaaacgctaccgcatggagccgctaggaacaagctcgccggagctttagctccgccgttgtcgtgaacaaacatggattttgggcagaccagtcaaattagcttcggtattatgcttgggattgtctctggaatggtgttcgggtacccgctatcattggttgtggtcactggctatgagtcccgcgaccggagccaggtgttcgaccggggtcagtgcgggggtgctgttttgatttttgaccaacttattaaaagcaatgctcagccttaaccattccttttggccttacatttcacatgagccctcaccataagtgagctcatacacattattccccaaaacttgttaagcgatgaacatatgtgagctcactcttgatatactcacaccgaggtcaagaataggtacgataagatgaggagcagaaaggataatacgatgagtttgtgagaggtctaggtcatcgtctcccagtcaactatggttgctgaggatcgttgtcgtcatatgatgtaattatttagctattttgtacagaacttctattatatgataaagatatgacattgatttctata

SEQ ID NO: 37323 - DNA, 762 bp, Zea Mays
actggctgtcgaccttgttggtcctccccgtgtcgaactagcaagctctgccatcgttactcagctacacacctccagctcgccaagtcccacgcagccgtgctgctccctcgtcatcgtctgttcctacttttccccgccctatgctgcctcgctttgatgtgtgtcatcatctttaatcccagtaactcttccgatacgcgtctcgtcatgtttcgcctcctcgtggtcagtcccatctgggtcatgggggtggaagatctcaacactgcttcatatggctgttttagatgctgtttgcggggtagagagagttattgtgataaatgattttcgccctctcgtcacgttcgcaatcctcgtcaatcgtcgctggtttgagagaaattaccggaagatatggagaagaaagtgaagccgcaccacaccgtcaggtgttcaacgacaagctcgagccaggatttatcagcattctcgcgagtagtgagtcacgtctgatgctggtaagttgaatttatttgcttagtaattttagtgccttgccggtaggcgctatcgacattttatgcgaagaattttagttgtacagtgaagtcagtgctatgcattcatgtgcattatgcaaatcatttaggtacgtttattgactgtgtgatgtggaagacaacccaagtcgaccctaagcgcgggctaatccgtaagatgatgttgatggacgaaccggaagatggataatctgaacgagtgcgtgccaggacaaag

SEQ ID NO: 37324 - DNA, 1627 bp, Zea Mays
tgccactcgcaaggatgaagaaaaaaaataactgcttgctctcgacgggaggctgaacctggacgaagcaggtgtaaaacaaggccaaagtacaaacgagagaggaacagcgatagccgatagcatagcgatagccgatagagaagaggaaaacgagatacgaacagcgtgagtcgaatcgcgtggtggggtaccgcaataatgggatggctcgtggctttggttagctgaggtcaggagagaagaggagtcgcatttcgcgtggtcgagtccgtccgtgtctgtcctccgctgtccgctggctgcgatagtgctgcctgctgctctaacccaatccaaggaggatgccgaggagcccgcagctgagcctgagcggctgcagctctctcttctccctgtccagcaccagtacgagccgcgacagcgccgccctgaaggcgccggtgccagcgccaccggcaggcgcggtgcccccacggcgcacccctctcctgtcgctcagcgtcggcgaggaggaagaggacgagggtgaggacgaggaggagtacctgctgggggccggcgccctggatctgcagctgacggggcccggtggcggcagcaacagcagcggcggctacgacgacgagcggaagaacatccggatgatgaggaacagggagtctgcgctgcgctccagggcaaggaagagggagctggagaaggaggttcgtcgcctggtgaatgagaacctcaagctcaagaggcagtgcaaacaactgaaactagatatggctgcactggtccagcaaagcagcagcaagagcagctcccacatcagaagaacctcctcatccactcagctctaggctgctaccaataggaatatgtatgtgaatttaaagccatatatgaccaaggaagaatgggaggaagacgaacaaagctagctagactagactgcagcccctctaatccatggccattcgctgattaatacgataatatctcttatttgttggcttcttctagcttgcttcaatttcctagtacagcagtttatgtagtatttcctagattgttagcgcaaagctgcctttttcacccatggcatccactctagtggtgtccaggtagtgtcgatccaattttagtatagaggtcactcaaacctctctccatgacagagctttttattcgtttcctgtcttttttttattgttctaatcataataagatacgcacacattcacctgtatgggctacgaccatatacgactaatagttttctctagacagagaaaggcaaaggcgatatttgaatctctttagtatatgcccctgaccaagaaaggagagaagcaaaagtactagccctaatctgctagaataaccaatctgctcaaggattttagtcttttttatgcacttggttgtagcgttgtaatcatctgctataatattctaacatcagtatgcaataagctgggttaccagcacagacaattaaaagtgttcaaagttaacattagcttggctgtagcctggtgcagcaatcctactgcttacagctcttagagcatctctaagagactctttatttttttctctctatttgactctatttgtctttttataaagattacac

SEQ ID NO: 37325 - DNA, 3462 bp, Zea Mays
ggaaaaccctattcctctgataataataaaaattaccaggaatgccctccttcctccgatcccggggtcacaccgtccgaagcccaaaccaagcccagaccgatcgaccctgtccaaagcttatctaggttttcggttcctccacaggatggccgatcccgccgccggaggcgccatggtccccgctgccggaggcggcagcgtgtgggcgaacggcgccccccgcttcggcgacatggtctgggccaaggtgaagtcgcacccgtggtggccgggccacatctacagcgtcagcctcaccgacgacgaggaggtgcaccgcggctaccgctacgggctggtcctggtcgccttcttcggcgacaaaagctacgggtggttcgagcccagcgagctcgtccccttcgaggagcacttcaccgagaaggcggcccagggcggcagcacccgcagtagtttcgccggcgccgtggcggaggccgtcgacgaggtagcccgtcgcagcgcgctagcgctgctctgcccgtgcaagagccccgacgccttccgcccccaccccagcgacggcaacttcctcctggtcgatgtcccggcattcgacactgacgctgactaccaccccgaccagatccaggccgcacggcagcggttcgtgccgcggaaggcgctcgactacctgctggacgccgccgtgactcagcgggacgcggcggaaaaagcggcgcgcaccgtgcctgggatggagatggccgcgctgttctcggcgtaccgtcgcgcagtgttctcgccgatagacaacacctacgcccaagcgttcggggtggatcccgagctggcgcttgctgccgagcagaaagccgcggcagagcgagctcaacgagcgcggccgctcaaagggggccccaggaagacggcggaccaggccacaccggcggccggccgccggaggggaggcgccggcggcgccgccgccaggctcatggagaagatcgtgcccggagcgcccgccatgaagaccaagtccagcaagaaggaccagtacctgctcaagcgccgggacgcgcccgaggcctccgcacacagccagccgcagctcccagacgcgccgccgccggcacccacgctcgcggcggaggacggaccacctggcttcccggccagcggcgacccgcccacaccgccgctgcccgggagctccgtcgctgacgaggacttcatgctgcagaggcgcgtcccgctcgtcgatgtccctcccgccgtccaggcccagccgagcgagggccccgccgcgcccaagaacgcgaccaagctcaagaagccccgcaagcgcgagcgggaggaaggccccgatgcaacccccgactccgcggacgccgccggcgaccccaagaagaagaagaaaaagaagaagctttccgacgtggacggcgctggcggcaaggtcgccttcgtggttgagggccgcgacgtgcttgatctgacgcagagctacgagaacgacccacccgaggagttgaagagcctggacaagcccagtgccgccgccactgacggccagtcgcccaagaagaagaagcctgccccgaggcctggcgcagggaacgaccccaccaaagccggcgtcaagcgcgggccatcggaccgccagggggagctggccatcaagaagaaagccaagctcgataagatcaaggtactgtccagtgagaagaaggccgccggtctggagcagaaagacacggcggcggcggcggcgcagcagcaggcacgggctgcaggcgccaaggacaaggccgagatgggcgcagccaagaagaaggagccggcgtcggctcgcacagtcaggaccccgtcgccgacagcgctgatgatgaagttcccgctgaacagcacgctgccgtcggtggcgtcgctcaaggcgcggttcgcgcgcttcggcccgctggacgtggacggcatccgcgtgtactggaagtcccacatgtgccgggtcgtgtacaggttcaagttcgacgcggaggccgcgctcaggtacgccaaggccaacgccatgttcgggcaggtggacacgcagtaccacctccgcgaggtcgaggcgggggcgggccgcgagccgctggcggcgccggaagcagccccgcagcagcgctccgagctgcggctcatggagaccgctgcgttcaggcccggcacctccggcaacggagctccgctgcccatgtccagggccggggccgcgccggcgcgtccggccgtgggggtggggcagccgcccaagtcgatcttgaagaagagcaccgacgagggaagctctgggaccaccagggaggtctcccgtgtgaagttcgtgctggacggcgcggacggtggcacgctcgcgccgccgccgagcgtcggcggcaatggcaatggcgcagacgggggctcatcaatggtggccaaggccgctaaatccgtcgggttcgctccttcccaggctctgcagccaccaccgcgcacgctgcagccgcccatgcgcccggcgcaccagcagcctccgcgcgccgccgtcacgcagcagctcccgccgccgccgctgcctcagcatctcccgtaccaccagcacccccgcggcgccgacgggactccgctggcccctcccccaggtcagctgctggcatacccgcctcgtggccacggcgagggcccctccgcgcttcctgggctaccgccgccgctgccgtaccagcctcgccccaccggcttccccggtggacagcagctggggtacccgcctcgctccggtgacaacctgccactcctcgctggacagccgcagttcccgcctcgtcccagcaacgccaaggctggcagtgagggtccagcgtggaggaggggggagaaggagttcaaggaggaggtgtggaggctgatgacggggatcgccaagatggtggagcctctcacggacaagaacggcttcttcccctaccacctgttccgagcgcagtgagcctgctcccagttccccacgggctcgcatgcacgagcgcagcagaggtggggtcgccgcagctgagctgcatggagctgccgcgttgtatccgtcgggtcgggccccagggccagtggtagcaaaatagccgtaatagcaaccgggccggagagagtgaaggctggccggtgcctttgttcctttggtaacgtatgtgtggtttcgtagtactctggtttatgctccgtcgtgtagactctgggctgactgggaagtagacttgtacaataggatgttgtagtgcttgttttgttttgtttttgaaatcatcttcattttctatttaataataactgcagtattatcgatcgaaaaactcgggctagtttagaagccacaaaactggagaggattaaagattgaaaaactctaagggctagtttaggagccacaaaaccggagagaattaaagagactaaaattcacta

SEQ ID NO: 37326 - DNA, 3032 bp, Zea Mays
gttgcagcggcggtggcacggcaacagggaggagagaagaggcttccaagtgtgctaaactccatcggctcatctgccattgcatcaaacatcaagcaccatgcagagttcgctcccttgttctctccagatcacttttctcccctgaaagcttaccatgcgactgctaaaagtgtccttgatgcgctgctgataaactggaatgcgacatatgattattacaacaaaatgaatgtaaaacaagcatattacctgtccatggagtttttacagggaagggctctcacaaatgctattggcaatctagagattaccggtgaatatgcagaagcattaaaacaacttggacaaaacctggaggatgtcgctagccaggaaccagatgctgccctgggcaatggtggtttaggccgcctggcttcttgttttttggattctttagcaacattaaattatccagcatggggatatggacttcgctatgaatatggcctctttaagcagatcataacaaaggatggtcaggaggagattgctgagaattggcttgagatgggatatccttgggaggttgtaagaaatgatgtctcttatcctgtgaaattctatggtaaagtggtggaaggcactgatggtaggaagcactggattggaggagaaaatatcaaggctgtggcacatgatgtccctattcctggctacaaaactagaactaccaataatctgcgtctttggtcaacaactgtaccagcacaagattttgacttggcagcttttaattctggagatcataccaaggcatatgaagctcatctaaacgctaaaaagatatgccacatattgtatcctggggatgaatcactagaggggaaagttctccgcttgaagcaacaatatacattgtgttcagcctcactacaggacatcattgctcgttttgagagtagagctggcgagtctctcaactgggaggacttcccctccaaagttgcagtgcagatgaatgacactcatccaacactatgcattcctgagttaatgagaatactgatggatgttaagggattaagctggagtgaggcatggagtattacagaaagaaccgtggcatacactaaccatacagtgcttcctgaagctctagagaagtggagcttggacataatgcagaaacttttacctcgacatgttgagataatagaaacaattgatgaagagctgataaacaacatagtctcaaagtatggaaccacagatactgaactgttgaaaaagaagctgaaagagatgaggattctggataatgttgaccttccagcttccatttcccaactatttgttaaacccaaagacaaaaaggaatctcctgctaaatcaaagcaaaagttacttgttaaatctttggagactattgttgatgttgaggagaaaactgagttggaagaggaggcggaggttctatcagagatagaggaggaaaaacttgaatctgaagaagtagaggcagaagaagagagttctgaggatgagttagatccatttgtaaagtctgatcctaagttaccaagagttgtccgaatggcaaacctctgtgttgttggtgggcattcagtaaatggtgtagctgaaattcacagtgaaattgtgaaacaggatgtgttcaacagcttctatgagatgtggccaactaaatttcagaataaaacaaatggagtgactcccaggcgttggatccggttttgtaatcctgcattaagtgcattaatttcaaagtggattggttctgatgactgggtgcttaatacagacaaactggcagaactgaagaagtttgctgataatgaagatctgcattcagagtggcgtgctgctaagaaggctaacaaaatgaaggttgtttctcttataagggagaagacaggatatattgtcagtccagatgcaatgtttgatgtgcaggtgaaaaggatacatgaatataagcggcagctgctaaatatccttggaattgtctaccgctacaagaagatgaaagaaatgagcacagaagaaagagcaaagagctttgttccaagggtatgcatattcggtgggaaagcatttgccacatatatacaggcaaaaaggatcgttaaatttattacagatgtggcagctaccgtgaaccatgattcagacattggagatttgttgaaggtcgtatttgttccagactataatgttagtgttgccgaggcgctaattcctgccagtgaattgtcacagcatatcagatggtgcaaatgtggaaatcagagaggaggttggagaggaaaactttttcctttttggtgcagaggcacatgaaattgctggtttgcggaaagaaagagccgagggaaagtttgtgcctgacccaagatttgaggaggttaaggaatttgtccgcagtggtgtctttgggacttacagctatgatgaattgatgggttctttggaaggaaatgaaggttacggacgtgcagattatttccttgttggcaaggacttccccagctatattgaatgccaagaaaaagttgatgaggcgtaccgagatcagaagttatggacaaggatgtctatcctcaacacggctggctcatccaagttcagcagcgataggacgattcatgagtacgccaaggatatctgggatatcagccctgccatccttccctagaccagccccttagcaggaagcgctggtcacctcagttttgtgtagacaaaatctaggcatcgataaatgatgggggactatgcatggtgttttggcagcactgttcagtaccttgccttctaaatctggtttttggtgtgtgtgtgtaagctaataaatgtcgaggcaggattgtaggaacaccattgatcatttggctcgctggtgacctggtgacgtatggtgtaattagtagttgtttgcctcctggagcttgctggcttctgtaatggtattttcgtaacgaaaatggcgggaaagtacgggggccgctagtgctattgtgacgtta

SEQ ID NO: 37327 - DNA, 982 bp, Zea Mays
ggtggtactggatcacgatccaaatatttcttcatctgcctcggaaccctagctgtggcacgcacccaggttgtcgtcctccccaccgcaccaccaccacggccactgctgcgacgatgacgagggtgaccgtcgatgcctgtctgctgccacctgaccagtacggtcgcgtgcccgtcgacccggatccgtacgcccagctttcgtgacaccgatgcggcacccaaggagggtgcctcgcgggggacccagacctccacctcttcgtcgtcttcaatggctggtagtgatgtggcgtctctgttgctgcaattgccaagtggatgaaacagatcggtgtgagagtcatgtcaaggccacaaccaacaaaattgacggggtgacgaagggtttgagggattctgctactgcaaaagtcgagccacacgatgatgctccccctatcgatgtcgatgttctatccttggatgatctgataaaaaattgttgactttggttcaagagccttgataggtgaaggatgacacatgaaaactttgttgacatgttgggggaccgtatcaagcgtaatcttcgcatagtatcctacgaattcgcgaccatgggttctctccatgatgttctacatggaagaaaagtatttcaaggtgctcgacctggcccaacgtttggttggatgcagcgagtgcaaattgttgttgacgctacaaaaggactcgatattttcatgggaaagttcatcagtccattgtccatagggataatagaacaattaatatcatcttgtttgaaggcttcaaggcaaagatagtagacttcagatatggctgtccacttgcacttgaactcacatcaagccttcggatatcatgccgcacaataataatcctttttttaaagtaactatttgtgttacttaactttagttgtgctttctgcttttgcatgtattgtctgattagttttcgattaggacaacaag

SEQ ID NO: 37328 - DNA, 1266 bp, Zea Mays
gctccattcccactgccctgttgggcggccttcaaaacacagcccctcctctctctctctaagacgggaaactgcagcacatattaattagtaactagctaggtagaagaagatgagctcgtcgatcagcatgatggaggcgagaatgcctccggggttcaggttccaccccagggatgacgagctcgtgatggactacctcctacaaaagctctccggccatggccaccatgccggcgctgccatcgtcgtcgacgtcgacctcaacaagtgcgagccatgggacctcccagattccgcgtgcgtgggtgggaaggagtggtacttcttcagcctgcgcgaccgcaagtacgcgacggggcagcgcactaaccgcgccacgcactccggctactggaaggccaccggcaaggaccgcgccgtcgtcgccggcggcgaggtggcggtggggatgcgcaagacgctggtcttctaccggggccgcgcgcccagggggaagaagacggagtgggtcatgcacgagttccgcctccacccccatgccgcgccgtgcctgctagcagcagctgcgccaaacaagggtgttctacaagagcagaacaaccagcccaaggccagaatctgaagacgcccgggacggcaccccatcagctgaaccgcaactgccggctgccctgccgcttgcgcccctcgctgacacctacgccgccccaacggttgcagagcaggtgtactgcttctccggtctgccggcactgccattcagaagaccagtgagccttggggaccttctggagttcgacgcctccgagaaggaatctgtcacgacagcgatgaccagtgtctcgaacaacactagttcagtgctggagctggctccaaattgcaactggaaccaggaaaatggcatgtcacggatgtggagcccccttgggatatgagatagatctgtgttgtttgctggatctggatgtatggagtgttagtactgagtggccagtagggttctgctgcttagatttgattagcagtgtgacttgcagattgtgtagattagattatccgttattggactaatggcttggcgtagtatttgtacatattactactgaaggaacagtgtccttatccttgtttggcgtagtatttgtacatagcacctgctaaacttcagacaatcagtgaaagacaaatgtgtacattgtaacatagtgttaagaaactctgagagttgctaagttttcaggctctaagttctgatgcaat

SEQ ID NO: 37329 - DNA, 249 bp, Zea Mays
taggtttcaattaagtagtgcgggacggtgaattataaatagataggacataatgggtcaaaggacacttgccttcaccaaacagatgctcagggtcttcagccttgtagaactcgaagaactggatcatttggtcgccgaagcttgaccgtcaattcctcgaagcttagaaatgagtcgcgatctaatcgcaacgcgaagcgaggacggacaggcacaagcaaacaaacatatacatatgcataagaa

SEQ ID NO: 37330 - DNA, 2093 bp, Zea Mays
tgcgccttgagctgacccgacatttttcaagcaaagcctgatgtggtttttaaggaggctgctttaaactctacgttaaatctgcaggatgttcagggtctagttacttgggttattggtgatggcatgctgccttcttgggtgtttgttaagaacaaacctcttatacccaaagttgtcctactatatgttcctggccttgatgcaactttatatatgtcacacactcgacttctttcttctctgaaagaattatgtggcaatccaaaacctgttttagcttcaagccgtatgccggatgagaggcacaccattgatgcgctcctaacctgcagagtaaagagaaagcgtgatgtaaaaacatcaaatgagtcatctaaacctgacatagatggaaaactatcaagtctggatgatcttggggacataccattccctgttacatattacactctctcagagaaagacttggaagataatggctactctttcaatttaccaggttttgtccctactgtttcagctccttcaggttcctcgccacataaagttcttgcacttgattgtgaaatgtgtgtgacaaaagctggatttgagctcacaagagtgacattaattgatattaaaggattggtggtgctagatagactagttaagcctgctaattcaatcattgattacaatacaagtggaatcactgctgagatgttggctgacgtgtccacaaccctgcaggaaattcaggaagagtttgttggacttgtatataaagaaacaattcttgttgggcattccttggaaaatgaccttatggcattacagatatcccatggtttaatcatcgatacagctgttttgtacaagtataagcgagggtctcgctgtaagattgctttgcgtgtcttgacgagaaagtttctcggccgggagatccagaacacaggatctggacatgacagtgtggaagatgctaaagctgctctagaacttgctatattgaaaatcaaacatggtcctgattttggttttcaaccatcgttgtcaaggcagaaattgacatctatactgcatgagagtgggaaaaaatgctcccttgttgatgatgtatctgttctcgagcggtattcagatacttcttgcaattcaattgctgttttttgtgatgatgatgccctctccagatcaatgaaggaggtgaagaataacaaagtcaccttcatttggactcagttctcaggattgatttcttacttccaccgaagagctcaagatccagaaaagttgaaatcatgtgtcgcagaggctattgcattaaaaacatgtgatggaaaaactgcttcaaaagaagcaagaagtaaaatttgtcctgaattaaaggaaattctgtgtggattggataaaaagataaagaaattatatggtgccctgcccgagaatgctatgcttattgtatgcactggccatggtgatactcctctagtacaaagattacggaaaatgcttcaccatgaagaagaaacaatagacagccgagaaactattgttcaagctttgggagatttacaagcccaagccgaagttgctctatgcttctgctgcgtcaaacgttaactgcatctttgaattagtgtgctgatgggtatggcttcggcgattataggagggtgtcaggcatgcatgctgacccgctgatgtgaaaagttccggcaggcagagattgaattttggaagctattctcatgctgtcttttttttcttttttctgtcagatactatgatcaggctgtagatgtcagcgtaaggcatagtgatgcattatcagaactggtctttcggtagcaggccagcatgtcagcatattaataggatcatttttcagatgaatatacggatcgcagaggaatgtaggaaactattgtaacagccatattattgtgataattaaaaccaagttctggaatcgatgatactacgaggcttgccatttacagttgcgaaaaaaatatagcaaaggtaaagtttatacaagcatatatgttgcattcctttctctcggatatagagagaaaaggaggtaactgtgttgtaacaat

SEQ ID NO: 37331 - DNA, 2342 bp, Zea Mays
tgcagaattatgaggaaaaaatttcttgtttttcaggacaaaatggaccttgcacctcagggtttgataacacagcaacaaaaggcaaatgagcgaaggccagttggtagctcacaaatttggacacggtatggtgttctgcttccaagccagcagactcgaaagctaaaagaatggattctgactgatgagcagcaacagcttgttaatgctagtggtcttggacatctggcacttaccactgggtttaccattgaccgttctttgctgacatctttttgtgaaagatggaataatgaaacaaatactgcacatttcatgggatttgagattgcgccttcacttcgtgatgtttcatatattcttggcattccagtgactggtcatgtggtgaccgcagagccaattggtgatgaagctgtgaagcggatgtgcttgcattatttaggagagagccctggaaatggagagcaactgtgtggcttaattaggctgacttggttgtataggaattttcatcaactacctgaacatccaaccatcaataagattgcatatagcacccgagcttaccttctataccttgttggttccaccttgtttcctgacaccatgaggggatttgtatccccaagatatctaccactgttggcagattttgggaagatccgtgagtatgcttggggggctgcagcccttgctcatttgtataggggattgtctgttgcagtaacacctaatgccacaacacagtttctcggcagtgcaactttgctcatggcctggatttatgagtatcttcctattactcaaccacaacagaagaaccagagcacattgctgccccgggcttgccggtggaactttggaggagcaacacgtggacagagaaaaaaagtcatggactggagaaaagtttttgagcaacttcaattttccgaggtcaactggaacccttacaaggacatgaatccagcaattgttccggaatattgcattgcagcagataacatctgctactctcgtacttggctaatcagctttaacataaaggaggcgtatgtgcctgacaggtttgctaggcagttcgggagggaacaaggacgcctccatggtgtgccaatgtggacaagaagaacttggagtaagtggaaagactggaggactgagtatgctcgtgagattgaggagttccatcaattggttggctgccatttcacccctcctgcggaaaccaatatcaactcctttccactacatgagtctagtgctggacagaatgatgcaggatgcagtctgaatatctctcataatttttctgcaatggttgaagatttgaaaaatgatctcccagtaattggtcgatatcttgagggaaacttgcttccttcagatgttgcaagcttcctagagagggtgagcacgatgatcaagagttataccccaccacagggcagccgaaggaaagatcgagtaagtcatggccccgctgacccagtcaggtcaaagaacccaagaaaaaggggaagacattcactctttcaagattcttttcctcatcggtatctaggcaccccggtaaacatagtgtttgatggcaccattcctctactaaatgggggtgaggcattgaaggaacaagtggccatggatccctggcgggtctcccagtcccatttgacgatgaccacatcttcttcatctctagactcaagctcaccagaatcaatgaagcggaggcgggaaggtggggatgaaattccaatcacaagggacactgattgcctccaaagtggaaggctctgtgtgcagctgaaaatgttcaagcacagagatggagtgaatgccgaggcagctaatccgattttccgctgacgaagacaaaacttcgcttggtcttcatattgtacaaagtagcaaagaaacatgacttgtttgctgcactgctgacagttagctggccaccaacaccgctctgcggtattgctgtctgcaatttgcgaggattttcctgtgtttatatcgttgtgaaacagttgcctctgtgaaatagatgccttttcagaagcgatagagttgtaactgtttatgacaattaacatggctattaaaggggcaagtcttttggcacagatagtgggaatggttgttctatcttttagggttagtttgggaactacgtttttccaagggatttctattttttcaagggaaaatgaactaattttccttggaaaaatgaaaatcccgtggaaaaatggggttcccaaactagcctttaatgataaggcatttcttcacgttttatattcgggagttagatcaatgtaaaatttaagctc

SEQ ID NO: 37332 - DNA, 2450 bp, Zea Mays
gtgaagtcgagaaggcgcaataacacgctgctccgtctccatctccatctccaattacctatcctctccgtcgaatcagaaaccctaacctcaccgtaccacggcctacgagccggaatgaccacatcagccgccgacgatggcagctctttggcgcctaccatcaccgagggagaaaccacagccgacgccggtgctggggcaggtgttgagtgcgtcgagggcaaagagatgaaggttggggccgcggctccagttgaggagccggataaggaggcggcgcgggaggaggatcctggtgatgatgatgactatgaggaggaggaggaggaggaggaggaggaggaggaggaggaggaggaggaggaggaggaggtggaggaggagacggaaactgcgaatgggaaagaggctgagttgatggagccattggcggcgctgaagcctggggaggaggtcaaacctgaaaagctagagggggagaaggaagagctggatgaggagcccgaggcatcggaagaggaccccgaggaggtggaagagttgaaggaggagggcgacggtattgcggaggaaggcttggtggatgggtcggaggcgaacgatgataaagatgctgatcaattgagcagtgggagtgatagtggtggaagcagaagtcgtggtatgcagaactctgaacttgctggaggtcttgaaatatttgttgatgacttgcctcaagattgtgtcaaggaagacattgctatggccttttctcaatcaggggaggtcaaatctgttaggataattaaaaattcatcaactggaaagaaccaagacattgcatttgtttgttacacaagtattgaagctgcaaagaaggttcttgctgaatttaaggagggaattgaggtaaaaggaaaaatggtcagggtatctgcttgtcaagataataataccctttacctggggaacatttgcaagggttggaccagagatcaggtgttgaacaccctaaaaagtattggaattcaagagtgtgagataagctttcccagttacaagggaggaagccgagggtttgcttttcttaagttcacctcacattactatgctagagcagcacttcgtcgcttaatgaaatccgatgctatttttggtactgatagaagcgctaaagtatccttttatcgaacccccacaaaatcatccaagagacttatacaggaagggtgcgttagcttgtgtgacaggaataaacaaagcaaatattgttgatggaagcttcaagttgtgtgcatatcttgcttggccaaaaagtgcttcaaaggtcaatagtgctgcaccttcaaatgctgccaccgcaaccgagaaggacaaaacccacacagagaagattcttgtagacatcgatttgcaacataaattccagaaaggcgacaagagcaaacttacatctcagacaaaggaggcaattatgaagaagaaaaaatcaagtaaattaccaaatgacaatgatacaaaactaacctcacaaggtgctgccgaagtaccacaaacctccaaatcttctgaaggcaagaggaaagttggaaaaaacaaacatgcctctgtataccaaaaaccattgaagaaagcaataaataatcgtaacgttgatgagagccagctaactcatcggagtgctgcagtactgcaaacgtctaacacttccaaagggaaaaggaaagccagtgagaacagaagtttatatttaaacgaaaaggctctcaagaaagcacgtggcaatagtaatttgggtggaagttcaagatctaaatcatatgcctctgatctggaacctcatgctggattcatttcgcctgcgattcgagataatggcagtgatgcatataatcgacagagaactgcacggtatgatatccatcctatagatgtccatccttatgctagagcgccaccatcagcctactctggttacaaaagccatgctggctatgaggctgcaaatacatatgaatacgcagggaaccgggcgcctacacctccaagtggatcttacatccctcgaagaggacattactaacaaaaaatggagtgctggctctgtgcatccattcgatcgcatggtaacaaggaatcaaggatctccgtatttagatgtttcatacatgttatgtagacgttaaaaagtaacttgtttaaggaaaataagaaccctctgcagctttccctttgactgaagtgcagcccggcacaccggttgcttgttgaagaatgctttttttattattattgtagttaagagtccagacgtcgttattaccacttatcttcgtattggaaaaaaaatgtctttttcttagtccagcaatccactaatagcttctatgtttttttgtgctcagcaatatcttatttgcttttttaagacaaacatgccgtgcgtctcaacaggagaaaaaaat

SEQ ID NO: 37333 - DNA, 5417 bp, Zea Mays
cgaaatttgaagttcccttcccctcctcccgctagagtctggttgtgtgatccaggaaggggaagcgccgcccgctacgcttgatcaatagatccattcacccggggagattcccgaccgtgtgctcgtgtgtggagttgagttgtgatggaggccacctccccgcatcctcccaccaccatccgccggaacccaccccgccgcgcgaggcctcccccgaccccgctcgccggcgacaaatccaaaccctcccccctctcccgcctgctcgagggtgaagcagcgttcgccgcctccgttccctgtccaccgcaggaggagcgcctcaaggtgttcctccgcatccgccccctcccggaccgcgatcgaagccggccactccccgctgccaaggacccgcgccggaagcccaagcaggtcggagcccccggggagctctgcctcgcgcccgacggacccaactccgtcgtcctcaccgtcccgcggtctaagctagtcgaccccaagcgaggccgcaccgaggtcttcgacggcttctctgccgttttcccatccgactccacccagcatgatatcttcgcgcaagtcatgaacccactggtggatgacttcctgggcggaaagagtggccttctggttgcaatgggtcccacaggctctggaaagactcacaccatctttggttccccaaggaatcctggtatactacccctcacgctgaggagaatcttcaacgcacaaggcgaaagcaaggtttccaggaaaccaacgcggtcatttttcttctcgatgtttgagatattttctgagggaaaaggggaacgcattcttgacttactgtctgatactgtggagtgtgttcttcagcagtcagtgattaaaggtcttcaagaggtttccctttcaaatcctgcagatgctgagagcttggtttcacgtggtatgctaaagcgcagcacggctgcaacaaatgctaacagcaactcaagtcgatcacagtgcatcattactatacgtgcagacagtgaacatctacttagtagtgctgttctgaccatagcagaccttgctggcgcagaacgggaaaagagaactagaaatcaaggttcaaggctgttagaaagtaacttcatcaacaacacatccatggttttcagtctctgtttgaggtctctgttagaacatcagaaaaaccagaagaaacccttggaaaagcatttcaagaattccatgttgacaaggtacttaagagactacctagaaggaaggaagaaaatgactttgatcttgaatgtgaagccaggggatgatgattatttggatacatcatttttgcttagacaagcatctccttacatgaaaataaagtacactagtcttgatgattcttttgacctggcttcgcaaaagagaatcaatgtttccttgatttgccaagagaacaagaaaaaaaggaaggttcagaagcctgcagtccttgtggttgaacgaaaggaaaatgttgatacagatgatatttctaaagtttctgaaaaagatggcgtgcatcacgtgtctcttaacccagagatgccaagggtatccagaagcgaagcaataatgacaaactttgcaagggctttattgactgtattaagacaatataagcacaaacttttggagtccgagaatgctgttgaaagcatgaaagaattgattagagataaagatatcgaaatcatggagttgaaaaaggagctgaaggctgtaaggtattgttcatgcaagagttctccaataaatgaagatgactctgtggaccatgatgattcttcatcatttggtcaagctgctcagagtttagttaatatatcaaatcaagctgacctgggatctaatgatgcttcagaagataatttccatagttacaagcgcttcataaggaatcagataaatctgaaagttttactgtgccaacacctgcacccactggtggtgcaatgcctgcatctagttattcagatcaaagcttcacagggcaaagtgatgaagaaacggaagagctgagtaagatcacactagagaataaggatattcagcttgatatcaatataagagaagagaagcaccatgaatcttgtagctcttcacagcaagtgaactttgacacagaaggtacccgctctagtgaggcttccttgcttggaacggttggttctgaaaagaagcttgaggaactgaagcagaaatctggaagatgtgtgtctgctgtagaaaaggctaacgtggaactggagcatggtatagacggtggtcaagctctagacgaaaagtgtgatcatgcctcagcgaaagctgcaaaggctcctccaagcaagggcagggaggcagacgaaactgcggatacagataaggaagcttttggttctaggacagagaaaaccaggaggaggttacagccagctgctgctatgttgctcagggaattcactggcgctgacattgatgcggataacgaaagggaagaaagaggcagatcatcgtccagcgtggcaaccgggagatcagatgcgcttgttcaacttctgatgaaaggccgtccggcgcacggcgacgagtcgcgccagctccagtcgctcatgcagctctgcgagatgcgctccatcggctccgaggacttgctcgccgccttcgtcccaatcctcgtcgggatgctcggccagcctgccaccgctggtgccagcccaggcgtcatgctgctcgctgcgcgggcactagccaacctcgtttatgtgctcccctcctgctccgcgatctctgaggagcacgcacccaaccgcctgtttgcgagctggaatctgccggccgatgcttctgagtttgtcatggaagctgtcccatcgctcacgaatctcctaaaccaccatgattccaaggtactagagcatgcttctgtttgtttgacagtgacacgcattgctgaagcttttgcctattaccccgacgaacttgatgaactctgcaatcatggattagttgctcaagctgctagcttgatagctcttggcaactcctctggccaggaaccactgagtacatctacatatacaggcttaatccgtcttctctcaacatgtgcaagtggatccctgctggcagttaaaacactactacttcttgggatcagcggtactcttaaagatttcctttctggccctgctttgatttctggaacattagtcccccgtgctgtaacaaggcctgccgatcagatatttgagattgtgatccttgctgataatttgcttccgcatatgcctgcgataatcattgagttaccaacatactaccatgcatataaagactcttcaacaaataaatctgcttccatcaaacaagagggggctggttctacaggaaacgaaaagtctggcaatgagaggctattgcgtgaccaacctaagctcctagaacagttcggtatggatttgttacccacaatgacacaggtgtatggttctagtgtaaatgcaccaatacatcgcaagtgtttatcgatcattgggaagttaatgtactacagctccgctgagacagtccagtctctccttggcacaacaaacatatccagcttccttgcaggcattcttgcatggaacgatcttcaagtgttgattcctgctcttcagatagcagaaataatgatggaaaagcttccagagacattttccaagttgtttgtgagggaaggctccaacacaatggctcgtcaggtgccacctcaggataaagaacaattagacaaaataatatctgaaatgctctctgagcttagcaaagttaatggtgtttccacatttgagttcattaggagtggtgttaccacagcattgcttgactatttgtcctgtggaacatttgggaaggaaaagtctagtaggattggtaatggagggtcccgtctgacttcaggtcttagtgctctggctcaacccttcaagcttcgtctgtccccagctcaaggtgaaaaaccacttcgggattattcatcaaatattgtgcttatcaatccatttgccagtttagcagctgttgaaggatttctttggcccagagttcaacacagtgaggttgcgtcaaagcctataattccatctggtaataattctgaatctgtggttcctggcaccatagctggtgcatcattagcaactgcaatggatcaatctggtcggcgtccaacaacaagatcaaagtcatctgctgcatggggtggtacatcaaagaaggattctcatgatgaaagcactactactgccaaaggaaaactaggtgattccaatgagtgtaacattggctcagccagttttagccaggtgcagccatcatctggttccggtgctagaaacacttctagcagaggacccgattctactgaatttcaaagtacgagcacattcgggtcatttgttgctgcgacgatggctgggctagcttctgttggtggtcgcagtgttataggtggttgagatcggtgtggtctgtcacttggaggaagcatgaatgaccacaataaacttgtatgtattcactgctggtggggagcagcttagcaaacatttgactgtatgtcaagctatccaacgtcgtcgacttatgcttgacgaggatgatgaagaagtgtttaatggatcttgtatacaaaacgatggaaaccactactgggatgatgttttcacaataacgtaccagaaggctgataaccaagggacttgcacctcattgaacataaaatcagattcttacagattcagtcagaattgtcccctgagcagcagcatgcgtttctgccagtttgtaaccggggtttccacttggtggattggctgcccttagtcccaagcttactgtagttaggaagcacccttcaagtgctgcgaatacttcaaattcaactggggcaacagagtctgctgctgctgctgctgctgatttgcctagtgtgatgacgtgcgccaattatgtgaagctgcccccgtactccacaaaagaaatcatgcgcgagaagctgctttatgcgatcctggaaggccgaggatcgtttcatttttcataagaatatccgaactaacttacaggtggccagttttatgctgttctttaacaggctcagcaaggtcggatgcaggtgctgctgtcgatttctcctttcttttgcatttgttcagctacaagtttctgtttccattgggcaggctaggccatagaggaagagcccccccccctcttccagtacatacatgtaaataaaatggatttttagaactggtgatgttgatccagaattgttaataaatgtggcccagtgtaccatttctacccttccgatacagaaacgcaacgctacatcagaatgaaaatcatgctttaaacaagta

SEQ ID NO: 37334 - DNA, 1834 bp, Zea Mays
ccgaggccccaggacaggcactgaggtctgaggcacgcacatacataccacgcgcgctccagaggacttgtgcgctcgtcaggccacaaccgcagcgcggcacaagaccaacggggaagaggaaggcagtgagctgttccgcacccgccgcccgcccgtctcatctgatgaggaaggtctgcccgaacctcgagcgcgacgacgcgctggacacggtgctggaggtgcccatccccgaggagatgttctccggcggcggcggcggcggcggcggctcctgcgggttcaggttcggctgcaccagcgtcaaggcgtggatgcggtcgcacgccgctgaccggtgcggcgcgggcgagccgtgctccatgagccgcggggagctgcagctcatgctaggcgtcatcggcgcgccgctcgtcccgctgcccgtcgccgtctgctgccgcgccgagcagtcgccctgctccgtcctctgcgagcagctcaagaccggtccaatcgagtcgtcgtccgccaagtacatcgtgcagcagtacgtcgcggcgtcgggcggggagcgggcgctggacagggtcaagagcatgtacgcgatgggcaaggtgcggatgacggccgcggagcagctcaacggcagcgacgccgccggcggccactgcggaggagccaccggaaaggggaaccgcggcgggaggaggaagggccgcggcggcgaggtcggcgggttcgtgctgtggcagaagaggccggagctgtggtgcctagagctcgtcgtgtccggctgcaagatcagcgccggcagcgacggaaaggtcgcgtggcgccagacgccgtggcaccagtcccacgcttcccgcggccccccgcgcccgctccgccgctcgctccagctgacggcgagcctgttcgcggactcggtgtgcatcggcgagcggagcgtcgacggcgaggactgcttcgtgctcaaggtggaggcggaggcgtccagcctgcgcgcgcgcaacagcggcagcgtcgagatcgtccggcacacgctgtggggctacttcagccagcgcacgggcctgctggtgcagctcgaggactcgcacctgctgcagatcaggtccggcggcggcggcggcggcgggagcatcttctgggagaccaccgtggagtcccgcctcggcgactaccgcgccgtcgacggcgtgaacatcgcccacgccgggcgcaccgccgtctcgctcgtcaggttcggcgactgccagcaggacggcagcagcgccaggacgcgcatggaggagacgtgggacatcgaggaggtggacttcaacatctggggcctgtccatggactgcttcttgccgcccagcgacctccgggaggggggcaaggagagccaggacgtcgccgtcgctgtcgccaaggccgatgcgcgacccccgccgataaggatacctgcggtggccgtgcgcgtcgggccctcgcaggtggctgccgtcagcatggacgactcggactcgctcatcgcgaggccatgactactcctgccgtacccgtacgtacgtgcttacagtgctgagtgaagagcaagtatacgtggcacttgttagttgttactacaggatcatacttgtcgcaagatctgtaaatatattgcagtttgagatttttcccccttcgagaggtgtcaggtgtggatttacctcagctagaattgaggccagaagcagtagtgagtaatccgaactagatgttcggcgtatagctgcattgtaaattctaatgaactagtcctgtaaatctgaaagaaaatcccagttcttctgcccagtcacaatactgaagtacgtaa

SEQ ID NO: 37335 - DNA, 356 bp, Zea Mays
tcaattaggtacgctagttgatcacgtgatgcggaagtcgagctgagtcgaccacgagatgctgttaagcgtgggcttcttcgcaaggagatactgataatgaacctgaagatggataatctgaacgagtgccaagacaaaggatggtcactaagtgatcgtcatctaacaacactaatctagtgttatcccaggcaagccctggtgcatttgccacctccttctattttaaaagcttttatcacttatatgttgcattaggtgataggagttgtgtgaataaacagttgatgcattaccattccttggaatttgattactattccttgattcctgtttataaaagagaactaaag

SEQ ID NO: 37336 - DNA, 2604 bp, Zea Mays
atgctagccgccaggacccctgtctcgctctcgctccaccaccgcatcgtcgccggcggccaccgggggcgatgcgtcgggggcagccaaaggaggcgcggtggcgcgccgtgccgccagttcacccaggcgctccagagcctctggaggcacagtcccccgatccctcctcctgcgcctcccgctgccggcgctgccaccagcggcgaggccgaaccctcgcggcagccgccggtactcgagaacgctgccttcgaggagtactataaggtgagtttagtcttcctatttggagttatagtgtcgcgtacaaaatggcatggtttcagggtcctgttcttctggatgtgtgtcagtgttcagcaaattgtccgcgaggaggagtgggatgccttcatgagtgttctacggaaaccattaccagcgacttttagaatcaatgcctgtcttgcatggcacctgaatttctcccggaaggaattgaggaaaaatcaggcactcgaaagttttcatgagtttctgaagcatgagagtgaggttggtaacataactagacaagaggctgttagcatggttccaccactgtttctgaatgtacaacctgatcaccatattcttgatatgtgtgctgctccaggctctaaaacttttcagttacttgagatgattcaccaatcaaaagaactaggtctacttccaggagcattggtgatagccaacgatctcaatatgcgaagatgtgacctccttatccataatacaaagagaatgtgcaccgccaacctaatagtaacaaaccatggagcagaaaacttcccctattgttctcttgcaaaggattgttcaggttcatataaagatccctgcaaactacaaaagctagaattcgaccgcatactttgtgatgttccgtgtagtggtgatgggactattcgcaagggtcatgacatgtggagaaagtggaactcaggcatgggtaaccaacttcatcttctgcaagtaaatattgcaatgcgtggtattgcgttacttaaagtgggtggaaggatggtctattcgacttgttcattgaatcctgttgaaaatgaagctgtcatagctgagctccttcgaagaagtggaaactctgttgaactccttgatgtttctagcgagctacctgaattggttcggcgtcctgggcttagcacttggaaggtacaagatcgagaatcttggtttcagagtcacgatgaagttccacacaataggaagaatgtagtatttccaagcatgtttcctgcaagtaatagcaccgaggaaagccataccgtgtgtggtgatgttgaagtgaacataaataatatgaacagcttctcaagaaatatcaacattgaagaaacaagcaaacttaatcaagatatggatggagtttctgttagtcccactaaaattttggaatgcacttctaacattgtgagttcaaagtttccactgcatcggtgcatgaggattgttcctcatgaccagaacagcggggcatttttcatcgcagttcttcacaaattatcgcccttgaatggcagtcagataaaggatactaaaattcagcacagacttgggacagacagaactatacagttccagaaagagcccaagccagaaacacgaccctatgaaactactttgacacgccgtcagcacaatgtttctgaagttgatgatactgaagtgcttggtaggggacagaaattaggcacagacagccaaacttcaaaggataagaactcaagcgaggtcgaaatagttagcattctagcagagtcaggagatagaatggagttgcaaaagcaaagcaggtgggaaggggttgatcctgtcttagttttgaacgatgaagcggtgataaagagtatacaatccttctttggcatcaaggaatcattcccactcgaaggtcatctggtgactagaagtcctgataatgcaaggagaatatattacgtatcaaaatcagttaaagagattttggagctgaattcaaaagttggtgggcagctgaagatagcttcacttggtgttaaaatgtttgaaaggcatagatcaaaggatccctgtccatgtgcatataggttgtcttatgatggattatcgctggtgcttccatccatcagcaagaggatactatatgcatccgcactcgagttccaccgccttgtacagtaccgaagcataagctttgctcattttaccgacaccagattcggggagcaggctgcgtccttgacgcctggttgctgtgttgtagtgttactcgaagggaataggcgtgtagattccatttgtaaggatccctccacaattgccgttgtttgctggagagggaaggggaccattaacgttatggtttctccctcggataggaaggatctccttgaaaggatggcgtatcgatttggatgatggatgggataaaggtgggagcatatcctgtacgcaaagaagtcatgtgctcccaggcacaaaatgcatccagccgatccgttctgtatctaacggtgttatgacatttttgcaaataagtcttcccacgcttcccacattagtgttgttcattaaaaaaac

SEQ ID NO: 37337 - DNA, 2480 bp, Zea Mays
cccattcagtcgcggacggcggacgctcctatcccctagcctagcgcgcgcggacgcagccactatgccgggccatccaacccctgccgacgcgctcctcggcggcggcacatcccgccaccacgcggagcttctcctccatagcggcgatgacggcgtctctgtcaaggatctccgcctccgccgcgtcgtcccgcccgccgccggctccctcgataccttccccgagtgcgccgcacccgtgaagcccggatttgtcgagatcacgcctctagaggccgtgtcggctgctactgcggcggcggccggggactttgaccggaagttggcgcccccgcggtccaagctcgtccgcgatccgcgttcgtttgggtaccggcgtctgctgcctttcctgaacgagctgacgaagaacgatagctcaatcggcaaggaggtgttcccgcaagacacagctgcgcactcaaaggatgtgctcggcggatctgattctcggctggctgatgaagctataggcgttagccactgcgaacctgaagccatggtggttaacaccggaggagacaccgatgtgaaagatgcctgcaacaatgtctcggaagagatcaagattgcccctcatgacctaaccaacaaaccgttgcttgccggatgcacaaggtcgaggtttgttcatcatccgagctcgttcagctacaagaggatgctgccatttctcatggagaatgacatttctgctcaggaatgtaacagggtcaaaattcgaaaaattgcagaggaaaggcagctagcatcaaatgagaatgatgtctcagccagtgggcagcattgtcttgctgcatctgatgactcttctcaggaatgcaatagaggtcaagttgaaacaatggaagaagaaaagccagcaaaagcagatgagaataatgtccttggtggcagacagcttcagcctcctgttctagaagcgcctcctcctgatttcagtgtagttgaaatgcaaaatgtcatgcagcatgaagcttcggcttcaagtcaagttcccctaacttcttttgagggtgaattaacatcagctggggacagtgtccaggctgttggagaacatcagcttgttgcatcagaagagtctctagacgaacacaaaagagatgaagtcaaaagaagcatacatgatgcagtaaaatcagatgggggctatgctttggatagcagagaatttcagcttgctgcatcagaagtctctccagaaaacagcatggctgaagtgcaaggagctgcacaagaagaatcgttacctttagatggagttgaggaaaggtcagacaagggtgactttgtttccacagagcaggctcagctctgtgtcacaaatgaatctttggctgcacagctgcaaggtaatgttgaattcgctgaagtaccacagtgccaaaacttggacccaggatgtcatgatgttggttttggtagccgtaccaagagagtgataccattgttgcatcggcattgtgcacaacaacctcaggattccgtggtttctcttgatgatcagcttcttgacgatgacatacaaatgatctgcagacctgattcccgtgctgttgacagatacttatcagtcgaggaaatgtctggatgcattatgttaactgagtcagcatcaaacaaagcagggatatcgcggccaagaggtgcccattcaatggaaaaaggatctctgtctcctaagaaaccttctccaaagaaaggaatactcaagaggaatacaagggggtgtaagggtatctgcatgtgcttagactgctgcacattccgactacatgctgaccgagcttttgagttctctaggaagcagatgaaagaagcagatgatataataactaacttactgaaggaggtggccagtcttaggagtctgctggagaagcctgctggccaagaatcaacgcaagcagcttgcagacatgcttctcgggtggaggaggtggccagaaacagttgccagcagatgttcgtggatctaaattcccactgcagaatccctaaaccaagggttagattcaccgaatacgtcgaggaaaagaaggccttaccatctccacgcaggagcaaccgtagtaggtgacagaatttcagaaagtggtggcggcctgacctgctgaccctacggatcgtgttgcttggttgttcagtacataatctgtgctgcttggttgagtggttgtcacagaaggaagattgaaatgaaatgaccgacttttttttgcgaactggaacatgcctatttgcaaactttttagttgtgaaatgatggtcccttggttgtaagaagtctggcatgtgttggtttatgatgcttgaggtctgtactaccaagtactgtgtgctccctattttccacattgtttagatccaactccaagaaagagttctaaaattgggtcctaaattttaaaataggacccccttttgaatgattt

SEQ ID NO: 37338 - DNA, 265 bp, Zea Mays
ccgagaatcacccaggccaccaatagagggcacaacacggtgtgggagatggccaggcgcgatggcggcgttctcactccgacgagtatcacagcaccagttaatgcgcgcggaccgagcccttccgatgagattcaaggagctcgggcggcacacaatttatacagtcatgccgagcaggatcaggcgttctgttgcaacccacctgcgattaccacggcgaggatttggggagatctcccaaccccgcatggagccgcaccgc

SEQ ID NO: 37339 - DNA, 1217 bp, Zea Mays
ggtgcgtgcctacggcgcgtggcatcgtgtgacttgggcaactgacactcctccccgcgacgccgcgccgcctgcccggctgccatccgaatcccatgtcgtcgctgctcctcctccaggccctggctccagccatgaccgtcccccgccaccatttcctcatctcccctctccgcctcgcctctgcagccacagttccgttcgctcgacgcttctccaacgccgcttccagcaacaagccggagccactcctctcggaaccggatctggagtcaggtctgtatcttgtgtcaacgccaattgggaaccttgaagatatcaccttaagggcactgcgtgtcctaaaatgtgctaatgtgatactatctgaagacacaaggcattcaggaaagctacttcagcattacaacatcaagacacctcttcttagcttccataagttcaacgaacgggagagagagcccactatcttaaggaggcttcatgaaggtgaagcagttgcactgataagtgatgctgggacgccaggtattagtgaccctggcatggaactggctagactatgtgcaactgagaaaatccctgtcattcccattcctgggccatctgctgcaattgctgctctttctgcatcgggtttgccatcaaatgaattcacatttgcatgctcggtcaagaagagataggcttgagatatctgctcgtgaagctgctacacaaatattctatgttcctccccatggcattcagcagtttcttgttgatgctgcttcatcttttggcgattccaggcattgtgtggtcgcaagggagataacaaaaatacatgaagagttttggcgtggaactttaggtgaagcaaatgaagcttttgcaactcgacaaccaaagggagaaataacagtgctcatagaggggaagttaatttcagatgacgaaattccatcagaggatttccttgagcatgaactaagagaattgacggcaaagggatatactctttctgcggcggtgaaattggtcactgaagccacatcagcaaagaagaaagatgtttatgcactcgcattgaggttgtttggaaaataagtaaaatggaatttttggtcgcatctgaaacgaggacacgaggaatctgaagcacaactttggggaagatcacaagtaaaagactttagacggagattttgacaatcttttggagacgctaaatcatt

SEQ ID NO: 37340 - DNA, 2351 bp, Zea Mays
aatggaattctgacgtccgcagggacaaagtcgctgcgttttctcccatcatcatctctctccctctcgtcttcctctctcctctcggcgcttcgggccttcggcgcctccccctcctcttcgctttcctccctcccccacacagagtgacagcgcgcaccaaaccaaatcccatcgcgagataacaaaaccaggccaacggattcttttggctgcggtggcgttgccggtgccggtggtgcagcagctgctgttggtgccctgtcgctgtgccgccgccgaggtcggctcgcgtgtccggcggcctaaaccctagccggcgctggagccgctgaggcgggcgccctgcagcacccctcgtctgtctcggccaggtgcgcgcccggccgcgccgctcgaatcgccggattcgagcttcggcgcgacgtggaacgggccggcgccgcggaggggatgctcccccgtcccttctagattcccgcggatctcgcgggcgtgcttgggggtggggtgaaacgatgcccaggtgagtacatgccgcgcgcgatcttctagtggttggtgcgagtggtggacgaccaagatgatgccgtcgggtccgccgaacccgatggggcacgggcagccagtgggcggcgctgccccgtcgctactccggacgagttcttccctgctcagtggcggtggtcagccgggtatgggcggaggtggtggtggcatgctttcttcacagtcgcccttctcttcccttgtctccccacgcacacagtttggtggcaacggtcttctgggaggtgcctctctgctgaaccggccgccattcgggaatggtggccctatgccaggtccagggtcaatgcaggctgttgggatgcagatgagtacactccagcagagagctgggctggatggtgccagcgatttcattagcgcggaagggtcggatcctctatcattcccgtcttcttcacaggtcaatttgggcaatcagatgggatcagataatctgcaggcgacttcgcagcagcagcagcagcagatggatgccatgcaggatatgcaacagcagctaccaatgtcttacaaccagcaacagttgccaccacaacactcgcagcagctccagcagccacaggctacagtcaagttagagaatggaggaagcatgattagcatcaaaccagagcagcagatggcacaacctgaccagatgatgcgaagtgctagtggtgtgaaacttgagccacagcagctgcaagcccagatgatgagaagtttaagttcagtcaagatggagcaacagacttctgattcatcagcattcctgcagcagcagcaacaacaacaacatttgttgcagctgacaaaacagattcgaaattgtccggagcttgtatcaataggtggaccaaatgcaattgcaaaccctcaagctgccacagctgctcaactgaccctcttgcagcagcaacggcttctgcatatgcaacagcagcagcaacaacagattctaaagaacttacctttgcagagaaaccagttgcagcaacagcagcagcatcaacagcagcagcagttacttcgtcaacagagtctaaacatgagaactccaggaaagtcgtctccttatgagccaggaacctgtgcaaagagattgactcattacatgtatcatcaacaaaacagaccacaagtaagtttttttattgatagagcacttttgtgttccgaagaccaggtactaacaacatagcatatcttacctgttgctctgatgcaggataacaacattgaatactggagaaactttgtcaatgagtattttgctccaaacgctaaaaagaggtggtgtgtctcgctttatggaagtggtcgtcaaactactggagttttccctcaggatgtatggcactgtgagatttgtaatcggaaacctggccggggttttgaaacaacagttgaggtactaccgcgattatgccaaattaaatatgccagtggtacacttgaagaacttttgtacatcgacatgccacgtgagtcccagaatacgtctgggcagattattttggattacacaaaagcaatccaagaaagtgtctttgagcaattgcgtgttgtacgagaggggcatctaaggatagtttttaatccagaccttaagattgcatcttgggagttttgtgctaggcgtcatgaagaacttgttccgcggagatctataataccgcaggttagtaatcttggcgcggctgtacaaaagtaccaggccgccacacaaaattcgacgagtttgtcagctcaggacatgcagaataattgcaactccttgattgtaggatagattagtg

SEQ ID NO: 37341 - DNA, 2501 bp, Zea Mays
cccgacctgcaactccatgccctgtgttaccccccgccactagagttgggaatgggaattgttaatgccagggcctagatatttaatagtattttcataacagcacaaagcgtcatggcagcaatagagagaacacaagtcagcaaggcatgaatgctatcagggtgcaaaaagaaatgaaaaaagaatgggcaagacctggaagagttttcaatagaaatattactagaggaggctactctcgaagttcattgcctggagtcacacaggaatttcgtgttgtcaaagataacagaattaaactgaaagaagttagtgagactttgccagaagcatctcagaacggcgattctagcaatgaatgtgctttttcaaatgttagagataaatgctcaaccaaaaagcttgctgcccaacaccacttggttacttgcaatgttaatgggcatggagcggcccatgctgacaatggtatcaaaattgcggctcaagcccatgacaaggaagtcaagccttctattgtccgaaaaatggaacaatatgaagggacacaagcatcattggttggatctcatgcagttcttggaaagggcaaccagaacacggtggacactgcagcatcagggaaaaataattttggtggcgaactttgctgttcttcatcagatccaatccatgtgccctctcctggttctaaatcagctggaacttttggagccataaagcgtgaagttggagtagttggtgctaggcaaaggccagctgatagtgcagcaatatacacatctacttctaatggcttagtcaaagtggtatcagcaccaaaggttagcccacatttggaatggaagcccaaatcagtaagccccagcactgctgcacctcctggtgctccatcacctgttgatgatggaagtaaaacagaagtgtctgctttgtctaagaagctttcacatgctaatgtatcacatgaacatgtcattataccggagcacatcaggataccagattctgaaagaactcatttcatcttcggttcttttgaatctgaaatttatccaaaggcttctttagcagcctattatgatgctgtggctaaagaagacttgaatgatcactctccatcaaggatggataatgttggttcctgcagtccacttccacagtcagagcctgctgtttcagtttctgaacatgagcagtcattgacggagtgtgtggatgttcggagccctggtgttgtcggtggaacaaatgagacgatttcaagcaaggtaacacattctcaacctcgactccagcatcaggaagctgcacagaattttaaggcatatgagccagattctggttatgggatgtcatttattactaaagttgatggtgaagcagcccaaggtatagcttattcatctgaggctatggttttacattctgtaaatggctatcagttacctgcatctacagcaactcaacaaccagtgccccagatgttttctcaacaattccaagcacctcagtatccaaactttttgccatatcggcatgttttctcaccacagtttgggtctctaatggttgttccaaactattcaagcaaccatgcatttcctcagttgccacatgccagcagctatctggtaatgccaaatggagcctcacaactagctgccaatggcatgaaatatggatcaaaccatcagtataagcaagtatttcaaggagcccctgctggatatggctacggaaatcataatggttaccctaacggtgttattggcggcacaggtgctattgaggatatgaatatgagtaaatataaggacaactgcctctatgcacccaatccacaggtggaaacagcagatgtatggattcaaagtcagaaagagagtcccaatatgccatctgcaccgttctacaatatggtgggacaaccagtgtctccacatgcagcatacttaccaccacaaagtggccacactgccttcagtcccgccccttcccatcctggtcacttgcagtacccgggctttgtgcatgcactgcagccaacatccatgaccatggtgcagaacccgcagaccatgatacatcagccggctgcaccgccattggcaggaaatctaggcctggacatgtcggccatggttcctggaaatcaagtaggagcgtttcaacataaccagcttgcccatcttggctggaccacacaatccttttgagattttggtgtgcttctatggctggataagtgaaatttcggttccgtgtggatagaacctaattgaagtgatatgctgtaatatgcaggataggcctgatgaataccaggtttttctttgttttaattataaaaggggaaccgttttttcgtgccgttgtgatttgcaagaacgtgtttaatgttcacttccagtttttgttccaaaattttgttgtaagtgctagtttggaaactcaaattctctttcgggattagaatgaccctacaatctccaatc

SEQ ID NO: 37342 - DNA, 2515 bp, Zea Mays
acacgacatccaaatcgaagaacacgtcgctgacacaccacctctccctcgccgcattctccactctctggtcttcgccgtggtcggtgccttccaaatccaaaaaaccccaagccctagctgtagccgtcccccaaggtcgccgagatgtcttcgtggctgcgcagcgcggtgagccgggcagtggaggccggcggccgcagcggcgtcgcccgcgcggtcaaggggtacgccgataccgtcgcgcaccacgccggtcaggccgtcgcggacatcctccacgaccgcatgaactataaaagtttcaagaagacagtagcacgattggaagaggctgctgtatcatgccgtgggggtgaaagagttgaattgttgaaacgttggttaggagcattgcaagatgttgatgctgaaaatggaagttcagatttaaaggtgtctgaagctaatgacccttctggtgaaatggacactttgaaagcacaaactgttttgttctatgatgctgatattgatggtgcacctatgaatttttgtgatgtattcttgtacagccaagcacttgaaggtattacattgtccatgattctcgaacctccttctgaggaggaagtttcactgcttttggaaatattcagcatatgccttactggagggaaagaagtgaacaaagaaatcatgagtaatgtacaagacttggccaaggcattttcagaatacaaagatgaagtcctggtgaaacgtgaagagctgcttgagtatgcccaaagtatcatttcaggactgaagagaaatgctgacattgtgagatgctgaaaccctagaattgcagagaaaactagacgagaagcagaaatcacgaggtcaatcacctgaatatcaagataaaacgtcagataagattgctgctgcaaatcttgaggtcttcaaagaagcacttggtgaactccgcttatgctctagagttgaagaacttctgctgaagaagaaatcaatcactcttggtgactccctggagattcattctcagaaggtagataaactaaaggttttagcagattccctggcatgttcatcctccaaagcagaacagcgtattttggagcacaggcgccagaaagaagatgctctcaactttcgtgtgaaaaaagagaatgaagtcagtgtttctgaaaaggaattgcttgatgagattactgaattggaaaagcaaagagatgagcttgaggcacagctgaagaaggttaatatatcactaaatgctgctgctggacggctcaaacaaactagggaagagagggaccaatttgacgaagcaaacaatcaaatcatatttagcttgaaaaaaaaggaggatgacctctcaaaatccattgccttatgtaatgtggaatccaatgttgtcaagatctggatcggtttccttgaggactcgtggaagctgcagtcctcatacaatgaacagaaggataataaaacgtgtgatgagctggagaaatgtgtgagtgattttctaaagttgacaaaacatcatctttcagcattcaaggaagtcctaagccaattgattgagaatatcgaaacatatgtcggtaacttggctgtcttaacctcaagggaagaggaaaaagaacatggggatgatgaggcatctgagaggacagatccacgtaaatcccttgaagaggaatatctagaaacagaaaagaagattataattgcgttcagcatagttgatcacataaagaaattgttttattctggggaaggggctgattcaaggagagatgacccagaggtcaagagcttaattgaggagattgagaaaatgagggaatcgttcgagtctatagaaaggccaacactaagcatagaatctgagaaagcaaaaccactacctgttgagggatcgaaactgagtccttcacctcttcaggctcctgctaccccaaaagctgcacacgttgactcaccaaaatctcccatgaaacctgagcagcatttcgattcagatgcggagcttgcaaccctgggatcagagatcgggaaagaagacaaagagtactcagttgaggagataagcgggtgggagtttgacgagctcgaagaggaccttaagagctgacacaaagaatcgacaaacagaacacaattcgatttggttatcttcactgacatgtattatttgtctgggccttgcgtgggcaagaaatacacactggttgatatgtacatagtgctgtttgattgtgtattgtcgcgcactcgcgctgtcaatttgtcactgtcttaagatatacggactgagctggtgtaacttgggcgaggcatttgctatttgtttgctcttgccgcgaatatttttatcttacatgtataccgaaccctgttgtaacagttgtaaacgcggaaaacaaaattcgaacatttgacagaatttgctccgtagaacattggattgttgggtttgagttttacattgcattcctaatggatgaatctatcaggattcagg

SEQ ID NO: 37343 - DNA, 2584 bp, Zea Mays
accactctgctccactccgccatggccacctccctcctacgcctctctcgccaccgccgcgcgctgctcgccatctcctccgtccgccttgcgctctccacccagccccacgtcccatctccgtccccatcccctaccccctcctccgcccgccgcctcccgcatttcctctccttcctcgccgccgccgccgccgccgccgctgggggagcaaccgtcgcgctctgcgactccggcctagatcaccgggtcgggggcaaggacagcgccgatctggtggttcgtggggagcggaagttcgtgccgcaggagttcatcgacgagctcgcgtccttcctcggggacaacatcactctggactacgaggagaggagcttccatggcacgccacagaacagcttccacaaggcggtcaacctgcctgatgtcgtcgtgttcccgagctcgcaagatgaggtacaaaggattgtgatggcctgtaacaagcacaaggttccaattgtaccatatggtggggctacctcaatagagggtcacacactggcacctcatggtggtgtttgcatcgacatgaccttgatgaagaaaataaaatccctgaatgttgaggatatggacgtagttgttgaacctggagttggatggatagagctgaacgaatacctgaagccctatggcctattttttcctcttgatccaggaaaggtccttgttctttgttcataataaagcctttcaaaatatccatttatcttttcaaggcaccctgttatgaacttttaaatgtaattactcaatgtgcaattgcatctaatttaacttggttgcagttggtaagtcattgttccctattgcatctaatttactcttgatcgaagtatttgtagaatctagtcatagtcagtaactccattttcacttgcttcgatggtttcaaacgtatgccattatcattctctggaaacatcaatagagccttcatcatatttagaagatggtcatgttaaattctgcatgtttatggaagccaaacactcatgctttagctgaaaaaacaatttgatttgcagggcctggggccaccattggaggaatgtgtgctactcgttgttctggttcattagctgtgaggtatggaacaatgcgggataatgtgattaatcttcgggctgttttgccaaatggtgatgttgtcaagacaggctcccgggctcgaaagagtgcagctgggtatgaccttgctcgtttgatcattgggagtgaaggaactttgggtgtaattacagaagtgactttacgactccaaaagcttccatctcattctgtagttgcaatgtgcaatttcaaaacaattaaggatgctgctgatgttgctattgcaacaatgctttctgggatacaggtttcaagagtggaattgttggacgaggttcagataaaggcaataaatatggcaaatggcaaaaatttgcctgaagtgccgaccttgatgtttgaattcatagggacagaagcatatgctctggaacaaactctcttggttcaaaaaattgccactgaacaccatggatcagattttgtttttgtcgaggagccagatgctaaagcggaactatggaagatcaggaaggaggcactttgggctggttttgctatgaaacctgatcatgaagctatgataacggatgtttgtgtccctctatccagacttgctgaatgcatatctacatcaaagcgattgcttgatgcgtcgccattgacttgtctggttattgctcatgctggtgatggaaattttcacacaattatcctgtttgatccaagccaagaggaccaacgaaaggaagcagagagactaaaccatttcatggtccatacagctctgtctatggaaggtacatgcacaggagagcatggtgttggcacagggaaaatgaagtacctggagaaggagttgggcatcgagtcactcaggacgatgaaaagaataaaggcggcgctggatcccaacaacatcatgaatccgggaaagctgatcccgcctcacgtctgcatatgaccgtcacctgactggaggatcgatccccccatggccatcagtgggcttgttggctcactcatcaaaagctttggttccgcgaggcgtgacgcggtgctctgctgacagttgcaataatgcgctgaactgctctgtgcctgtatggcatgcgttggaggcaaatgcacgtaggcgtcacatcaaaactataccggtaccaaaaaaaaaaaaaaaaaactgaactgcctcagggaagggatgggaaataatggagcaaacattcgtctcctgacgccgttttaacaggagaaccctttttacgatcaagtacagcttgacggggccacctagcggtggcgagacggcagcgttctgtactacgcaccacttccgttgccggccgagtcgtcggcacggcacccaccacctcaccaggcggccgcgccacgtccttaccccacgtccccactgtcgcttccggcgatctcgtccggccccgagccgttctcctcgcaaaacgatgctacttccggatcctgattccca

SEQ ID NO: 37344 - DNA, 3118 bp, Zea Mays
gctaaacctgaagaggttggaactggttcagcgaacagttcccccggccccctctgttcccgatttaggaaaattttgtggcgcatgatgcggaagttaggtccctgtctattggcaaaaagtctaggcgtgtgttcatcaccggtggcaatgatcgcaaggtcaaactgtgggccattggcaagcaaactccacttctgaccttgtccggccacacaagtgcggtggaggctgtgcagtttgattcagcagaggtgcttgtgcttgctggctcgtcaaatggttccatcaagctctgggacttggaagaagctaaagttgtgcggtctctcactgggcacaggtcaagttgcactgctgttgaattccatccatttggcgagttttttgcatctggttcgtcagatacagacctgaagatatgggacataaagaaaaaaggatacatacacacatataagggtcacagaggagcaattaaaacaatcaggtttacgcctgatggacgatgggttgtcactggtggggaagataacattgtgaaggtgtgggatttgacagctggaaagcttctacatgatttcaagttccatagtggacaaatcaactgtattgattttcaccctcaagaatttttgcttgcaacaggctctgctgataggacagtgaaattttgggatcttgaaacttttgaattgataggttcttctggacctgaggtattgcaagtttttttcttaaatcaagctggatctggttatgaaatcgataatttgaagaccacaaactatggcttctcaaattctttagcatgcatgttctataggcatgggtaccggtgtacgttctatggtctttcacccagatggtaaaacccttttctgtggattagaccaaagcttaaaggtattctcttgggaaccagtaaggtgccatgatgttgttgacatgggttggagtaatttggctgaccttagtatttatgaagggaaactcttgggatgctcctaccatgagtgccgtgttggtctatgggctgctgatatatcactcattggaccctatgctcttggtgtattgcccaaagcgaatttttttgctgagcttgtgcagtctatggaagataatcctgtgaaaccagttgatagcactgcaaattctcgtcctgcttcagcaatggcacattcaagaagttcatacaaaatcaaggagtctgggattgctcaaagcagggttcgtggctcacatttgactccagcaagtacagataagaccaagaaagataggagcagcactattccacgaagacctgattcgtctttaaagtcatctgttcagagtactaccctgatgaggcgtatgaagcttgttgatagtccttccaccaacacaaaaaatgtggaacgtaatgttgggcagagagacatttcattagcgtctcgtgcagtgatggctaataattctgcaactgctaagaaaagcaatcttacagaatcagctttagtgaaagatatttacactacatctcaggctgtttcagcacctattgttgtgcccagagacattttagaggacaaaacagtaagcaatgttcgtcgagggactggagagacagctgcagtcccagatgattttcggatccctgttcacagaagaaaaccctcacttagtggcagtgctgctgatagtgatagctcatcaagatcagtgttcactgaacctgatgtttgctcagagggtttgtctagcttaaaattctcctttgggctaactccatatcacaagaaagaagaatttggcgatgtggataatgaaggtattgcacaaatagcagaaaagatggaaagaacagtgtcgctggaccattctcagcagttaaatgatgataaatcctttgaatcaccatgctcaacaacagagactgccaaggtcaaatatgttagaggagttgctgtgccactggggaaaacaaagtctcttgttgagagatgggaaaaaagagagacttctagcactgattattcaccacaaactggttcttgtggtgatcgggcatcgagaaatgacaaccatccattccatctggcggaaccaagtacaacatttgaaaaggacctgtcaactgtagatgaagcgatggctcctgtcaatttagtgcggaaccatgatgaattcctaaatgctgtaaaacttcggctgacaaaactagagatgatgcggcatgtctttgaacaaagtggtattaaaggagcaattgctgcagtggcaaagctacctgacaatgctgttcaagcagatgttgttagtgctctcaaaggaaagcttgatcttttcaacctggaatttttctcaaattttctgcctgttcttgctgggttactgtgtagcaagactgaaaggcatgctatggtctctttggaaatgttgttggatcttataaagatttttggaccagtaattcattcagcattatcagcaaatttaggcgttggagttgacattcaggctgagcagaggttgcaacgttgttcacggtgctttaaccatttgcaaaagatccaacagagtctgaatccattgattctgcggggtggtcaaacagcacaacttgcacaagaactaagtctttcattgcaagatttggtggtgatctaggcaagatgatgtacaatgtatacgacagagtagataccattggttttggcgaaaagtgcccacagttgtgtagcttgtaattttgtcatagctttgcaagtgggttttgcaactgtgttttaacattgggctggcattcagcctggtcccctgttgtaaatgtgagcctagccgtgaatgagtctgtaattagccagccacatctgctgtgtgagcagccctgaacaaaaagactagttgaaaggaaacaaccgcaaaggggatcattttggttacaccccaggtggtaggatggctcatgtagcatgcggtgattggcaattccattctttgaaagcatctgtgtttaacgtatattttgtagaagtaaattgagttatgccatagtaacgatgactgattgggctaatatgccttttgtttcttcaactgaccaagaatactaagagtcggctagttttaa

SEQ ID NO: 37345 - DNA, 665 bp, Zea Mays
ggttcgcaccaaattctccatccatagataacaaggctgaccaccctagattaaacttcaaagaccggtacccagagccatacagagattctcatccgactgcccctgttgttgtgccatggatgtcaggatctggagatggtctactggcctatctgtgctgccgcttggcaaccgagcagaaggaacttcagggcttgcttagatacgaagataccagggaagaccagtttctgccaacagcagcggcaccttcttcctcacgccaacgccggccagtttccggcaacagcagcggcacctcaggtttgagggctccatggccatgggaagggatcctcgctgctgccatgggagaagagaagagagggatggctccacagcagcgcaccaaggagagcccgagcagaggagagatggcgtgggggaagagaagggagagggcaggggctgccatttatagggccaagctttggacatgtcagactgcaccaacaggtggcaggtgctgcagtgacgaccttggacgacgtgtttcggcatttttcgcttggaatcggatcttggttgctgcacaaaatatcttccttgatctatactctacaattattgtaaaggacttagagagttatagatccacaaaaattggtttgtcactgggttag

SEQ ID NO: 37346 - DNA, 791 bp, Zea Mays
gtgattgcgtccgcctccttcaaccctatccacatctggcacagaggaaaattggctacggtacaaaacaccgaggcatcgatggactcttccaccagctgacagctatgatttcccctgctcacctcgccttcgccgccgccttcctcctcgtcgtccggtcgtcggcgcctggcgctgctgccgcccgcccgatcttcgatggcaagccatccccctccgaggccaccgccactgcgaggtggctcgccgcccagaacacgtggggtgtcctcagcacaatatcaagtgacttaagtggagctccatttggttgaagatggttgaccttcagtcatctgaagcagatttggccaagtcagcactttttaccaaacatcctgaaatgaaggattggccaaagaatcatcatttcaaaatcttcaaaatggaaatcgaaaacatattcttgattgattggtttgggggtcctaaacccatatccccctcccagtaccttgaatttggaagaaatcagggctcattgatgtactcataagcgaagaatgcttcatcgatcaatatcccgtctgtgtatgctcttctcaaaaatgaaatccatattgcacatattgtaaagacatctctgtgcacggaataaacctgtagtgttattaaaatgaaatccatatggcacatattgtaaagacatctctttgcatagaataaagttttagtgttattattattgattatgttgtttaattatcacatcttcgtgaacaattactttacaaaaaagaagtctacag

SEQ ID NO: 37347 - DNA, 549 bp, Zea Mays
cctctgtctaccgcgcgcgcccgccgctacctgccagccgcacgcccgccgccagcgccccgccgcaaccccgcgcgccggctcgagtacttcgctgtccgctcccattcaactccggcccagctgcgtgctgctccggcaccggcaggcggataagcccagcaggcaagcaggcaggagactaggagaggaggagagctcagcactgcacgcgcgctcccctccccttgttggccaaatcgatcggtccccttcaggcttaaggcttcggagcttgctttacttcagggcggtggcggctggattcatctctctgctcaactttggatgcttggttgcctgattggttggatggccgtgagatatgataatcatataatatggggttgttaagaagaagaagaaaccatcgcgtttcgtgattttgtaatacatactgccatctcacagctagtcactcggtgggctggaaatggagggagtagctaggtggctggtggtgaccgtgacccccctcaatcaagctctcatggtggtggaggcgatgat

SEQ ID NO: 37348 - DNA, 4341 bp, Zea Mays
agagcgcaaaacgtaaccggcgatcgaaaatgaaattcatctgcctacgcccgccggtcgccagagcctggatccctgagggagaggcggagaagcagcagaccaggggctcagcttcatcatttcccaaaatccccaagctagtagacgaagagggtctcattggacgcttcggttcttcaaacaagaggaacatcaccatacttaagaatgtcaatggtatcctgaagccatccaggatgacgcttcttcttgggcctccatcctcagggaagagcacactaatgcgagcactcgctggcaaacttgacaaaaatctcaaggtctctggcagcattacgtattgtggccatccaatttcagaattctatcctgagaggactagcgcgtatgttggtcaatatgatctccacaatgccgagatgactgtaagggagacacttgatttctctaggcggtgcctaggcattggtgccagatatgagatgattacagaacttgctagaagggagcgggatgccggcattaagccagatcctgagattgatgctttcatgaaagctactgcagtacaaggacaggagactaatattataacagatctcactctcaaggtgcttgggctggacatttgtgctgatgttattattggtgatgagatgatcagaggaatttctggcgggcaaaagaaacgtgtgacaactggggagatgctaacagggccagcaacggctttatttatggacgaaatatccactggtttggatagctcgagcacatttcagattgtaaagtttatgaggcatttggtccatgtaatgaatgaaactgtcatgatctctctgctccagccaccgccagagacctacaatctttttgatgacataatcctgctatcagaaggatacatagtgtaccatgggccacgcgagaatatcctggaattctttgagtctgtcggtttccggtgccctgacaggaaaggtgtcgcagactttcttcaagaggttacttccaagaaagaccagcaacaatattggtatcttgatcaggagcaatatcattatgtatctgtacccgactttgcagaacgtttcaaatcattccatgcatgccaacagatgcagaaggagttgcaaataccttttgaaaagtccaaaacccatcctgctgcgttgaccaccaaaaaatatgggctttctagctgggaatcactcaaggcagtgatgtcaagggagcagctattgatgaagcgcaactctttcatctatattttcaaggtcacagtgttgatcatccttgcattcgtgtccatgactgtgtttctcagaacaaagatgccccatgggcaaattgctgatggcaccaaattctttggggccctgacttttggtttaataacgatcatgttcaatgggttcgctgagctacaattgaccataaagaagctaccagttttctacaaacatagggatttcttattcttccctgcatggacctttggagtggcaaacatactcttaaaagttcctatctcgctcgtggaatcagtagtatgggttgttctcacatactatgtgatgggctttgcacctgctgcaggaaggttctttcgtcagtttatagctttctttgccacacaccaaatggcaatggctttatttcggtttcttggtgctgttttgaaaacaatggttgtggccaatacttttgggatgtttgtgctgctcattattttcatttttggaggatttgtcatccgtagaaatgacattaaaccttggtggatctggggttattgggcatcacctatgatgtatagccaaaatgcaatatctatcaacgaattccttgctagtaggtgggctattccaaacaatgacacgactattgatgcaccaacagtaggcaaagcaattcttaaatccaaaggcttgtttactgaagaatggggattttggctttccattggagcccttataggattcattattttgttcaacagtctctacctttgggcccttacatatttaagtcctagtagtggctccaatgccctagtttcagaaggtgaagatgatgtaaatgaaatagcattgaaagaaagaagcagagatgcaagaagcgaagatgaaatatcccaagttgtatacggggatctaggtgcaaacacatgcactaatggagcaacaaacacactagttcagtcacgagtcactttgcctttccagcctctttcactttgctttaaccatgtaaactattacgtcgacatgcctgcggaaatgaaggaacaaggattcacagaaagccgtttacaactgctctctgatatcagtggtgcttttaggccaggggttctaacagcattagttggtgtgagtggagctggaaagaccactttaatggatgtcctggcaggaaggaaaactagtggagccattgaaggagatattaccctgtccggataccccaaaaaacaagaaacttttgcccggattagtggttattgtgaacaaaccgatatccattctccgaatgttactgtatttgaatccatcacgtactctgcatggttgcgtctttcctcggatattgatgatggtacgaaaaagatgtttgtggaggaagtgatggcccttgtagagcttgatgtgttgtgcgacgctcttgtgggtctccctggagttagtgggttatcaactgagcaaagaaaaaggctgacaattgctgtggagctggtagcaaacccttcgatcatcttcatggatgagccaacttctggtcttgatgctcgagctgctgcgattgtcatgcgtacagtaagaaatacggttaacactggacgtactgtggtctgcacaatccatcagccaagcatcgacatatttgagtcttttgatgagctactgcttttgaaacgtggaggtcaggttatttatgctggtgaacttggtcgccactctcacaaattagttgaatattttgaggcgattccaggtgttcaaaagatcacagaaggatataatcctgcaacatgggcgctggaagttagctctcctctatccgaggctcgattgaacatgaattttgctgaaatttatgctaactctgtgctttataggaaaaatcaagagctcatcaaggagttgagtgttccctcaccagactaccaggacctgtcattccctacaaaatattcgcagaatttctacaaccaatgcgccgcgaacttttggaagcaataccgttcctattggaagaatccgccctacaatgctatgcgctacctgatgacatttctcttcggccttgtatttggtacagtgttctggcaaaaaggaaagaacatagattcacagcaagatttatataatctactcggagccacttacgctgctaccttctttctgggggcttcaaatagcatcacggttcagcctgttgtatcaattgagcgagcagtgttctaccgtgagaaggcagcggggatgtactctccattatcctacgcatttgctcagacgtgcgtggaggtgatctacaccatcttacaggggatactgtacacagtcatcatatatgcgacgatcggatacgactggaaagcggataagttcttgtacttcctgtttttcatgaccgcgtgcttcaactacttcgggttgttcggcatgatgttggtagcgtgcactccctccgcattgctcgccaacattctcatcacgtttgctctgcctctttggaacctcttcgctggattcctcatcgttagaccggcaataccaatttggtggaggtggtactactgggcgaaccccgtgtcgtggaccatctacggcgttgttgcgtctcagttcggcgagaaccaaggcgagctttcagttcccggtgggaagcccgtggtggtgaagcagttcttgaaggataatctcggcatccagcatgacttactcggctatgtcgtgctagtccatttcgcctacatcattgcgttcttcttcgttttcggttattccatcaagttcttcaacttccagaaacgttagctgcacctctactctctgctgtctcacacggacggtcatttgtaatctactttctcgtacgtcgaagcaaatgcttgtttgggaagcctgtttgcaagtagccaagtactagtatattctcctctagcatgttccttcaatggaaaatgttaaaaaaagatgacgaatacataaagtgacatctttgtttagatatcggtgtcgtatctgttgtaccgtaataaaaaaattgttgggactgactgacacgtggttaggtgggtccaaacgctcgaaaagggtaaacataggt

SEQ ID NO: 37349 - DNA, 2694 bp, Zea Mays
caattctccacggccagagggagtccaactccgcctccagcactcacgcttcgtctgctgaccctacccatcgcggccgccgccggctcgccgctgctgccaggcgctatgcggccttgctcccgcatactcgcggcgcgtcacttcgtccgcagcttccggttcgatccctcccaaactacctcccccgctgccggatttcgtcggctgaccggagccaacaggccgttcgtgccgaaacctctctttggcattctcctcggaggcttcagatcgaactgtggcgtactgcctgggaaaggggtccccttgggcagcctcggcagcttcctgccggactctgcctaccagctgcacggcgcgcggcttcaacgagatacgagaggtaatgcattctccacatccgccaatgctgtgacagttaagaagccagttggtgacaaggtccagaaagatgcatcaaaaaaggatattgatgaggagattgctgattctcagatattgaaaaaccttgggaagtacttattgttgaatgacagccctgacttccgctttagggttgccttgtcgttggtcctgttagttggtgcaaaggttataaatgttcaagtgcctttcttgtttaagctagctatcgactggcttgcagcccttggtggtgctgaagcttccctggcatcattcactgaaactaatgccaccctattggctctatttgcaagcccagcagctgttctgataggatatggaatcgcacgatcaggagtatcagcctgtacagaactgcgaaacgctgtattttctaaagtgactttgagagcaatccgttcagtatccagaaaggtattttctcacttgcatgagcttgatcttcgatatcatctaagccggcaaactggtgctataaatcgcgtaattgatcgaggaagccgtgcaataaattacatcctcacagtcatggtgtttaatgtcgtgcccacgatactagagattggtatggtgtcaagcatacttgcctacaaatttggttcaacttttgcttggatcacttcagtttcagttgctacttatattgctttcactttggctgtcacacagtggcggactaagttcaggatggccatgaataaagctgataatgcttctagtacggtggcagttgactctcttctcaattatgagactgtgaaatacttcaacaatgaacaatttgaagttgagaagtacgacaaatatttaaggaattatgaggatgctgcattgaagacccaaagtagtcttgcctacctgaactttggccaaaatgttatctttagctcagctttatctacagcaatggttttgagctcatatggaataatgagtggtgctctgactgtgggtgatttggtcatggttaatgggcttttattccagctttcattacctctgaacttccttgggagtgtgtatcgagaatctagacaaagcctcattgacatgaagtcaatgtttcagttgcttgaggtatgtaccagaaaggaagattcttgatggtgccactttcaccgtacctgcaggaaagagtgtggccattgttggaactagcggaagcgggaaatcaactattcttagacttcttttcagattctttgattcgacttcaggatctatacgaattgacgggcaagatatccgaggagtgacactggggagccttcgaaaatgtctaggtgtggtacctcaggacacagtactttttaatgacacgattaagcataatatacagtatgggcggttatcagcaaaagatgaggaggtctttgatgctgcccgacgtgctgctattcatgatacaattatgaacttcccagacaagtatgacaccgtagtaggagaacgaggattgaagttaagcggcggggagaaacaacgagtgtcaatagcccgtgtattcttgaaggagccttccattctgttatgtgatgaagcaactagtgctcttgacagcactactgaagcatcaattttgaattctctgaaatccttatcttccgatcgaacatcaatctttattgctcatcgactcacaactgcaatgcagtgtgatcagataattgttttggaggatgggaaggtagtagaacaaggaccacatgattttcttctgtcacagggtgggcgatacgcagaattgtggtatcagcagaacagcactgacgccatggattctgctgcagctagcgtagaggtttgattgaccatgtttaccttttccttctgcaaggggaaaagaagggaaaacacaatcataaccgtgagagagagggatggagccaacttgtctgccttgtaattagaggtaggttttttggttcgggggggaggggggggggggggggggcataaacgtacagttccattttcaagatagccgggaggattttccccccttttgagattgtatagacgatccctgcatgttatgataaccgtaacgtttctgtagcataagggataaagcccagtaagggcctgtttgtttcgcatggaataaagggtagaataaatctggcttggattcctttaataattactataatttttggagatttagaattaattctggtctgttccagtagaaacgaacgggccctaaatattcagttgcctcaggcgtactaccgtttcaatataaatgctcccatgattgct

SEQ ID NO: 37350 - DNA, 2453 bp, Zea Mays
atggggggtctgtgcgattatgtgggagctgtagcttggacccaatttagatctgtcctcaacttcaacttcaaccctcaagatcagtatttaaaaatcaagatggttaacttcgggaagaaattgatggcagatcaaattccagaatggaaaggatattatatcaattacaagttgatgaagaagaaagttaaacagtatggccagcagctccagcagggggaaaaagatcgtcgtcgggttctgaaggatttctcgaagatgcttgatgatcagatagagaagatcgtcctgtttctgttggaacaacaaggactattggcaagcaggattgagaagttaggaaagcaaagggcaatactacaagagcagccagatatatctggcattgctgagttacgagaagcttatagggaagttggtatcaatctcatcaaacttctcaagttcgttgaccttaatgcaactggcattcggaaaatcttgaagaagtttgataagcgttttggctatagatttactgattactatgtgacaagtagatcgaatcacccttactctcagctgcaacaggtctttaagcatgtgggtgtaggagctgttgtaggagctttgtcacgtaaccttgctgaactccaagaacgtcaaggaagctacttatctatttatgatcagccatcttctgctcttaagctgaccgtttttggttttgatcccctgcaggaccccatcattgatatgataaattcttcagttgataagttgacaaggtcaactaattttcttcgctttttggggcaacatgccatgattgtggatgaggagtctcctagcactgcaggagaggaagaaatagaagatcagaaataccatttcatgtcccttatgctgaacctggtgaacacattcctttacatggtcaacacgtacatcattgtgccaactgcagatgactattcagatgggttctgcaagagctgtcaatcgccgatatattagtgattgtgtccctgcaaggatacgcatgcaagcttcggctggatttgttagcgcaagtgcacttggcatggcctgtgggccagcgctagctggtttacttcagtggaaattcaaggtctacatggttacattcaatcaatcgactctaccgggttgggtgatggcagttgcatggctattgtatttgatttggctatggttctcattcaaagaaccgaaccgtgctaccgaggtgaatgaagccccacaaaatcctgcttctggacaaactgttgatattggacgactagagaatggaattgcacagcctctgctcaaggattccgtggataaacaaaatgaagatgaagacgaagttgatgatattgaagaaactgcagatgattctcgcaaacctgcaacatcaattggctcagcataccgattgcttaccccgtcagtgaaggtccagttgttgatatacttcatgctcaaatacgcaatggagattttgctttcggagtcgagtgttatcaccaatcactatttcagttggaatacaagcgcagtggcaatatttctagcaatcctagggttgacagtccttcctgtaaacgctgttgttggaacatacatcagcaatatgtttgaggacaggcaactcctcatggtgtctcaaattacgttgctagtaggcattatcttcagcttcaaagtcacgagcacatactatgtcgtccagtatgttgtctcagcactggtcacatttgtttctgccgaagttcttgaaggcgtcaacctttccctcctatcgagcgtgatgtcgtcccgcctctcccgtggcacgtacaacggtggtctcctctcgacggaggctgggaccctggccagggtggtcgccgactgcaccatcaccgcggcggggtacctgggcgtggggaagctcctcaacgtcaccctgctaccgtcgctggtgatatgtgttgcgtccatcgcctgcaccttcctgacgtacaactcgcttttctgatggagcttcgcgacgtatttgtgtcgtcatgattcgttccaaatcaaggcagctgggagaccgccgttgccattgcccgaaggggctgttgtgttattatattatatatgtgcgtcgatttgattgctgtaaattgacaaaatgatggcagccactggccttgccctgcaaaattttgatcgcttatgtccgtgacgttgtcaatgctatgttgtgttgacgtgttggtccaaactgtaattatgctactctcgactgatctgatctccgctgcgatgcggttttgagagtggagtcgtacgagagtggatcggcgtttttgtccattgggcttgattggatttatgagataaatagtttgtcggctaattttagtaccttttcgattattagctgaagggctactaaattgtttgttcattagtcatttgagattactgatagg

SEQ ID NO: 37351 - DNA, 480 bp, Zea Mays
tagatgtctagaccccctaccccgaagacaatcagtcgttaaagacaaggctaagtttgtgggcatgccaactaggctttgtttagggtcactcacacacaacgcaacacaacacaagcagcgaagcagcggggcccaaaagaatggaagaaaagattggggctcagcctcaaaagcgtcgaaagcggggcgcggggagggtaaaggaggggggccggccgtggtcgtgcgtggctggctgccctgcccctgtcccgtttctctcgtccgctgccgcgcgtcgtcgccctcctcatctgcgccgccgcccgcccacccatcaaaagcagggcaggcgacgggcggagggaggcgcgagcacttgtccgctgctgccgggagccgcgcgcttgtcacgcggaatttctccttctccctggcggcgagcccttgttgcacgaggcgtgcggctggggttaactgcgttcggttcggttcggt

SEQ ID NO: 37352 - DNA, 1888 bp, Zea Mays
ctcggcctttcgggtctttcgctccccggctcttcgtctccctctcttgccgaatccaagccctaaaccatagggcttgcctggtgcccgggtgggctccccatggcggcaatagaggacgaggagatggagaagaaggtgcagcagtacctgcaccgcaaggggttccgcctcaccgagctcgcgctccacgaggagcgcagtcgcctctccacctccgacgtcgcgcttacccggtaggtttgcccgtcccgcttccctggcctacattgggctgcagctctcgccctggccagtgacggtagcttctctggtaccaggaaatctagtggcctcgtgtgaagtcgaactggtgcgttttatttggctgctcggtgtctgaacctctgtctgcgtgctctcgccttggctgtcgattttactaatttggttgcttggatgtggaccgttggcttagatagtcaattaggtactcatgttgcggattgaagggtataaagttatgccaattcagttttcatgaagatccatgttttacattgctgccagctgccagttacatgccattgttcaggcccgttacggtagcaaccctgattaaaattgtattactatttgaatattgcaataagtttgttctgaaaaaatgaataactttagctacacagttattttgaggaagagtgtgtgggctgtgttgccatcgtaccattttattctatctcctgaatcctgatacaatgccatgtagttctcctgcgtgtttgaggcaaaaaagatactgctaattttcctttagcagtaagtgccatagtttgctgtcttaggttgtttccacatgtatcggatatctgttctttggagaggaagaaatgagctacatgttgcttagatgttaacactatatcgtgaagggaagggacaggtaacagcaaattcaatgtttttctgcctgaaatttttgtgatcatttggaaaacagtgttttctggatgcttgcatgtgatgattggtgaagcaatcggctttgttggttcagtggtgctttattgatattataataatcgaagttcagttgttttgtcattgtctttcactctcccttcgaaatgccataatatacacagattctgaagtggctatattttcacttacaatcttaccatacacatccgttgattgattatattcttcaataacaggtctgacaataatccagcaagataccatgagggatacagcagattaatagcatgggcgtatagttctcttgatcaatataagtgcactgcttgtagataaattgtacttaatattcagccaaagcatatcacgccttcaaactatttctaactgttaccttcaagtgatgcattttatgaatcctctgtgttctatggcacaaatttacttggcagacctcctctccttttatgaatcccatatctgtcatataagcatgattttgcacttgacaacttatgtaattctagtttttcaaaagggcgtttggttgtggcaggcaaactattttatgttgtgatctgattttttaacttacagtcttacgctccattctgttcttaaacttggcaatataattcatatttcttaattcagatattttttgtagcatgaattacttcgcgtcctttacccagtttttatccattgcttcatggatctagtggcagagggacatatgcacaatgctcggtcatttttccatacatttcgggaagctcataaggtgatgcattcaagggatcttcagaagctggaaggcatcctctctccttcacacttggaggaaacggaactggctcgatcttttaggaaaaaataaatttaaaattaaattatgcgagttttgtttcgccacttggac

SEQ ID NO: 37353 - DNA, 1804 bp, Zea Mays
cccaagtcctaatcagtaatcacattcagtaaatcctgtgcagtggtcacacggtcacaccgtgaggtgttggactgttgaactgaggtggtcagcctgtgcaagtcagcaggaggacaccatgaagcttgacgtgaatgcccttcgctacctcgccaaggacgacttccgtgtcctcaccgccgtcgagatgggcatgcgcaaccatgagattgttccagtagaacttattgacaggattgccagattgaagcatggaggcacatacaaagtgctgaggaatcttttgaggaacaagctggtgcatcatggtgccactaaatacgatggatatcggctcacctatctgggatatgacttccttgccatcaagactttggttaatcgaggagtttttgcttcagttggccgccagattggtgttggaaaggagtcagatatatttgaggtagccacagacgatggtacagtacttgccatgaagcttcataggttgggcaggacatcttttagagctgtgaaatctaagcgtgactatctaaggcaccgaaggagctttaattggctgtatctctcacgactcgcagccttgaaggaatttgcctttatgaaggctttaggagatcatggtttccctgttccaactgctgtggattgcaaccggcattgtgtgatcatgtcacttgtgcagggatatcctcttgttcaagtgaaaaagttacaaaatccggatgatgtttttgactcaattcttggtcttatcgttcgtttggctgagcatggactcatacactgtgactttaatgagttcaatatcatgattgacgatgatgaaaaaattacagtgattgactttccgcagatggtgtctgtttctcaccgtaatgcccaaatgttttttgaccgagacattgaatgcatctacaagttctttaacaaaaggttcaatctgaggtcagtgaaaaatgaagaacaagctggatctgaaaatgatgatgaagggaacagcagaccttcctttttgtccgtggaaaagggtgctggttccttggacaaggaactagctgccagtggatttaccaggaaagagaaagtggatatggataagtacatcgaggaagttgttgaagggcatgattccagctcagatgatgataatgatgaggacagttccgatgagcctgattgtgatcttaccccaagtgattcagacgcgcctggaactttttctgaagagcatggaacaagttgtagcggcgagaacagattggaaattcctccctcggatggcaatggagtggttatggcaccgctcgaatctgggatcaagacgttttccatggaagatgatgataacgatgatggctcgtcagaggatgctgatgaagaagaagatgctgagctcacgaaacaattgaacaagcaaaggagaaaagcaatcgcagctgcccatgggcggagaagaccaacgtcatccaggaacgcctacaaggacaagggtaagggcaccatgaactccaagatgcagaggcaggcgtgcaactggtgatggttgagtgcctcttgcggcagtaaatagattaggcgcagggttttgtgtggttgtataaccgtgggaccctttactagaatcaactccggctttatatttttactaggtgagtaatcgtgcgtcgcaacgagaacacataatattacgagaacttatatataaaatgtcgcaacgaaaacatataatattatgagaacttatatacaaaatgtgtgttatactgttatgaaaaaagatttcataactcatttg

SEQ ID NO: 37354 - DNA, 1162 bp, Zea Mays
cggcgatagacccggcatggccaactttctgctctagcgttgtgatccgaaaccatatcactgcatgccatccctagtagaaagcttgtgttgacgatccagcgtgatcttaggatgtgtttgtttgcaggtcagctaggacagggacgtcacctggcgtcctctctcgtccctccaattttgagagacaacaggggataacactgggatagtcctgtcccaacccttaacccagaaccaaacaacctaatttgagtgatcgtcccatcccatctcgtcctgtcattgcaaccaaacgcactcttacacaacagatcaggcgagagcaaagcgtcgttcacacggccacccgggaaagctaacggctgccactgcgctgtccctgtccccgccggccgccgcctcaccgggcgcgcatcgcgccggtggattcgccgtcgaaaccggccggtttcccagccagcccggatcgttcgaggcgcgcaggtcttcgattcgccatgcacgtctctttcctttccggtcgcaagtcatgagaggcaggcaacgtggcggcggcgcgcgcgctcggatccggcggtgggatcgacgagatgtcgatgtcctgaccagaccgccgccgagtccgatccggcacatggcgttagcttctcccgagtgacccgatcaacgggagtactggagggatcggacgacgcgaccacacccggccttttacgcgccgcgcgcgcgtgcggcctccccgcccggcgctcgatcggcgtcagcgcgcgccttcttctctccatcgcggacgctgaaatgcatttggtgccgctggccggaccaccatgcattattcacacgtgcgcgcgagggcagaggcagacaactcatcaccggggcccggccatcatgaccagtgattgaacgaacaaaagaagctatagcttccagtgacacagctagtcaggccacacaccactcttgcattggtgtgtgctgctcggctggtcccagccccacacggccccggctgtgccgtgtgcctaattttctgcagccgcaaaacaacgggcgggcatgcaagtgtaggatcttgcattctcaataccctagctacaaataaagttactatgggggcgtttggttggtttcttgctcatccaaaaacccgtgtttg

SEQ ID NO: 37355 - DNA, 2072 bp, Zea Mays
ggcgaagttgggtacggacagacggttccttagccaagttgctcacgcccgcacgactgctcacaacatgcacgcgtcgtcgtcacgggtgtttccttcccctctcccccctttctcatctcgcggttcttctccaaatctcggagagttttgatcagaaacttcacgtcgcttccatgacgcgtgcagtgcatgagatcggcatggccaactcaactagctaggacggacgacacggagaagaaaacagatcgcgccaacacgcataagatggaaaaaagtcagggtgcagggcccgtttctgttgctcggcacccgtcccatcccacccacctgctcacgacgacaggccagcacgacacggagggaggaagtagccaggccacctcgcctcgcctctactctcccgcggtcccgccccataccatgtccgactacaaccgctacggccacagctacagctacggcggcgggtacggccaagggccagcgccctcggccccgccggcaccgcacatgcccaccgctacatccgccgccccgccctcctcctcctcatacggcgcgtacgccgggtacccgcccgcctaccctccgccgccctcgcaggcggcgggcggattcggtcccgctggctccggctacggcttcgtccccgtcgcgttcccgccggggacgcacccggacgtcgagcgcgccttccgggccgccgaccgcgactgcagcggcgccatcgacgagcgcgagctgcagggagcgctctcctccgcctaccaccgcttcagcgtccgcaccgttcgcctcctcatgttcctcttcaacgacccctcctcctccacgccgtcacggatggggccaacacagttcgtatccctctgggattgccttgggcaatggcggggaatttttgacaggtacgacagggaccggagcggcaaaatcgactcccgtgagctgaccgaggctctccggagccttggatatgctgttccaccttctgtcatcgagcttcttatagcgaattacagcaatggtgtgcccagcaatggcgcgctagactttgacaactttgtggaatgtgggatgattgtgaagggtttaaccgagaaattcaaggagaaggatacgcgctacaccggctcggctactcttacatacgatggtttcttgtcaatggtgatccccttcatcgtcccttagctgtgctgtatgtagttcggtaacttgatagtagtcatcaaccatggttctagtaggagtgctctcccctagtctgtgcgaaaggttttttttttctcttcttcgtttctgagtcttgtctaccttgttcgttttgtacattaataacctcgatttgtttgtttcatgggatttacatcgttttggactatgaaatcttccaaggattgaaagtcatatgccatccttcagtattcctggatgggtccccgttggggctgcattgctaacaattctggcgactcgaatacacattttttggtgcggagcccattcgcagttatacaatatgcaactgcatatttcatccgaagagctagacagtttttggctgaagttgattgatttctgcaaacggccattgaggctgaaggagcgctgggagaagagccaaaccgtgagcagcgaagcgagagccacacctggcggctagaggagctggttaaagaccgaaaatcgatcgagacccaaaaaactgaagacgggagacaccaaatacctgaaaattcggtccttggttttttgtacgagtatatcgatcggtctcaagtctggagacaccgattttcattgcgtctacgaggtaggttgtcgtgcttcgctccacatgctccagcacacttgtgctcgaggacgaagtgtggtggtttgcattcatgctgctttacaagtgtaaatcaaagaaaggtcaagcagagacgatttgtcgtggccagagaccacgcccgtgttagcgcgtgcagtagatcgcacgcagccaacagaaggcccgcatgtacactgtactacgacttgattatgttgagcaccatttatagcacaggtcacgatcg

SEQ ID NO: 37356 - DNA, 2221 bp, Zea Mays
cacctcacaattttccatgggattgattgaggtccagctttttagctggcaggtcttaaggtttcagagtttttcctttcaatttatcaaggactaggccaacaatacatcgcaatgaagtacatgaagctcggttcaaaacctgatacgttctataccgaagaagcagtcagttttgaattgttatggcttgtcacaggtcagtcgtatcagacatacccgccgatctcattatccatgtaaataacaccaagtatcagctacacaagttcccactgctcctcaagtgcggcctcctgcagcgcctctgctccgacaccgacgacggcgatgaggagccggtgcccgtggcgctgcacgacatccctggcggcgagcaggcctttgagctgtgcgccaagttctgctacggcatctccatcagcatcagcgccgggaacctggtgcccgcgatgctggcggcgcgcttcctccggatgacggaggccgtcgccaagggcaacctggtggccaagctcgagaccttcttcgactcctgcgtcctgcagggctggaaggactcggtcgccgcgctgcaggccgcgtggcggatctccggctggaacgagagccgcatcgtacagccctgcatcgactccatcgtcgagaagatcctcctgccaccgtccaaggtcacgtggtcctacacgtacacgaggccagggtacaacagcacgaggaaaccccaccagtccgtccccaaggactggtggacggaggacatctccgacctggacatcgaggtcttccgctccgtcatctccaccgtgcgcgcgtcgcggctgctcccaccgccgctcatcggcgaggcgctgcacgtctacgcgtgcaagcacctcgtcgacccgctccacgttgccagcgacgcaggactgaccgccaacggcgtcctccaccagccgccgcagagctcagacgacggcgaggagaagctggtggccatgcagcgccgcgtgctcgagtccatcgtcaccatggtcccgggcgagccggggtcggtcaccggccgcttcctactaaggctgctgcgggtggccaactacgtcagcgcgtcgtcgtccacgcgcgcgcagctgatccggcaggccggctcccagctcgacgaggccagggcggcggacctgctcatcccgctgccatcggacccgcacgcgtacgacgtcggcacggcggaggccgtgctcgagcacttcctggcccagttccagcggcccgcgccgaccgacgagcggcgtcggatgagcgccgccatggagaaggtcgccaggatcttcgacgagtacctgcggaccatcgcgctggaccgcagcttccctgtcggcaagttcgttgacctcgtcgaatgcttgccggacatcgcccgcagtgaccacgacggcctctactacgccatcgacatctatctcaaggtcagaaagctccaagatcggaacatctgtcatggatttgagttgatggatatattacgatggcgagcaggagcacccggagctgagcaaggcggataagaagcggttgtgccggctgatagactgcaggaagctgtcgccagacgtgcgggcgcaggcgatagccaacgaccggatgccactgcgcaccattgtacagcttctcttcgtcgagcaggagcggaccatcggtgcagccgccggcagccatgctgcttccggtggcgccgcagatcgggcctccgtcggtgttatctcccagctcgcggcgggaaccaaagatgaagaaccagcctcgtctgctggccacaagtcagacgtgcacagaccacgccgggaccatgcccgggtagccgatggagcctctgccatggcgaggtcgctgtcggcgtcaaccaagactccaccggcagcgaggaaggagaggacgccggaggagacggggagcaggatgaggaacaagcagtgaagcccagtgcacaatttgttcatacttgtgattcttgattatattttttttatttcagtgcatcccatttttggtgggagatgtaagaggtagatttttgtaattaaaatggataaggagttaataagtggctacgtgcagtcatgctcatataatctagggtagctcaccgatgaacaaaggttcgtgttcatcacattcttcctccggcagaacttatgtttgcccatgcatcggcagcctacgaaaaatcagccaatttaac

SEQ ID NO: 37357 - DNA, 2569 bp, Zea Mays
ccagactcccagtcacaaaccccaaacccctcacttgtcatcgacctgcgctttgcatccgtttcttcctccgccttcccttccctttgcagtcttgcactccactacccctcgccgcaccgctctcctctcttgacgcaaacctttccacactgctaattaatcgccatttcctcggaggatccggaggcaatggagaaggagagcaagcagggtttcttttcggcgctcaagggggaagtcgtgcgtggtctctcgccaggcagatcccgggggaagtcgctgctgcttccgcgcagccgcaagacggcggccgcggaggaagtggcgccgccagagaagctcgcccagtacgcgccggatccgctcgtcacccactccggcagcctgcggcttgccggcgaggtcctggcgccgctcatggagggcccggacgtcgccgaggacgacacgttcgccgaggattccggacggcgagacgggttcgggcagtgggtccgcggccacctgacccgtgccccgttgatcgccggcggcggcgacgggtctttccggcgctccgacctccgcctcctcctcggcgtcatgggcgcgccgctcgcgcccgtctcggtctccaccgccgagccgctgccgctcgcgcccgtcaagggcgcccccattgaatcctcgtcggcgcagtacatcctgcagcagtacttggcggcgtcgggtggcgccaaggtgctccggtcggcgcggaacgcgtacgcaatggggaaggtgcggatggtggcgtcggagttcgagacggccacgcgcgtggtcaagaaccggggcgccgccgccgccgccgccgtggagcaaggcgggttcgtgctctggcggatgtccccggacatgtggtacgtggagctggccgtcggcggcagcaaggtccgcgccggctgcaacggccgcctcgtctggcgccacacgccgtggctcggcgcccacgccgccaagggtcccgtccgcccgctccgccgagccctccagggtctggatccgctgtcgactgcggggctgttcgcggaggcgcggtgcgtgggcgagaagaaggtgggcgacgaggagtgcttcatcctgaagctgtcggcggacatcatccggcacgtggtgttcgggtacttcagccagcgcacgggcctgctggtgcaggtggaggactcgcacctgacgcgcatccagccgcacgccggcggggacgccgtgtactgggagaccaccatcagctcgttcctggaggactaccgcgcggtggacggcgtggcgatcgcgcacgcggggcggtccgccgtgacgctgttccggttcggcgagacggccatgagccacaccaagacgcgcatggaggaggcgtggaccatccaggaggccgccttcgacgtgccgggcctgtccaccgactgcttcatcccgccggcagacgtccggcgcgactccgactccgtgggcgagccctgcgagctcccgccgcgcggcgccaaggccggcgccgtgcaccccgcgtgcgacgcggtgcactcgcggcggcggcgggatgtggccccggccgatggggagctggcgacaagatctaccggacggtggagatgcgatttctgactgtgggcgacgggactgatcgagcggattcgtatcgtaagagtagcactattactagtagctaggaagaaggcgggggggaattcagcaagcaaacaatttgttcatagtactactagaaaccaaatctctctccaaatactaacgaactccatctcctcctcctaccagtcatcagtgccttgtattctgtacagatcggtgaggaagcgcctcggcgacaatgttgagctcatcaattgtactgtactccagttctagctgtatgaccgtaagaatcgcaagaatttacggtgcacaagtataccaccagattctggatatgagacgatggaactggatacttgttgcaattctacgtcacgtcttactgtgtaggcgccaggatgatcttcaagctgggtggtaaaagtggtaggtgaggtatgtcttgctgtcgacctccgtttcgtttccattccatggctttgggccttttgttttttgcttagaaactactccctccgtctccgttgcttatgaaatagacgggtcttttgttccttttggcacctatcatgtttgaccatttgtctttgtgggagggcgaatccctcggctgagtggcgagagtgtacacactccctcggaggaggagtaggcttaggcgtttgtctcgccttaggctgtctccagcagcgtcccctaaatttcgtcccctaaaggaatattccctgtactttataagacactctaaaagattctgtcctctatatcttctgtgtctccagcaacgtcccctaaattcgatcccctaaagctacagtgttaacagaattcgttttttcttttctttttctgttttctttgttttgtacccatttaatggtactgaaaggatgctaaaaattttgtaatcaataaaatttcaaataataatctaaaaactatggttcattaataa

SEQ ID NO: 37358 - DNA, 596 bp, Zea Mays
attagtttgtaccaaagactggaatcttgcatctaacaaagatcgcaatgacaaggtaccgtcaattgttgaggagttcatggcagatgaaaatgaatatagctcggcaattgaagagggacagaaccaagctgacaatgaaggaaatggtgaggatagtgaggatgagggcagcgatatggagttatgatttttctgcagctgttcatgggagtctgtttcacaagtttcagtgctccgaagcctaagatgatgcttaaatcttggttttcgacattttggcgctagctggtagctgctacacttaatccttaatgtagtaatgacaatgtagttctagtttggagaggtatgtactattgtgacattttggcgctagctggtagctgctacgacattttggctgctagctggtagctggtagctagttctattgtgatatgtacgcagtacagtacttagcatttagcaatgctgatggctcacgctcatgactgcttgcctatttacttagctttatctgtctattagcctgatcggttgtgacatttgaatctggatgctatatatgaatgaatgatgtgtctttatatccg

SEQ ID NO: 37359 - DNA, 3259 bp, Zea Mays
atggctacaggcgatgcgcgtgattcaagccccagcccagcaaccatttcagcagaacgctccaccgcttctccgaaaaggcaaaaaccccacagctcgagcgccgcgccggaagcctgcgcccccgaaaccacgagcgtaaaccctcctagtccggcggtgatggccggcgtcggtggcagcggcggtggaggtggggacgacgcggagatgggcggttggacggggcttctccactcctccacgaagctcctcgagcaggcggcgccaaccccgcacttccctccccttcagaggaatctggaccagctcgaggcgctctccaccaagctcaaggccaagaccatccgctctgaggctccgtcacagtcgctctccgccaccagattgttagcacgcgaggggatcaatgctgagcagctcgccagggacctcaagtcattcgaactcaagactacctttgaggatgtttttccatctgaagcaactactgttgaggagtacttgcagcagcttcatgaaatggccattgtttcatccatccaagaagctcagaaggacaatttgaagagttttaacaactatatgatgcaagttcttgaggatgactggcagaaagagaagagagacttcttgcagagtctaagccggctttctacattacccaagagaaacactaatctctcgaccagtgggttgggtcgccctgcttcaatgccaccatcaacttccagtcttcatgctccatcaggcctgccttctgctgaagtcatgcctataccgaacaagactattattgaaaaaaaatcttcagtttatgctggggttgtgagggacctcaatgattctagagggcgcagtctaccttttaatcctgctacggcttttagggctgcttatgaatccttgtctattgatgccattggcacaaagtcagtgagtatgcagaaagtgtggcatctaattcaggcattggttggggaagggttgactcatcgaaatgtttcaagaaaaatgtcactagtggtaggtgcaaggcaccatcttgagtggggtcatgaaaagtacatacttgagaccatcaacagccatccagctcttgctgcccttggtggatctgttggcaatcttcagaagatccgagcatttcttcgggtaaggctgcgggatcaaggtgtgctagactttgacgcaaccgatctacgcagacagcctccagtggatacaacctggcagcagatttacttctgcttgagaaccggatactatgatgaagcaagacaagttgcccaatcatctcgtactgcatataacttcgctcccctgcttgcagattggatttctactaatggtgctgtatcaccagagactgctctggcagcttctgaggaatgtgataaaatgctcagaatgggtgatcggccagggcgtcctggctacgacaggaagaagttactgctttatgccataatttgtggttgtcggcggcaaattgaaagaatgctaaaagacctaccaacactttttaacactatagaggatttcttgtggtttaagctgtcagctctgcgggaatacaccaatgcatcttcttctaatcttatgaatgaaggcttggtgccttatacgctggatgacctgcaaagttacttgaataaatttgagccatcatattatacaaagaatggaaaagatcccctagtctatccctacattctgttcttaagcatccaattactcccagcaattctttatttgtctaaagaagttggagaggatggataccatgttgatgctgtgcatatttcaattgctttagctgaccatagtgttctccctgacggtattgggtcaggccagaaaattggcgtcatggatgcctgtgcagaggctgcaagcataatacgacagtatggctctatatacttgcgtaatggtaacattgatctagccttggagtattatgcacaagctgctgctgccatgggtggaggtgaggcatcgtggattggtgaagggcatgctgataagcagcgacaacgaagtttgatgttgaagcaactactgatggagatattgctaagggatggtggtattcaacttttgcttggtccaagtggaatgggagaagaaggagagctgaaaaagtatatgatggattggagaagtaggcagcaattcttacttgaagctgcccatcggtgtcaagaggctgggctctatgacaaagctgtggaaattcacaaaagagtaggagcctttgccatggctcttcagacaataaacaagtgcttgtctgatgcagtctgtgccatggcacggagtatgttagatggcgagagtcgtgctgctgccctaattcattctggcaatgaaattttggagacagctagatactcttctgaagccagcattcaagagaaggacctcatttctgagcaacaaactgtgctgagacagcttgaagctattctccatatttataggctagctcgagctgggcaaactgtagatgctttgagggaaaccatcaggctacccttccttcatttggaccccaaggctccaaatgtgactgttgacattttcaggaacttgtcaccccatgttcaagcttgcgtgccagatctcctgaaggttgctctaaattgcattgacaatgttagagatactgatgggaccttgcgcgctgtcaaatcaaagatcgcaaaccttgtagcaagcaacatgagccggaattggccacaggatttgtatcagaaggtggcacagtgcatatgaagtggcttgtgttttgagttgatcaggaatctggactaatctgtatcagaactctgaagctttcaaacaatatgaatccttaggccttattcggttgccgatcaatcaaggggggttgaaggggcttgaggcggaatctctagcaagtcaaaatctttcctaatcccctctaacctcatagaatggggaataaccgaatgaagccttaagatcttaaggggcatattggtccagtgcacatgcgtcgacaaggacctttgccagctgttggcaacttggcatctccgcctgattgcaggagtgcacggagccagataaacatttgtagcctgtatgtaagttactgttggaaatgtctttgaagacttgtattgtacgagagcatcactgtttgttacggaacatcagcattacttgaggaatcgcgaactccgtatgtttattcgaatggtaaagtctcgtggtacagtttaatgga

SEQ ID NO: 37360 - DNA, 1388 bp, Zea Mays
gcagatgcccgctagtccctcgctttctctcttccacccgctcctcacgccgccacagcgccactgctccttcggcctagttgaggagagatacatccatcctggcctggattggctggtgctggtccttctgctggttcttcagttgccaaggccatatccctggtacctgattgactagtcgctgcttattgtcataaagctttttggagggtttgctggttgctgccatgacaagtccacctagggtgagcatggagatcactgatgaggtggtcaagagcatgaagatagggttggtctttcaaggctataatggcagaatttgttctatggactttcacagcaaggctaccaactatctcgtgacagctagcgatgatgaatcaatccgtttatacgatacccaagatgcaggtgtttgaatactattaatagcaaaaaatatggggttggacttgtgtgcttcactgataacccatctattgtcttatattcatcgaacaatggctgggatgaatctctgcgtctgctctcaatgaatgataaccggtttattagatattataaaggtcaccttgatagggttgtctgcatcgcactttgctctggaaaagaaaactttctctcatgttcgcttgatcgtaccattctcttatgggaccatcgggctgaaaaaccgcagggcttactgcgcgcgcaaaggaggcctacagtttcgtacgacgcccagggcatggtatttgctgtcgcctatggtggccgcataaagatgtttgatattcggaaattcggaatggggccttttgcgaccttctctgtcggcactgatgattcggaagcccatgtcgtacagttcagcggtgatggcaggcggattctgttaaccactaaagctgggcgtgttcatgtgctagattcttttgaaggcaacagcattgcatcgtttcgcgcgaagccaatattaaccaattcgacactggaggcatcgttctgtcccgagggaaaccatatcgtatctggctccggtgatggtagtgtctatgcttggaacgttgagagcggaaaggttgcatgctgggaaagcacagatgtgaaaccgccgcgggtaaggtggtctccaggatccttgatgttcgtgacaggaacgtcggagctgtcctgctgggtgccggatttgtccaagctggagtccttcaccatcagccacaccaacaccaggtccagctcgtccctgtaggcttggaccgatttgcatgccgtgtggccggttgacgcgaaggaggaacaagaaagcatagcggagcatcttgtaccaattgagtttgtgatctgttcctgatggcccggtaagctactattgcaacgattgtggtctgcggcaacgg

SEQ ID NO: 37361 - DNA, 485 bp, Zea Mays
gcagcgctgacgaccgcggcgtcggagactagcgtgcatcccgtctcctcgtctgctctgttcgtctccacagcttgtacaggtcgctgaaacacttggaacaaacagagcttgcttctgaagccctacacctctgaaggatcaggtatcatcaacgaatgtatcaagtaaatttacctgacactcctcgacatcgacgaaacatcttctgatcagttcattcctaactattaaaggaagtttacgctcttccatctactgcaaaattcaattggaaggatatctattgtagaattaatttagaaagactgcatgtacttctagaataggtacgagtttttatttcagacaacacactcacttctatgtttcttcaatgtgttactcaactaaacataccaagaaaaaatgatgatattgccatatatttatgtatgttgttgtattaaactgtggaagcatagatgattagcatcgccaatgcc

SEQ ID NO: 37362 - DNA, 2517 bp, Zea Mays
cacttgcttgctccctctcttctccccttcgtccaggcgccggatctgacacctctcccaccaccaagcttggctgcgctgccgcgcctcgcagatcccgatctccccatgcctcctcgcccccgctgaccccactgcggctgccgacagccacgatggcgtcgcgcccgcccctccgcactacctccgtcgcctccgtcttttcctccaccgactcctccacttccaccggcccccccggtggcgtcccgcagtccatcaccgcgctcctcaacaacccgctcccctcctccgccgcctcctcgtactcctggttgtcgtggccgcccaccaccataacgctacccgatgcggctccaccgccgccgtcgcacccctgcgagatcacccgcgccgacttcgcaccctaccttgccgccgtctccgaccccttcgcgcgcttcgccgacatccgcctccatgcccacgccgagcttgccgcctcttctgacgccgagggcgcccccgcggcctcctccggcctcgccgcctgtctccgtgaggtgcccgcgctcttctttaaggaggacttcgcgctcgaagacgggcccaccttccaggccgcctgcccgctcgacgacgatgcgctgcaggagcgcctcggacagcacctcgacgtcgttgaggcccaccttgtgcgggagatagcactccggtctgagtccttctatgaggcgcagggccggctgcgcgggcttgatggggagatcgtcacggcggtagggaggatccgcgagctcagagaggtggtccaggttctcacgggggacctcgtcggggcagcgaggcaggtgcaagagctcaatgctacccgaggcaaccttgtggcgctgcagcagaagctcactgtcatcctctatgttagccaggcgcttaccgcgctgaagctgcttgttgcagctgcagattgtgctggtgcactcgatgtcatcgataacttgcaaaatctgctagatactgatgaacttgctgggctttattgctttcggcatattcgagatcagctgggaacatcactagattccgtgaacagaatttgtgcatgctgctgttcctgatggaaaagctgtagatgctatgattttatcaactgtgaaaagaaaggcttcgagcccattgaatgggacagaccatgagggtaacatagacgaggaggaaagttttattctcagggaccggctcctccccctcattatttgcctactgagaacggacaaatttcctgcagttctcagaatttaccgggatacacttataactgttatgaaagcttcaatcaaagcaacagtagcggaattactccctgttttaactgccagaccaatagattctgattcagtaactggaggcagagctaccgatgctgacgctggaggccagtccttggcaaataagttgcggagtctttcatctgaaggatttgttcaacttttatctgccattttcaggatagtacaggtacatttacagcaagcagctgaagtgaaaagaatagttgagtggatcatgggaaaccttgatgaaacattaagtattgatgctagtaatcctacattacaacatggtggttcagttatttatgatacccaagagaatgactcttcacggggctctaatactcttgcacggagtacttccaagatcccatttgtccaaggaaaaataaatgatttttccattataagttcaataaagaatgttcgggctgatgtcttgagagaaaacactgaagcagttttcgcggcttgtgatgctgcccatggacgatgggctaagctactaggtgttcgtgctggattacatcccaggttaaggcttgaagaattcttgatcatctacagcataacagaagaatttatagctgctacagaaaagattggaggcaggttgggttacaacattcgtggaatcctacaacaacaatcaaagcaatttgttgattatcagcataatgttcggatgacaaaaatcaaggcagttcttgaccaagagacgtgggttgctgtggatgttcctgaagagtttcaagcaatcgttctttcactttcatccacttactcttctgttaatggcatggagatgcctagcactgatgataactcaaagttcagtgatcatcagcctacaagtcaagaactgacatattctgctgaaaataatgctgataatggcaaagtaacatccgggactggtgaaaaccaggttgaatccacttctcagagtgcaaataatgttgccgggaatctgaaatccaccttgcaaacaattgtacatggaggtgttggctatcatatggtaaactgcggtttgatactgttgaagatgttatctgaatatgttgacatcagtaaatgtttaccatcactatctttggaggtggtccaacgtgttgtggaaatattgaagcttttcaacactaggacttgccaacttgttctcggtgcaggggccatgcagaacctgagctgcatacattga

SEQ ID NO: 37363 - DNA, 276 bp, Zea Mays
attggagacgttttcccttctaataacctagttacatttacgaaacctgactaagtctgttggagttgatcattcaaacgagctcttcaaaacactcacctacgttagcacatgcggttgttataaagatttagtccgtccgctgatgttcccgtttgtccatcctagacgtaacaagtttcgtgcgccatgatgcttgagatagacggaagatcgccgacgttacctaaacacataatagccgacgaccagtcaaccacagatacactatccctg

SEQ ID NO: 37364 - DNA, 4041 bp, Zea Mays
ggttctttctccaccccgatgcccctccccctcccccgtgtgatcccctctccagatcgatgtctgccccggccgtaacccccgcggctcaccgcacgaaaccgccgcgagatcttggagctcagcctctgacgatggctacgactacctcgccaacctccgcgagctctgtccccctccctctcctccaccggcggcgggggatccttggccatgttcctcccgaggcgccggtccacgcgcttcggcctccgcgtggtcatcaagcctttctgatggctcggaacagaggtcagctatgcgatgtggcgtggcgaggttaccgcgggcgccgcggaggtggagggggaaggggaggacgagggcacgggcaagagagcgcatcgctgtggacggtctcgtgagagggaccttgggtgatccgggtgcttggtttcttggttctacggctttcgctgctgttggatttgccgagccggagccgacggagatgaccgtcgacgagctgaagctgcaggcaagggccagcggcggccacgacctaaggaccagttccccgtcggcatgcgcgtgctcgccgtcgacgacgacccgacctgcctcaaggtcctcgagaacctcttgttccgctgccagtaccatgtgacaacaatgggccaggcagccactgccctgagctgctgagggagaagaaggaccagtttgaccctgtgatcagcaacgtccacatgccggacatggacggcttcaagctcctcgagcttgtgggcctcgagatggaccttccggggattagtgaagcggcagaagaagagcttttacatacccttacaatgctgattttgatggagatgaaatgaatttgcatgtccctcggacggaggaagctcgcactgaagcgcttaattctcataggggttcaaaataatttatgtactcctaagaatgtgatgggggatacttcaatgcaataatgagcttcccacaaaattacccaaacagcccaccatcagtcagatttacctctgaaatgtggcatccaaatgtctaacctgatgggcgggtttgtatctctattcttcatccacccagtgaagatccaaacggttatgagctcgcaagtgagcgatggacacctgtgcacacagtatggcttcgtatactttgtttacatatcttttccccattgtaatgttactcatctcccttttatgtgtatactttttagagagaaaattaccttgtagtctcattgtttcagtttatggtccaatttacaatggcttcactgtaaatgggaaaacaactcggtaggaatgcttttttgaattataaattatttctatttcatacgatgcttataggtatgtgatgagtcctccaatctgagaagtagagcatggtaaagcactccaagctgctctttcatcgggaaatttataggtgacacttgtgtcatacattgaactatggagtcaaacaaattacatattatccttcaacatttttcaccagtgggaactgtagttattgcgtagaatagatggtatattaatcgttgagagccaatgtttacattaactgttatgcagaagacaatttatgttttattttatatctaactgtactttgttgcagcttgtaggtactgatcacagcacattcaactccacacagattgtccatgtttctttcagtcaccatgatttatcactaggtcattgtgtttgtggccaacgagtattgttctaacagttatgttcccatagctagctagattcattgttgtgttttgttcagggtactttcaccacttctggtatggttctgtctgtaatgtgccagggattattatattgtttttggtttggatttggaatggtttggggtccacaacgatgatgcgtcagagctgttccaaggattggatgatttccattcccctgctgccaattcgactaggctcgccgtctccgctctgcccaactggcaccaagcagccaatggaacttgagcagccaatggatgatttccattcccctgctgccaattctccgaactgctttgacccttcaactcaatccgcatgtacccagcctattgtggcagcaaacagcgactgggtgcggaagccggaagggagaggcgcttggttgacccagaacggacgacaagacaccgccgggggttcgctgcaaccgcacgcgtggtggccggtgtgggaaggagcccactgctcaagcagcgacgacttccgtaacttctcaggccaagttgtagggagggagggcagcaaagaaagcaagcaagaaagaagccgattccactggtggttaaggttttggattaaaggagagaggtgcagagaaaaaaaggttgcaactccctgggccaagcagtagcccagcaagttcagcaccaatggcagccatatgaaatataaggcaaagcagataaaaagcttaatttttttcaataaggtaaaggcaatgacagaaaagtgaggagggtcagaggtgtacagataaggatgagggctgaaaagaggagcaggaagggcatgatgaaatcagtgtttgctatttagcctccttcacaactaagatcatcctacataatagatttagacaacaaaaacttatggagtttgctgaaatgccctttcaggcatgctccatctgtgctacaaggttatgggcttcctgcttgctgccagcagtcttttggtgcttttatattgctattaatttgtttgaaatttattatggtgatgactgggaaggtctttttgaggctattactggttatggccttggtggctctttggccgtgttggtggtggtatttataccaaggctgctgatgttggtgccgaccttgtggggaaggtagaaagaaacattcctgaggacgatccaagaaacccagctgtcattgctgacaatgttggtgataatgttggagatattgttggaatgggatcatatctctttggctcatatgctgaatcgtcatgtgctgctcttgttgtggcctcgatctcgtcttttggaatcaaccatcaatttactccaatggtgtatccccttcttgtcagctctgttggtattatagcatgtctcataacaacgctgtttgcaactgatttcttcgagataaaggctgtgagtgaaatagagcctgctctcaagaaacaacttataatatccactgttgtgatgaccattggcattgcgctcatgttggcttggtcttccatacaccttcaccatttataactttggagcccagaagacagtgcaaagctggcaattgttcttgtgtgtggcggttggtctctgggctggcttagtcattggttttattactgagtactacacaagcaatgcctacagccctgtataagatgttgctgattcctgcagaactggagctgccactaatgtcatttttgggcttgctctgggttacaaatcagtcattatcccaatttttgctattgcgtttagtatcttccttagcttcagccttgctgccatgtatggtgttgttgtggctgctcttggaatgctgagtaccattgccacagaccttgctattgatgcctatggccctatcagtgataatgctggaagcttaagtctgtatgggtgcatcttatcatttatatgtatatctgaaagcttaagtatttttttaaatagaagatgtctggaaactttagtaacgacatgagtttcaggctttcagctatagcagtcttattcgcttttaagacagagaagatttttatttagagtttagaaagagtaggtgctatggcagtcttattcgcttttaagacagagaagcttaagtattttttgaatagaagatgtctggaaactttagtaacgacatgagttaatcagaagagatggaagggtagtttatcaacatgtatttggcacttcgccgaaaatgtcacttggactatcttgcaaactgaattttcagattggcttcttctgtctgaacattcagttcagtcttgcaggattt

SEQ ID NO: 37365 - DNA, 2896 bp, Zea Mays
ggatttgggagaggaatggtgggagatagcgccgtaccccgtggtcagccgccagtgtttcgcactttgctattcagcttcgttcttcaccggttcaccctagccgccaccccaacccccagcgacagggaccttcgccgccaggccgcccccaatccctagcgactgcgagcaccgtcgccaggcgccgtgcagcgagcgtcgccgcctggcgaagtcgcgcgactcgtgccctgcagcgagcgccgctgtcccgcacccaccgtcgaacggctgccgatgcccaacgccctgcagcgagttgcgccgtcgtccgcttcctctcgctggtaacctcgtgtttcgatttggacagattgctcgtgacttggtgttgcgccgccgaccgagcctccttcccctaagtccctaaccgtaagtcctaaatcttggcctaccctagtccaccacctgccgcagctctcgcctccgtcaagatccgaacccctcgcacgcggcacgaccaaatcctagacacctgatcccaatgcgcagggccctcggcagagagacgttactgcgccggcaccgtggatcggcactgctgtggctagctgtaacggcactggtcacaggcaccatctgcctctggtcgtccttctccgttggcctcctcagcacctacagggtccaggatgttgttgcaaatgagttgtggagaaccgtagattcaaatggttggagagcatcttctgcaccacgcatctgttggcctcccccaccagctgaatctgagagcaatgggtacttgcgtgtctggtgcaacggcggcttgacccaacaacgcagtgcaatatgtaatgctgttgtcgtagcacgaatcatgaatgctacactagtgctgccagagttagacacaaattcattttggcacgatgagagtggttttgtagatatatatgatgttccccacttcatcaacacattgaaatatgatgttcgaattgtcatgagcattccaaaaatcactgcacaaggaaagaccaagaagctcaaagcatataagattttacctcctagagatgcacccgttacttggtacagaacaactgctttggagagactaaggaagtatggtgcaatatatttaactccattttcacaccgtttggcagaaaaaattgatgatccagagttccagagattgagatgcagggtgaattatcacgcactacgatttaagccaagtatcatgaaaacaagtagtgatatagcgaataagctccattcagaaggccatttcatgtcaattcatcttcggtttgagctggatgtgcttgcatatgctgggtgcttcgacatattcacacctgaagaacaggaaatcctgttgaggcatcggaacaaatattttccattgctgttgaggtattggggcaaatattttccaggaaacacacctgactacagggaaagaaggctcattggaaagtgccctttaactccagaagaggtaggtcttattctacgtgctacgggatttgataactcaacatggatttaccttgctcctggcaagctctttggtgggaaacacttcatgaagccattcaaggctatgtttccacgtcttaaaaaccatagtatgatcagaagtggaaagctggaagaaaatatccgagggctagcagggtcagcagttgattacatggtctgtctcctgtcggacatttttatatatgatggtccgagcaacttcgcagacaatctcatgggtcatcgtctatactatggtttccgaaccacgatcacaccaaacaagaaggcccttgctcggatattcatggacagggaggaagggcacacatctgcatttgaggagagggtcaggcaggtcatgctcacccattttggcgccccccacaagcgcatccatccagagtctttctacacaaacccatggccagagtgcttctgccagacgaaagctaggaatcatgctgaccggtgcccacacaacagtgtaaatgatgtccttgaaagttggttccataataaagaagatgtagaagtggaagctactaatcaaactgactccaccagctaaaccgagagttggctggtggaactgagttatcaaaggtttattgattgagaacagattgtttgtcacagacctgcgaatgacatcattggaggaaggattgatggctccagatctctgtaggcgattatgttcgactcaagatttagttgttgagattcttagtctgggagggtcagaaccagattttggataggtttacattgtcatgtagagttctgtggaagaaaaatcatacgaacgtcatgaactatgtggctactacaattggagatctttaccccatatgctatagctgagtgtttggtggcttcagttctgttggagttatttgctgttcctcactatacatatctggttgaattcatgcgttcctggtcctggaactggaacttccccagttttgatttttgcaattcaccgtaatgctaaaaagtcgactatctccaggctccctatcccactccctatttcaaagttctctctgcaacaatacatctatagtgcaaaacagtgttatacacgcctgcatgcacgacgttgctggagttggcctaattccgggttgctggagttggcctaattccgggctccttcgaggtccatggcagcatgtaactgtattgatttgttctccttgtttgtagcctcacacttggttgaatatttcgaaaaatctagaattccaatattttttcttatttttattttgtttttttagtttctttagaaagagataacagtcctttgtacttgtatatatgtacacaacacatattaatgcaaaccatgtattgtgtcagtcgtttgaac

SEQ ID NO: 37366 - DNA, 1626 bp, Zea Mays
caaacacaccttagttccttgttttttgtaagtctgcaagtacctattatcaaccatgtttggacgcatgccaaggaagagtagtaacaataccaagtattacgaggttcttggtgtgtctaagaccgcaagtcaggatgagcttaagaaagcatacagaaaagctgccataaaaaaccatcctgataagggtggagaccctgagaagtgacccggagaagagggagatctatgaccagtatggagaagatgcccttaaggaaggaatgggaggaggcagcagcagtgatttccatagccctttcgacatttttgagcaactttttccgggttctagcacctttgggggtggtagctcaagaggacgcagacaaaagcgtggtgaagatgtggtgcatactatgaaggtttccttagacgatctgtacaatgggacaaccaagaaactatctttatcgcggagtgctttgtgctccaagtgcaaggggaaaggatccaagagtggggcatcaggaacatgccatggttgtcgtggtgctggaatgagaacaatcacaagacagataggccttggcatgatccaacagatgaacactgtttgccctgaatgcaaaggatcaggtgagatcataagtgacaaggacaaatgcccaagctgtaaaggaaacaaggtagtccaggagaagaaggtgttagaggttcatgtggagaaaggaatgcaacataaccaaaagattgtattccagggtcaagctgatgaagctcctgatacggttacaggagacattgtttttgtcttgcaacttaaagaccatccaaaatttaagaggatgtacgatgacttatatgttgagcacacaatctctctcaccgaagcattgtgtggcttccagtttgttcttactcatcttgatgggcgacagcttctgatcaaatctgaccccggggaggttattaaaccaggtcaacacaaggccattaacgatgaaggtatgcctcagcatggccgtcctttcatgaagggccgtctgtttgttgaattcaacgtggtgtttcccgagcctggtgcgctctcccctgcccagtgccgatcgttggagaagatccttccgccgaaaccagggagccaactgtcggacatggagctggaccagtgcgaggagaccacccttcacgatgtcaacattgaagaggagatgaggcgcaggcagcagcagaagaagcaggaagcctacgatgaagacgaggaggaggatgctcaaccaagggtgcaatgtgcccagcagtaaaatccgtgttcgttggaactgttctccaaaagtttcagcaggattttttatccatctgatcatctcgattctttttggcaaaaatataatcgttttataaactttaaactgttagttccatcctagtgtcagggaaaaaatgagagcccggaatggcatgttccttgtttgaactgcaatgcgtgattggtgttagttaagctctgctccatgttattttgttgtacccgtgaaaaaggtatcatgttcatggtgtgctactatttttgatgtgtaagaaacattgagcttgctggtagtgatgatttgtgatgcaccctggggtgctggctcaaaa

SEQ ID NO: 37367 - DNA, 261 bp, Zea Mays
gtgcgcatatacattgctacctctacattttgcatttgaatgaagtgatctctggcaaattaaataactgcaatttatacgacactgttttattgctatatcatgcatatagtaataatgtttgtactattgtattcttcatccatgacaccatgacaatttttagttcttaggttggaatagcaatcctatttgaggaatggtcttgcttttttgctgatgactagctccaattttttcccactgcagacaagcctaagg

SEQ ID NO: 37368 - DNA, 1488 bp, Zea Mays
gcaaaacacgtcgtcgcgaacttcgcgcttcctcccgccggctcctccccccgcctccgctctcaccgcggccggccagccatggagcaaggccaggggccgccgccgccgaagccgcctgcgacggagcgcgacatcggattcgccgagcgggccgtggcggcggcaggcgcggccgtcgtgtcagccgtcctcgtcaaccccctcgacgtcgccaagacgaggttgcaagcacaagctgctggagttgtttataacccggtgctatccatcatgcagcactggtggaatcaatggtttaggcccatgctcgtcctgcagtcctgaatgctttcagtacagaggaactatggatgtgttctctaaagtcactagacaggaaggaatttttagactatggagaggtactggtgcaagcctggcattggctgtaccaacggttggaatatatctgcctagttacgatttattgcgcaattggattgaagaatactcggaccgcaattgtcccaagcttagaccatatgctcctcttatttctggctctattgcacgatcattggcatgcataacttgttgccctattgagttagcaagaacacgtatgcaggccttcaaagaatcaaatgttggagggaagccccctggaatgtggaagaccttgataggtgtgctttcatcaagacagagcatcaagagccctgaaaacgtgcgaggataccacctcctatggactggtctgggagcgcaactagcacgcgatgcgccctactcagctatatgctggacagttcttgaaccaattagacgacatgtgacacgactattcggtgatcaaagcaacgcgacagttatattgggggcgaacttttctgcaggctttattgctggggttatctctgcgggcgctacctgccctcttgatgttgccaagacacgcagacaaatagagaaggatcctgaaagggtattgagcatgaacacaaggcgcatattgcttgaggtttggaggaaggaaggtgtggaaggtctgttcagaggcgcaggccctcgaatggggcgcgcaggcccgtcggtgggcatcgtcgtctcctcctacgaagttgtgaagcacctcatgcacaagaacacgagcaatgcagcagacctatgattcgatgagctcgattagcacgccctaatggcacaagtaggattaggaatgtcgctattcaaagaaacacatttttttacggtagtccatgacagataaatgttatccctccattccattacaaactgttacttctaagatgggtttttatgcatctagtggctagcttataacctgagttatatcgcaacgagatctacgtatctagccacgtatgtagtggctaggattttatgtacaagtggcaaaggtttatgttctaacagattgctcaacacatgagtcgcacactatgtaattaaaattaaggtggtgaaccgaaatataacgtaaat

SEQ ID NO: 37369 - DNA, 3070 bp, Zea Mays
gagggtggtcatccccatttctcctcgaacccccaggtcccccacacaacgcagatacggacactctcctactccgccctccccctgcgccccgcgcagcgcacgcccagcccagtccagccggaggagaccagatcaaagcgccaccgccacgccgtactctagctaatcccgccgccgcgccggggtcgcgaggaggaggatgaagcccaagagcctcccgttcatcgccttcgagcacaagcgggatgcatacggctttgctgtgcggccgcaacacctgcaacgttacaaggagtacgctggcatctacaaggaagaagaggaggagagatctgacaggtggaagaattttctggagaggcagcctgaatcatccggacaagatgctggtggtaatgctaaggatgatggttccgaatcactgcatgagaagacggtagttggaccacgaaagattgaaatatggacgccaattagaccgtccctgagcaacatcgagcagatgatgagcttgcgcatcgagaagaagcaatcctctgctagcaagcagcaagcaaaggatgtaatccatcctgtgaaagttgaggagggcaagttgtcagaggattcagacgacgagttctatgatgtagataaggttgatccgagccaagaagtgcagccgagcgatactgggaatgctgatgttggaagcaggagtcaagaagaaaattacatttcaaaggaagagttggagtgtctagtccatggtggactaccgatggctttgaggggagagctatggcaagcttttgttggtactggagctcgtagggtagaagggtattatgataatctggcagcagagggtgaattagataacaaacgttcagattctcgaacctcggaaggtgttcacgagaagtggattggacaaatagagaaggatttgcccagaacttttcctggtcatcctgctttagatgaggatggaagaaatgctttgagacgcttgcttatagcttatgcgaaacacaacccatcagttggttactgccaggcaatgaacttttttgctggtctcttgcttctattgatgccggaggagaatgcgttttggacattggttgggattatggatgactattttgatggctacttttctgaagaaatgattgagtcacagcttgttttagaggagttagttcgagagaagttccctaaattagcaaatcacctggattaccttggacttcaagttgcatgggttactgggccatggttcttatccatcttcacgaatgtgcttccttgggaaagtgttctccgtgtatgggatgtgcttttgtttgatggaaacagagtaatgctgttccggacagctcttgcgctactggagttctatggccctgctcttgtgactacaaaagatgctggtgatgcagttacccttttgcagtctttagctggttccacttttgacagcagccagcttgtcttgacagctcgcatgggataccaatccgtaaatgaaacaatattgcaagaactgagtaataaacaccgcccacctgttatatctgcaatggaagaaagagcaaagggtctaggtgtttggacggataccaatggtcttgcatcaaaactgtataacttcaaacgtgaccctgaaccgctggtttctttaagtgattcaacagaccagttgagtgatgtgggagatggggataccaatcaagaaagtgatctgggaaacatggatgacgagtatggtggtgtaatagtgaattctgagattgattctttgcctgatccaaaggaccaggttgcctggctgaagttggagctgtgccgactcatagaggagagaagatcagctgttctcagagctgatgaactagaaacagcacttatggaaatggttaagcaagataacaggcgccaattaagtgcaaaggttgagcagtttgaacaagaaatatctgaactaagacaggccctgtcagacaagcaggagcaggagcaagcaatgtttcaggtcctgatgcgtgttgaacaagaactaaaaattgcagaggaagctcgcatctcagctgagcaggatgctgctgctcagagatacgcagcaaatgttctacaggaaaagtacgaggaagctatggcttcacttgcccaaatggagaacagagctgtaatggcagaaacaatgttggaggctacactgcagtaccaatctagccagcagaaagcaatgtccccttgcccttctccaagaccatcgatgctcgacgcatcccctagtcagtcaagccagaattcatcgcaggagttccagccaagaaggaaaaacttgcttggcccattttccctgagttggcgtgataagaacaaggaaaaaccgaacaacgctgatgactccaccaacacaaagtctacaaataatgatgaaatggtagaaacctccaacacaaatgatgagaagcatagagaaacactagatctaaatagtgagcagagagcagaatcacccaaagcagatgtcaagatgagagcagagacacctgagaaagacaacgacctgccaggggtccaactagtcactgacgatttgaatgggcaccacgaacagatgcaagaaataaaattggattgataagcattaagcacaatgctcccagcccaaatatcttcgccaccacgtaagtaatatcagagtatttatgatctgatcacacggtgccagttggtgacagcactgagggtggctaagttttgaaatgatactggtccccccctcctctcccctttccctttgtggttccccgaattctttttgccaccacatctaggttacatgtcatttctctccattttttataattttgaggagaaaatgagcaagttatatatggttgcccatccgttgctgcctcccaatgtaaatgcattggaagaactgtgagaaaaaagatgagaattgtgggcaattatgacacccttattcttgtaaattatcatatcatttagagtttatgcgtgctttcaattgaagaaatccgtgctggcgttaataacaccactgaaccct

SEQ ID NO: 37370 - DNA, 2220 bp, Zea Mays
cccaacccccttttccctccctttcttccctcaccgctgctcactcacccccaccagtcagcgatctcacacagtaacaactctctctctctctctccacctttttcactcccgttgctggctgctttgctcctctgctctccctctcctctctctcctccgctgcctttatctcacttcgccgccactcccagtcccagtcgtccctctctatctccatctctctatctctgcactgcactgctcacagtcacagctatagattctagaagccaacaaaaacagacgggagcggagaatcgtgctccgggaaaacaagagaatccacctcctctcccctcccctccccttcactctccagatctacgccggcggcggctggtgcgtccgtgctgctccgcggaggcggtgctgcgctgctagctggtcgtccgagagagcccggcccccgaccgagcgatgggggcggcgccggtcctcgtcctgctgctgctggtcgccgctgccgcattgccgcggcgggcaagcgcggccaccgacgccggcgacgtttctgctataaatggactttatgttgcacttggatcaccaaagctacctggatggtctgctagtggtggagatccctgtggtgagagttggcagggtgtcacatgtaccggctcaagtataacctcaataattttcaatgctgcaaatttgggtggacagctaggcagcctggggaacttcacttcaataactgaaataaatcttagcaacaacaatatcggtggaagcataccggaagatctacctgtcacactgcagaatatctttctctcagataaccaactaactggaagcattccagtgtcattatcaaaactccatagtctaacagccatgtcactgaatgataaccatctagatggaaaactaccagatacatttgattccctcacagaacttgtaaatcttgatatttcttccaacaacttcagtggtccattaccaccttcattgggaagcttgacatcactgactacattgcacatgcaggataatcaactatctgggacccttgatgtcttgcaggatctctccctcaaagatttaaatgtcgagaataatatgttttctggaccagttcctccgaagctgctcaacataccaaacttcaagctcaccaacacaaacaccatcgtcctcttcatccccttcaggatctccttcaccatctaatgcagcatcaaactcttctagtggatctactgctcgaaatagcaattctacgtcatccaagaagaagaagccttcaaccctcagaactgttggatatgttcttcttgctattgtgctattcatagttcttgcgctactggtagtattttgcttgtccaagtatcaagaaagacagactagacgtgattattccatggctcaattaggtaggcatcagagggctgaggagccaaaaagcaagcaagcttcggtgcagtctagacatgatgccaaaaaaggtttatctgaagttcctgaaagaaagaaaccccgtgaaataaatttagctgtaccagttgccattgagaagcctcctgaaaagagaaaagagcatgtaattaatttggagcgaacagaatcagagatctttgctgcagcgcctcctccacctccacctccacctcctccacctccacctccgccaccaccaccctcaacaccgccacctccatctccacctccacgattgccatcaccacctcctgctgaaaaagtaactgtaaatcccattgtacgtccagtaaaaagagttaacactccgccaaggactggtccctcgacatctgcaacatccttttccgtggcatcacttcagcaatatacaaatagttttcaagagcaaaatttgataagggagagtagattgggaaaagtttatctggcagaacttcctgaagggaaattactggaagttatgaagattgataatgctaatggaagaataccagtagatgactttctagagttggttgcttgtatatcagatattagacaccctaacattcttgaattagttggatactgtgctgagtatgaacagaggttacttgtgtataaccacttcagtagaaaaacattacttgatgtactacatgaaggggaggatattgataatccattatcctggaatgctcgcctccagattgctcttcatgcagcaaaagccttagagtaagt

SEQ ID NO: 37371 - DNA, 4151 bp, Zea Mays
atccacgccaaccacaccccaccacattgcccggaggtccccccaatgtcggacggacgacgggttcacccacaccccctgctggcggatcccccccctcgcctgcctgcccgcgcgccaagaactccattcacctccccccacactgccaggagcttcgcccggcccccgggtgccggacggccaccaggttcacccgtgcctgctgccggcggattcccccctcccccggtggctaggagctccatctgtgttgtcgtcgtgtgctgctgggcgtctcccccaatggcgttacagcatgggcattagagaactctatgacggatggggagctactctggcgcgcgtcgttcaccccggcggtacctattctgacgcgtatggaaggttgccttcatgttcctcacgcaagggcaggtgccgctcagggggtgcctcactactacatctacgtccacgcgctatcggccaatttcaccttcgaatcaatcttctcccaacgccaaatacctaattgagtatactgcaatagagacaatgaaggcagatgggtttttgcagactcagactcaagtttgattgattgctatttgctaccaacaaaaaataggtctcgacaagaaagttttattgtacttcagatttgtatatatgatcaacatctctgtgtgcagtatgcttgagaatagctttaaggctgagtaacaaggtttgaagaaagttatttcattttttttctgaacatatattgtttgattcgtaatttagtttacatggtatgacatcatttatttttggtttaaactttagagtatatatgctaattgtatgctctagatcagtttaaaaaggatgcagatgtctagtcgtaataggccaatctacaaactttcatagcctgaagtttatgaacagtgaatacacatcggttctaacttctgtgtttgtaaagatgctaaaagtattctcgctctattaatgtcttcttaggtaaaatagatttgatttacatgtgccagtattttggaagcataatagacactgagcttcaaacgtttggtcaggttcatcatttttaatgcaccaacaccaatgagccccttctcagcacaatgaaattgtttacatgtatgcatttttttcttgctattgttatgaaaaaagcattatttctgaaatattgacttccaatttatgaaatattgatttccaatttctgatagtatcttcagggccagtctacaaactttcacagcctgaagtttatgaacagttaatacacatcggttctaacttctgtgtttgtaaggatgctaaaagtactcagactctgttaatgtcttcttagataaaatagatttgatttataagtgccagtattttgggagcataatagacactaagcttcaaacgtttggtcaggttcatcatttttaatgcagcaacaccaatgagccccttctcagcacaatgacattgtttacatgtatgcatttttttcttgctattgttatgaagaagctttatttctgaaatattgatttccaatttatgaaatattgattttaatttctgatagtacctttggtgcatttcttaacttctttattccagccttgggatactgtataatcttaccaaatgaacatagataggtctatgtttggtttatgttcattactgtcatttttctgttgtgtgctctgacaaggtggacttaacacaccctaatctactatgacaaacagagcagggcctgctgtagccaatgagttggatacagtggacacaatcacatcaattttgcggttcaattactttgcaaaaggttgtatatgcagcctctcttttgtagtcaactcttttataatggctaaacctagaatttcttttacgcaaactcgacatgatccaaatcagttgctcccagtcaggagctgatttgagtctagcgccaaatcacctcaaacttttatagcccaatttgtctctctgtgttggcatcatgagccatccgtcccattcagcttgatagcaggttatgacacagccaggcagaaacctggaaggattacccaggtctaaattggaccattgcatcagcacacatctcttgctctcgccctattttagatatattgttattttgttctcacacattcgtgctttgctccttgttttgcagttatgcatatatctaataaaagtggaaggataccatatgccacttttttctaatataagataacccttcatatttcatttttctcttaatgtaggacaactagatttatatactctccatagtagctgctcttgacagaaaagaaagcaacagaagtgccattcatacatgtcaaaagattaatttgcagcaataaattataattccacaggtctgaattgtgtgtacatacatacatgtaaaaaaataatttgcaaggacaggtaataattccacatgtccgacttggtgggttacacatcctactatccccttgtttgttttttaaataatctggtcggatgacaattctactatttgcttctatattttctccaaatctccccttctcttgttctgttacagcttgttaatatcacttgctgcagacaaagtacgtcaaaaggcaacgtctaagtaatatgttgatacacaaaggtaatccttctcatagcttctgctccaacatgttttgcgaatttattgcattattggtgtataaaaggactgaagttgtgttttgaatactatatgacaacacctttttgggttgaaatgtgtggaataatagcactgatccttagagacttcatccaacgaggtaattggcacttgccaaagcctgttctccatacgtgtaagactatttgtccgctgcatgatttgtgaagactaacattttattgtaccacttagtttatgtcttgcatgtgcattatgttatgtttatttctatataagtagtgttgatatcgccacttggattagcttcgttgagagaacattttataggtagtaggtaacacttacatcaccttcctttgcttacacgttgacagaacactttataggtagcagttgcattagcatgttttccttacatgtaaggcatcaccgatccgctgcatgatatgtggtgataatatgttatttagcctcttgaatacttaaacccattgctttgtgtgttccatgtgctttataatctatttatttaactatttacatatactgagagattactaggtcaacaatagatttattctatttacaataaccttctcttgcataacgcagatagaaggttacatgtgcgttgttactatctcacgccaactcagacctctactggataacgttgcacaccatgcgactagacagacactaaatttgggtacctctacaaagcacttaatttattgtgcctctttcgaaaaaggccagttgcgagcaacatatgggttgttctcgtgaaggaagttgaacacctcgtccaacagctgcaacagaaaagctcaaggtcaaatttcaaaaaaaggacgatgaccaatatagaagttatcttaacaatgacagactgtcatcaccacctaaaaagtatgtggcacaaagcacatataggatcaaggctagccaacttcacaaacttcaatcagattttactgaccctgaaaacgataaccattagatcgttgtgaattacatgaagaacgtgggcatgagcgtgcgcaatacactagtgttgggaccatgcttcgtcgccgaaggtcctgcaaaaagaaacagcttcggctgaagctgcttgaacatgatgccgaagacaccgttcacgaagcttcggagctacaacatatccgaagacgaagggtcgaaccgacttaaagatagaatgaccatttagcccataagggtctgagtcattgttgtaaacttttatgaggggcataattgtaattcctcatgagttgtgtcctgtgcctataaatagtgaacagtattcctttactgttcacggattcctgtaattgccaacgcatcactcgggaattattgtttgtcaaggcaaaggtataaatgtacctaaacattgtgttcagatattcaaaattcatttaacaagatatgtgaatgatgtcgtttattttca

SEQ ID NO: 37372 - DNA, 827 bp, Zea Mays
gttgggttcaaatccagcccctggtgcatcatcggattggcgacgtggtcacttgtcatggggtggagactaaggatccaagccaatatcacggaccacaacatcaagtgtatgaggcagggcaaagaggccaacaggtgcagggtttgccgtttgcttgacgatcacacgtatcaaaaagggttctcaagtattattggttgatgctatgctccaagaattagaaaaggagattgatgatgtggatgcacaaattggaaatcgttggcaactgcttgataaggaccatgatggcaaagtgacccctgaagaggtggcggcggcgacagcttatctcaaggacaccatagggaaagaaggcgtgcaagagctcatcagcaacctttctaaagacacagaaggaaaaaatccttgttgaagatattgtgaagctagcatcccaaatagagaacaatgaagaggaagaggaagcacggtagatgggagagtatatggaaacatcacactcgttcagcagtcaaaactcatgtattgaaaggcaatacatccatttcttgtgtctcttgactgactttgatagtgacttccaattagcaaggtagattttctgtagaaaggctcatgctgacatgcatttagttagccgtcgtgttgtgatttggtaggtaaattgcaaccaaaatttagaccggttgcatggacgtggataatacagatcaattgtatttgttatgctactatgcaatcccgaaatattggatctgtttcaaattctcaagtaatcattgatggatgctatttattgaccataaagcttacgaaatcat

SEQ ID NO: 37373 - DNA, 2538 bp, Zea Mays
taacggcacgacggcgaagcaaactacaccccagttcctctaattattcagctaagggcgtcccattccaccctcatggttgcactgttttcccgggtggtcatccaacgaacaagtccttacggagaggcactcgagaaaccgctcaagtcccctaaaatgccacaagtatatcatcatatccagaataaaatcatagtaccatcattgtatctcatcatgttcattgattaaagtaaagcgctagcatgaagctaaccattgtaagccgaaaggtaatcaagaacaaggtaaatagaaagctagtcaatccttaggttgttcatagtatgcggggcaatgaattataaagtaaataggacataatgggtcagatgacacttgccttcaccaaacagatgctcagggtcttcagcctcgtagaactcgaagagcttgatctcaggaccagtggttcaccaagttttgatcgtcgattcctcgaagctcaggaacagatcgcaatatattcacgacgcgtaacgaatacaaataggcacaaacaaaacatatactttgcataagaacattacaccatactagataaaatattatcaaatgagcaataaaaacagagagcgcttctacggttacgcgaggataaaaaacgtgacggtcgaagctacggtcgagaagttatcgcgtttacacttaaaaattattagttacaacatttaattcgacattatcaaatataaattataacaactatttaatttcgactaacttactgttttagtagacgacgattaaacaaatcattaatcaaccgacatgagtggttatgtgtgaatggtttaatatcacgcgcggacgacgcacgatacgcgaaaactgtgtgcacgacagacacacgtgaacgacgcgaacaacacgacgtcacgcgtgaacagcacgcgacaacatgcgaaccagacgcgcggcacgaacgcgcgaacaaacgacgacgcacaaatagcgcgtgaatgacacgcgaaacagcacgccaccacgtgcaaaacagcacgtgcgacagacggagaaatactaattagatgttgtgtttaaactaaacaagtattaaataaataaaaaaaagtatttaagttaatattaactatgttaatgtttatttataaaagcgcaagttgaaaactatatatttaaatactaatctaatgaacatagtcaagcaaacattaaataaattatttaaaatatgtgacctgatgaatgttattaacatatggacaacgcaatttgaacagtaccaaacggacttaaaatacaaaagatatcacatttttattaactcttgcataaactattaactaaataattaacgagacaagtgttgcgacaaaataattaatttaacgtgtacacgatattattataaagtgaacataactggaaccgtacaaaacaattttactaagcaaattctattgaattcttagtaattccctgattatagccaaatgacacattcctattagccaaacacgagaccacacatagggccacaaggtgctagcgcagaagatcccacctatcagccgaatgtgtagggcacttttcacgctttggatgcatgtctgcatgcacctatcgtgtgccatgcaatgggtgaggcctaggctggagattatacaggttacatgcaagaggggccagggcggttatcttcccttgaccaagcacgcacggaaaccgcttcctttccctctcaacgcagatggcgactgcatagagcaaagacgggcaggcagccggcggcggcatgacaatggtgaggcagggctggacagcaccggcgaccagcaggcgggcttgccggagcgtggctagcaccaagcgcgcgacgcacaggggcagatggctgagcagcggcgccgagcagagagagagccggggagtggggatggttttctctctgtttttttctgcaaccgaataagaactttcttcttcctcggacgaagcagagaacggagggagaggagatcggccagcaggggatctcgccgtccatggagactacgcctggcgcgcgcaaagcaggaggctccgaggggctcacctgccatggggaacgccttcggggacgacatcacggacgcttcgcccgggaacaacgtagcagcaggattggtcgggtggctctggccaacggccatgacacacacggggctgcatctaggggcactgaggctcgacggcgagggggctgggtgcacgccgcgcgggctgcttgacggcccagagcgtgacccgaagcaacggtgtggcacagataggctgctacggttgcgcagcgcgaggaggggaacacgggggaggagagagagaggcgtcataccttcgcagcacgacgacgaggcctctaggggcgcgacgtagcgacgctgtaactgcgcgcaactgcaaggcaaagcgcgggcgtggcgactgcaaggcgtggatgagttttttttgaagatggggttgtagacagcgacgccgagtgcttgaataggg

SEQ ID NO: 37374 - DNA, 3155 bp, Zea Mays
ctcgagctcgtatcaaactggctcgttaacgaaccgagctgagatgttagttcagctcgtggaatcaagctgagctagctcgtgctaagatgttagttcagctcgtagaatcaagctgattgtgactctatgagtcgatcgagcttacgagccacgaccggcctaactgtggcagcggtgctaaacatcaatggagagggaatcatggtgaggcttctccgggtttcctctctttctctatctcttcctacatcgccactcgccagtgcggcggtgacctctagaatccaaagcaagctgtagtgagcagccccttacatactctctgcggactgcggtccgcaccgcacgccatctcagcaagacgagagctccaccgcgctgttcacttcttctgacgaaggatggcgggaaaagaggatgagaatgagaagccatcgttggtggcagccggcggcaagcaagatcggacagcggcgaccacgggtgaggatccgtggcaagcatttcgttccccattttcttattcttcggcctttcttcagttcccatttctccctttctccagagtccagagactggtcacctttgtcttgtttttcagaatcccttccgcaaaggacgaatcttgagtggggaaaggcagcgtgtagcgaggatgacatccagaagtgtgtagctgccggtgccttccatcccggtgagctggtcgaatggcgagctcccgtcaaggatgagactccgacgctatccaccatggaggatcagtttgttatcctgtctctgacgcacataatttgcggtctgagggtcgatgcgagcgatttcctggtcagtgtgctcgagtactacagacttgagtggtctcacctgacgcccaactctattacggcgctgagcatcttcgcccacctttgtgaggcctacgtggaggcgcctccaactgtggaggtcttcacgcacttctacagcctctatcacaataggaaaggcgaaacgacaacactgggcgccgtctacttccggctcagggacaggatgaagaagaattatccattgtactacttgaggtcctcgcagttcatgtgggtttctctgtggttctatgccaaggtaccaaagagctgtcgcttgaccttcaggggtgatatactaaaggaggaaaacaattggaattggaaagatcttttgcctctttcctgtgagcagatgaagcaggtcggccaaatcatgaagctaagtaaccaaggcttgactggtgcagacatcattcatgattacctcaagcgccggattagccctttgcgccgaaggatgcatttgacatgcaattattctggcctctcagatcctaccagggattcagacaaagatctttctgtggaagacattgagagcaagctgagctaccttctagatcttaagaggatgggtgtgaagcagcctacaggtagactggtcagagcatcaaccaatgaccaagccaatcagcctctagacttgctgaatgtttgctcaactcacgaagctaagaaggaagcacaacctcaagtttgtgcctccctacgaagatacacaaggcaatctgctggtcccaggaaggttgcagtacctccacctcttaaaattgaccctccccccactcaaggtccggccccagaagagattctagatgccacaacaaacatagcgactgcagtttctccaaacctgggcgtagaacaaaaatctatagagcaccctactgtggctgaagagcggaaaatagcagagttagtgaaacctacgttttcagtcattggtgccaaaaggaaggcatctgccccccggtctcgttcaaagagaagagcaaagtattcattactttccgttgttacaaagaccaggatgtcatctttggacactggttctataaaagggacttctagaacaaaagaggcagtgttagcgctgaattcacggtcaataggattggctcgatgccctcctgcctctttagcagaagggacagggaacggtggactgttcatgcttgccaaagttgttgaccatactaaggttgttgaggattccatgtcgaatatactccttaatcaacaagttggagattcttctcgcaaggaggttgatcctgcacaatctatcactgagattgtccaagaccaggaggccattgaggtttcagctgccattccggtgcctaataaggaggaaataaacagtggggtgatatgggagcggatgcagaaagttcagagtgaaaacaagcaaagaagctggtcatggagaataaacgcctgaaggacgtgcagataatgctgtcgcaacaagtgaaagacctcgaagacggcagaaggctcttaacagaaaggatgaagaaagccgagcaggagacattcaaaataatagaagaaaatatgaagctcaaagatgagaacaaaggtagttaaatcgtctcttgtcattgaagttgtacacttgatatgtgcatttccaattttcatccgcagggcagaagcagatgatcgaggagctgagtaagcagaatgagtcaaccctaggggccttggtccataaatgcactctgttggaccgctacaaagaggagtctgctcagctcattagagagaaggaagagctgcaatcgcgtgtttcgcgtgtcaatgatcttgtcaagctagtctctagtactttgtgccaagagaaagacagcgcttcctaaattttatgtagcatttgtgtgtttgacaagtgcaaatgagatccacagaaggaatgtgattggaagcgaatgcagattactgatgtatagaaacatccttatcaatgattgatgtagtctaaaatctcaactgaaggggttatggcattatgggcatgatttagggggtgtttggtttcttttttttttttctcggaattaagaagaaagaaggttatggggccaaaaaacaacccagatacaagagcctcttacgttggacgaaaacataaaaacataaaaggactcataagtcgaaaacataaaaacataaaaggactcataaggaaccacagacaacatcctcacaacaagaaaaacagggagagcatcctcacaacaagaaaaacagggagagagaaactagactaacaagaaaaacataaaaacataa

SEQ ID NO: 37375 - DNA, 523 bp, Zea Mays
catgtgggcacgtttcctcttcttcgttctctcccccatcccaatcgtgcgtgttcctcactcctcagctccgaccttcacggggcccacggggcccgacgcccggcggctttactcagggcaccatggccttctcttcgtcactggcgccgttcttcccaccttctggaaccttccgagcccatcccgctaggaggctgcgggccgatgcacccgggagattcgtggcgtcctgcttgccccctcccgacgtcgtggtgacgcgcgagcagggaaagaacgccaggctcatctccgcgctgatgacaagttcgactggattattgtaacctctcctgaggcagctgcagtgttccttcagggatggaaggctgctggaagtcctaaggtgcgagtagctgttgttggagaaggaactgcaagggtttttcatgaagtgtcagaatctgatgatcaatctctagagcttgcattttcaccttccaaagctttgggtaaagtctggacgaatctctagattcga

SEQ ID NO: 37376 - DNA, 379 bp, Zea Mays
ttaaattattgtaatttgcttccactgattctttccttcgatgtgatgtaatatctgcatgacaggtgatgcgctattgggcgtaatgatgaggatacagttaccgaacttgtcaagtgattttgtgcatctacagggttgtccaaggtcccttggacaaggacaaatgtaggtgggcctaataccttgggaggtttcgtcacaataaatgtcacaactatcattattacatagcgaaagtcttacaaaaataaatgataacaataaaatgaactaaatattattcattggcgccatcaaggtgacagggagacgccacctagataagctcatattcctcattgtagggctcctcttggaccacctgctcttcacctgt

SEQ ID NO: 37377 - DNA, 824 bp, Zea Mays
cccgttacaattttatgaacccacgttttccttcaatcagcgtacagttctcccctccttcctccagggttagatccagggaagacaactagatcgctcccacttcttcctcttgcctcctctgtgcttggatctatgtttccccacccccaatgctgatccttctcgcctcgatgtccaagagctccgatatgtcgtccaccgagccccggtgctcagatcacaacacatgccaaaggatttggcgggcgtagcagggtgtcgttcccacgggcatccctggatcaggattgtggaagtgagtgccatggggcaggagctagacgtgaaggtgccattgctgcatgatgagggtgtggattccatgaaagcatatgactgaattgagcttcttctaagcatttttttatgatggggcattcaaagctggtgaattggactagatattgagtttacaggagcagtcagggataatatgcatggttctgtaattagtgtggaaacctgagcaagacgtaaggcgtgtttctaaaaatgttcttaggaccagtaaatctacggacaacaaggaagattgtgcaacagaaggtgaaggaggatagaaggcagaagggggatggacgggcgacaacgacattggtgcggcgataaagttggtgagcacagaaggggagctaggtgtgccagtgacactggggcaacacagaagggggcaggcgacaaagtcaggtgtccactggcgaaggagacatctggaaactggaatcatgtagcctctgttctgcaaggtcgctaaatcccttcctggactgtatgcgccttca

SEQ ID NO: 37378 - DNA, 2128 bp, Zea Mays
cggggtcgtcgggactcgggactcggtcctcggattcggaggcggaccagtgatataccaaacccaggccgcgaaacaaaccagtcgccgacctccctccatccttccctctcaggcacgcagctcgcgtggcattgcgttgcgcggcctgcttctctccggtctccaccgcgccgcgatcgacagcccggccagcgagctcctctcctccgccttctcctcttctaccgctcccgatcacgcggccgcgacatggaggacgacgaggggaagaagcagcaccaacggatcatccccaacgccaacggccacgtcatgatcgtggtccccgacgacgcgcacgcgcacgcgctgcccgcctccgcctccgctcctcctcgtgacgccgacggcccagacgaggagagcggggacgaggaggagcggacgccggcgggggccacgtcctcgctgtggcgagcagcggtgctggcgctcgcggcgctggcgctggcggcggcggcctacgcctgcctgtacgcgggtggggacgacgacgccggcgcggcctggcgcctcttggaggcgcggcggcaggaggacggcggcgacgacgagcacccgggcggccgcacgtccttcctgctgccgctctacccgaagccaccacgccgcggcggcgacgactggccgcagaattccacgttattcccgcactcgctcgccggcaacctcttcccggaagggctatactacaccgctatctctttgggcagtcctccaaggccttattttcttgacgtcgacactgggagccacacaacatgggtccagtgcgacgcgccgccatgcgcgagctgtgcaaagggagctcaccctttatataggcccgcaaggacggcggatgcacttcctgccagcgacccactttgtgaaggagcccagcatgagaacccaaaccagtgcgactatgagatcagctatgccgacggaagctcctccatgggcgtttatgtaagggacagtatgcaattcgtcggcgaagatggtgaaagggagaatgcagacattgtgtttgggtgcgggtacgaccagcagggagttcttttgaacgcactagaaaccaccgacggagttctcggcctgaccaacaaggcactgagccttcctacacagctagccagcagagtgatgtacgcagagcccaagtcaagcagataaaccatggggatcaacagctcaatgcgcaagggaagttgactcaagtggtctttgacactgggtccacatacacatatttcccagacgaggcgcttacaagattgatatcttcggtgagtgtcggttcttctatcgattgatggaatcacaaacaccggtcagttcttatgttttctttctaacttaacagctgaaggaggctgcatccccaaggttcgtacaagatgactcggacaaaacacttcctttctgcatgaaatctgattttccagtgaggtctgtggaggatgtgaagcattttttcaagcccttgagtctgcaattcgagaaacggtttttcttctccaggaccttcaacatccgccccgaacattacttggtcatcagtgacaagggcaatgtctgcctcggggtgctcaatgggacaacgatcggttacgattcagtagtaatagtcggagatgtttctcttcgtgggaaattggttgcttacgacaacgataagaatgaggtcgggtgggttgatttcgactgcaccaaccctcgcaaacgaagcaggattccttccttcctgcgacgagcgttgcgcaaccaacttctgtaaatactggctactgtgagactggctatgcttgttcttattacagacgtgctattccgcgtctgaattctgaaactgccatggaaccctcctataatcgtcgctgtaatcgtgtggagggatgtaactacgaggtagtaaaaaagcggttacaggacaggaaatagtggaaaggtagataagcatagatagtatatagtcaaaagaggtcatgtttgctatgttgtagagatctctcactttttaagactaaagtggggaagcataatccatagcagttcatttaaaaaaattggctggagcactgccatgtcatagaggctggga

SEQ ID NO: 37379 - DNA, 1974 bp, Zea Mays
aactaattttagcggttaactactagttagctactgaagattccaaaaccaaccccccatccacgccgcgatgctccgccgccgccgggcaccgctcctcctggccgccgccgccgcgggcgccgcgctggctgccacctctccctccggcgaaaatggtcgaagcgtcgcctccgcgctccaccaaggcatcgctcgctcctcccgttccgtctacacgattggttttgtgatggcagattacaagtattcgctgaggggtctggatgctggatcggcggattaccgtgttaagctctccaaggttcatctgcggtcagcaaaaaaactacttaaactatgtgaagtgaatggagggttttatgtcaaagctggtcaatatgtatcttcactaagacaagtgccaaaggagtactcatcaactctctcctgcctgcaagaccaggcaactccatccaagtttcaagatattaaagcagtaatagagcagaactttggcaaggaattgtatgacatgttcatcgaggtcgattgcataacaatcaagatgtagctgtcaaggttcaatatcctggattggagcagcgaatgaagatagacattatgacaatgtcattcttgtcaaaaatggtctcttgggtttttcctgattataaatttgacagaatactaattgaatttgagaaatccatgacaatggagcttgattttacgcgggaggctaagaattctgagagaacagccagctgcttcaggaaaaatagtgttgttaaagtgccttatgtgttctggcaacttacaaccagggaggttttgacgatggagttttgttatggacacaaggttaacgacttggacttcctgcggaaaacagatattagccctacaaaggtagctaaggctttgattgaactctttggtgaaatgatatttgtacatggttttgttcacggtgatccacatcctggaaatatattagtttctcctgaaggccatgggaaattttcactagttctgttggatcatggaatttatagagaattggaccaaaagttcagattggactattgtcggctatggaaagcactgatattgttggattcaaacaaaattctggaattaggcgaacagtttggcgttggcaaatatgcgaagtactttcctgtaatattcacagggagaactatagaaagcaagtcagctcttggcacacaaatgtctggtgaagagcagaggcgtctgaaggaggacttaaactctcttgggatggatgatatatcttcatttatggaatccttgccaccggacttctatgtcatactacgaacagacggactattgaggtccattttagggaatcttggggcaccacgccatgttcggcttctcacttatgcaagatgtgctatacacggtcttgagaagcagcacaaaatggagtctgatgttcaattgtgttcaggtgcaatcagacgtatgttcttgaatgtcaaaacaaatgtcagctatctccgtctgagagtgattattgaaatagcggtattattagctaaagcaaatggtgccaagcagaaagtcgtgaacaaactcagacagatgttacaggagaccagtcaaggttttcaccgccgtatgtgatgcccagaagtcagcgacgtggtgaaattaaggctacgagaaaggtgggggaagttggaagtacgtcaggactccggagtagaatcataactgtgattgttctgtttcaacttgtaaattggaggttgtattgtgtcaaggagtccaatcataactgtgagtgctctgttgtaacttgtaaattctacttctacgtcgagtctgcgctcgagagtccaggtgttttttttttgttggaccaagtacgcatcccaaaataagtctacatcccaaaattcgaggagtcaaacaaatcttaatttgaagtttgcctaaatttataaaattggtattaac

SEQ ID NO: 37380 - DNA, 837 bp, Zea Mays
agtactatacaaacaaacagtcctacaagtgaagggaagcggtcaacatgccttgtcagacgcagcacgagatgccaaaagccattggacggcagacgataaagcacggcgcgccaccacggataagaatccagaagcttgcgctccgctgtcccgtctccgctccggcctccacccatggctcatccactcctctcgtccgcgcttgtttgttcgcgtcttctccctgtagggaactccgttacccggccccggctgtgcgtggcgtcagcacgccccgcgggcaggagggtgaggctgctgagcgtgaggtgcgagcagggagccaagggcggtggcgggctggacgtgtggctgagccgcggggcgatgctgggcttcgtcggagcggtggccgtggagctgaccaccgggaaaggcgtgcttcagatgtgggattgaccgcgccggtgccgacgctggcgctggcgctcaccggcgcggtcggcgtcctcacggccttcctcatcttccagtccgggacgcgggactgatgggtgaattgtcaaagctcccaaaaggacatgcataaagtctgtcagagtcttgtgctgtgtatgtctatgctgttgtagttgccttgccttcacaggaagctgaggagtaacacagtgcgaaaaggataattattattttttacaaaatgtgtttacagtactcttccttgaaggactaaactgcatttatgttgaagttgtcaataatcctattctcactacaccaaattccattccaattcgaagaggttcttggcaaccaaggtctgttcattttaatccaagcgtgagaagttccgat

SEQ ID NO: 37381 - DNA, 890 bp, Zea Mays
ttcaatcccagcaacagccgccctatcctcctcgtcagccgtcaccgccgccccacagcctcgcctctaccatcgcccccgccggtgctagctgcatccggccaggagctcgattgtttgccggcgatggtgcagaccaacctctccatcgacaagattaatgccatgcttaaggcattcgaccatacgagagggttcatgtagcatgattaccaccttggctagaggcacaacatgctcattatgtggtcagagtagaaccacaaatatttatcacttcaatttccattctcatggaggttgtcttaggtcactggaatcaaaatgggaaacctcctatgcagaatgttttgtaatatgtttttcataaggcataggaaaaattagcataggcaaagaaatgggtcaaacctcatgttgagactgctaagatgaaatggattcctgttaaggagaaattggttctcctcaagaaaatgtagaacataatgtacaaaaggtatcaacaaggtgttaatgaattcaacctcatattgagattgctaagatgaaatggatttccgttaaggagaaattggttgtcctcaaggaaaatgcagaaccttatgtacaaattggttgtcttcaaaatgttggtcatgtagctgcaagcctacaacaaagagaatcaacaatggtggtgatgctacacatgtagaagtagcaatgttggtcttgtaaatccaagatttggttgttgatgaatgatatctatgataatatattgctaagtatatgtgatgatcattaattgtcgtttaattataatgagttgtgccttttgtgccacattgacattggtgatagttaaaaattaaaatggtcttgattgaccaaatgttgtgatgaac

SEQ ID NO: 37382 - DNA, 2009 bp, Zea Mays
atccggggccactaaacgcagatttcctcggttccttgtacgttcagggccggacgacggggacagacagcggtgtcgcggggccacctgcttcccaacgccgaccgcacctgctgccctgtcgtccgccctccttcccttctcctcccctccaactgtttcctcaacctcccgacccaaccacggccgtgcccgccaaggcgccaaccgcacagcagcagctggggtgctgacgtgctgtgggtggttctgttgtccatggcgcggaagcatcagcatgttgccatatttaccacagcgtgcctgccgtggatgactgggactgcggtaaacccactgtttcgggctgcataccttgccaaggctggagattgggaggtcacgctggtggtgccttggctgtccaagggggatcaggagctcgtttatccaaacaagatgaggttcagtttgccggcagagcaggaaaactatgtgcggcggtggcttgaggaacggactgggctgttgccgaagtttgacataaagttctatcctgggaagttttcaactgagaaaagaagtattctacctgttggagacatcagtcagacaatatctgatgataaagcggatattgcagtgctagaagagccagaacatcttacttggtaccaccatgggcggaggtggaaaagcaagttccaaaaagttataggtgttgttcacacaaactatttggaatacgtgaaaagagagaaaaatggatacattagtgcgtttatcttaaaacacattaattcttgggttacagacatctattgtcataaggttataagattgtctgcagcaactcaggatgttccaaggtctgtgatttgtaatgttcatggagttaaccccaaatttattgagattggcaaattgaaacatcagcagctatgccaaagagagcaagcattcttcaagggtgcatattatatcggaaagatgtggggaagatgctgatgaagtaaaggcatcagctgagcgactgagcttagatattagagtctatccaggccgtgatcatggagattcaatatttcacgactacaaggtcttcataaacccaagtacaactgatgtggtatgcacaacaactgcagaagctttggcaatggggaagattgtgatctgtgcaaaccatccttcaaatgtttttttcaaaagatttcctaattgtcacatgtacaatactgatgaagagtttgtgagactaacaatgaaagctttggcagaagaacctatcccactgtcagatgatttgcggcatgaactttcctgggaggcagcaacagaaagatttattagggttgctgatattgcaccaactgtgcctgtgggacaaccaccaccctcctcacagcatttcatgcgcatctccccagatgaactgcagaagaacatggaagaggcatcggcatttttccataatacaatctctgggtttgaagctgtgcgttgtgtgttcggtgcaataccaaacacactgcagccggatgaacagcaatgcaaggaacttgggtggaatttgcagggatagcattagcttttcttgcgatgctgttgccatggaccatagaatgaaccagtctaactcaacggcaaaaagatgtgtcgctcggagaggttctcagattgatcaaacatacattctatgtggtgttctggtgtggcggcactgcattttttcttcatatatcaaaggcgttctgaagttcctggatgcatcgtatcttctgattgttaatcttaagcagtctgaagtgcacactagtattacagtctcatatatgtggactgtttttcatcgtgttgtttcccaggattgacgcgtgtgttgaaaatcttattgtataataatatgccccttgttttcgcagccatccatgctgaaacttttactacaccgcctaaaatctgtgtgctagttgatactacctgtgttctcgataaataaaaaagaacagaaaaagtaaaaaaaaaaa

SEQ ID NO: 37383 - DNA, 214 bp, Zea Mays
gcccaggctcgtacaggccgccccgggatggagtgacggtggcccagcggcaatgtcgatttgtcggtccgccgtccttgagaccccggatgatgtctccccagcaatacggtgagtcactgaggcacgcaacctcgaattccgcccatgcgcacacacgctcgtcgtccgcaccagacactgctctcgcgctccacttctctctcaccaacag

SEQ ID NO: 37384 - DNA, 3032 bp, Zea Mays
cccagcaccccctctgacgtgcttgccggcgagttgcgtactggcctcatttgccacaccaaagctcaaccaggatgttcccgtgggagatggacattgatggagagtcgagcaaaactctgggacagatggaagacctggaaaaaattccattggagaatgagagttgtggcatttgtagagacatcgtcatcgacagaggagttttggattgttgctcacactggttttgctatacatgtattgacaactgggccgccatcacaaatcggtgccccctttgcaaaagtgaattccaacacataacatgcactccagtatatggtacgattggagctactgacgaagatgaatactctttaaccagctgtgatgatgattggtatgggcaagaggaaagcagcacactttccttcccgtcatactatattgatgcagaagccgtagtttgtttggatgatggtgattgcaagattcggaatggacttgtggcagctgaggatgattcaactttagatacatctattgcttgtgattcctgtgataaatggtaccatgctatttgtgtggcgttcaatgcaacaatggcatctgacagttcatggctctgcccaagatgcaagtttaacgaagtggaatatgaggcaaatgtaatcttgaagcaaaaccttggtgaggactgtgtgattggttctgataggacatgtaccaacgcatcattttctgggagggtgtcagtatctgttgctgatgagggagaaactgcccttgttgtatcaatggtgggtgcacattctgaaactaggggtggtctatcagaagcttcactaggacttgagacagcacatgaaacatttaactgcagtccatacccaagccattcaaaagatgtccttgttgcagatgctagttccttgaggaacacagatattgtcagtagatcccagaataaaccttctgaaataaatgttgtccacactctttgttctgagcctacagaaacatcactacaattttcaccaatacgtgagccagcaacaaccatatttagctcagagcaggataacatgtcaactgaacggttggaagtgccaaagcttgtgtcatcttgtccagtagtagataacagcaaggaggctaaaagtactggagaggagaatgcagcgcagcaaagcaataatgaattatcttctgtaatcaaaacagttgccacttaggcatgatgagcatagtagcgatgacaggaaagaagaacacattgaatctggaaatgaaatgatccatcctgcgaagaaagcaaaactggaagtgcaagaggacattaatgtaatcggaaactttgatttttcttcaatacatagtcatactactagtcctgcaaaagctattaccgacgacattatgtcagagtctgttgcacaacagaaatccattcctgatataatgagcattgttgacggtgaggtttacagaagggatcctggtagagagctggctaaacctgtaggaagaagagcaggagataagcctggtcctagagtgaaaaagatcttccgaaaggaagaaggaaaagaatcatctgccttggttcaaaagctacagaaagagattaaggaagtagttagagatacaggcacaaatatacttgagaaggatgaatcttttgatgaaaaactgttgactgcgttccgggcagctatagggaaatcagtggatggaccagccaaaagtactaacaccaatcaattaataagaacaaggaggtcattgcttcagaagggcaagaaacgtgagaatttgaccaaaaagttgtatggaacatctacaggaagaagaagaagcgattggcatcgtgattgggaagttgaattctggaaataccgttgctccccaggaataaatcctgaaaagattgagacattgcaatcagtacttcagctactaaagaaatcctctgaaatggacaaggaaagtgctaaggggaaaagggaagagaacaacaacagttccattttgtctaggttgtatttagctgatgcatcagttgttcccaggaaggatgatattaggcctctctctgcccttgcaggatgtgcgccattagaaaaaagtagccaaattaaagctagttgtaacaaatcgtctagcatacctgcaggaggcaacgagacaatgaaaatcagttcacccagcagcactgggaaagcatcaagctattcaattctgaataaagaggcacctagcagaagagaaaatagaaatagccagccctcccaggacaagagaaaccaatcctctggtgatatcaagcaggacaaaagaaaatgggctcttgagatcctggcaagaaaaaatgccagttctattacaaataaagatcaaactggaggcaatgatgctcttaagggaaacttccctctactggcacaacttccggttgatatgaggccgcagctggcagctggcagcaacaaaaaggttccggtatcagttagacaggcacaatttcaccgaattgctgagcattatttgcagaaagcaaatttggatgtcattcgcagatgtgcagatactgaattggccattgctgatgctgtcaatgtagaaaagggtatttatgaaaggtcaaatagcaaatcaatttatgtgaatctttgctctcaggctactcgccagcatgccaaggcaaaatctgataatgacacttcaactctaaccaaaaggactgaatcaggcagtgatcagatatcacaggaagctacatctgagggtaccaatgttagtggcagtgatatggaagaggatctaaacagagcagctatctccaatcaaaagaatgaactagaggatgatactgccccagaacatattgtgcacaaggatactgttagcttcaacagtgcagaagacgcactaaggaaagcgggcctttttgattcccctcctaacagtcctgagagagggaacacggcggttgaaggtaactctgaatccacggcagtttctaattgtcctaagttttcacaaaagaa

SEQ ID NO: 37385 - DNA, 2364 bp, Zea Mays
cgccgcactgagcctctccggcccctcgcctcccctcccgtcccgtctctcctgcctcctgcctcctgcctcctgcctcctcgtcctggtcctcgccttccccattcgcccggccgattcaccagcgccccaaacccccagccgaatccgcgtcgcctcgcctcgcctcccgatgtcgccggctgctggtggccccgcgcccacgcccgctcaatcggcgcccgccgtcccgcaggcgatcgcgccgccgccggggcccggccgtgcggcgcccgcggcgccccgccgggatccgccgggcgaccccgagggggccgatcccgccaatgcggcggcgaggaagacgccgtggagcatgctggtgcagccccccgccgcggcgtcggcggcggcggcgggggagaccccagagagtggcggcatcatcggtggggatgcttcgtggccggcgctcgcggggtcgacgcgcgcgggccccaagtcgggctcgtccgactccctcaaggcactctccgatgcgtccggcccgtcgcctcaggaggttccaattgccgctccatcggtacccccatatccagttgtgggggctaatccgattcccaccgcccaaaaccctacctccatacctcctcccatggccgcggcttcctctcagcagaacggtggcacaacccagacgattccagttcggcgcggtggcagcagcggtggaaacggtggaggtggcagtcgtgggtatggtagcattggtggtcgcagggctgccaatagtaatggaggtgatgggagcagcggcagcggtggtgatgataactggaataatggaagccttggtactggcagtggttgcaacagcaccaatggcgatggttctatcaacttggatgataatgcccctggcgctggtcatgctggtgggaatggcaatggcagcagcagagatgctcctgggaatagacactggaaccacaacatacgtggtggtatcagcagtaacggtgctggtagtggtgatgggaacaatagaaatagtagtggtagcagcaaccactggaataataatccccgaattagtagtggcagtagcaatggcgttggaggtcgtggtggttaccgtggtcgccgtgaccatgagagaggggctaacttccctaggaatttccccagagttccagtaatgccatatcaacagcagcagcagcctggcatctaccagcctggacctttttaccgaccgccgccacctgctgcccattttatggtgccacaacatttttatgctccaccatttccctaccctgtagagcagtttcagaacatgcatcttgttcgaccacccatgcagccttcatgggttcctcctcaggatctgccaaatctccaagatgatattaggaatcagatagagttctattttagcacaaataatctatgccatgacacattcttgagaagacatatgaacgatcaaggatgggtacctatcaacctaatcttagggttcaatcggatgagggcatttacgagcttggttgacaccaactacatattagatgctatccgtggttctgagttattggaagtgcagggagataatgttcggaggcgcaatgattggatggaatggctacttcattaacgctgtccactagcaaatcaggttaagatgccaaaatgcagccgcatgctatcttcggggaactgaatagaagtcttgtggaaaattatatggaggagtcctgcaaattgacgcatttacatgacaatctcgatgcatgctacacgtctctgcgtactaatgtgaaactagatcaaatcttggcacgtttaggagccagtgtccctgcccaggccatcgataggtcgactccatgttgtatattggctagctctgtagcttggctcactggctcttaaacgtgggaaggcttgatctagtttgagattggtgcacaagggcatgtggcatggatcaagatcgtactataaacgcgtcggtttgcaggatatagattttattttctaagtcttgggtgatttgatcatgggcaccgggtaccggatccgtggactgatgtacagtgggtctattggaagcgggaagattttgtttgtttagatcggacatgatggctgcacgtaaagccactattgaggggataaataacaggaaataaatttacttaaaagtactttttttgcggtgtgtatagttgttcgaaaagaagtgtgatcctaccttttcatcatggattattggtcctggtgaacgatttggtgctacctagggtttattcttggaatcttagttttgtggtttgagtagtataccctgtatttgactctccttatgagcgaattttt

SEQ ID NO: 37386 - DNA, 1067 bp, Zea Mays
aaactcccccaactgacggccacctcgaacggaaggggatcccccttaattatgagacaattattgctgaaattattttttttcggaatccaatgaggtagtatttgtgtgattgtgtccaggccctatacataagccgccatttgcagtccggacgcagccccgttcagtcccagcccaggccgacgacggcagagagcgagccgccgccgccgccgcaccctcgtgccaggttacacggtgtgaaaatgtcaggaagggctttgaaagatctcaatgtttctcagtcagcagacctggagaacggaaaagacaattctgtgaaatcctgcatcaccaagcctgtgttgaatggcaacaaatgtgccaacaaggaagaaaaggctccgtctgcttgccacgacgctgtgactaatggaaatgcggctgccattgcagatgtggagtacattgattctgaaaatctagtagatctcccagatgtcgatgcagctctaagtaccttagctaaaagattggattcaaaggactgggttatgacatgtgaagctctcaacaatgttcgtcagttggcaatgtatcacaaggaacgattgcaggagcttctggagcctctagtccctcttatcgtgaaatctgtgaagaacccaagaagtgctgtatgcaaaactgcactaatgacttgtgctgacatctttaaggcctatggtgacttaatggttcactcaatcgatccactgaggcagctcttatatcgatgacaagttggatctcccctttactactcttgccaagaatgctgccttacctcaagaacaagaatccacggatccgagcaaaagcatcagtgtgtttcagcaagagtgtaccacgccttcatgtccctgtgggtatgatgaatatggaaactaggaggaggattggtggagaaggcgccggatgtggatgctgaggtctgaggatgatggttcagctattgcctattgcgaactttctttgtgtccaggtgtcactggatgttagaaagcctcaaagccatgcgtaggggagattttgttggaggtata

SEQ ID NO: 37387 - DNA, 1233 bp, Zea Mays
aagtagggagagaacggatatctgccattacgaagccaaccctggaaaaccagggccattaatactactcccacccgtcgtctatctcctcctcaaccaccgccccgagatctccccttctctctcctcgcgccgttttcctctctacctctttgatccggcaatggccgcgcccgcccctgccaccaccggcgacctcctacgcgtcgaccccctcgagctacgcttccccttcgagttgaagaagcagatctcgtgctccatgcagctgtcgaatcacaccgacgactacatcgccttcaaggtgaaaactacaagtccaaagaagtattcggtgcgacccaacactggggttgtcttgccacggtctacctgtgatgttgttgttacgatgcaagcacagcgggaagccccgcctgacatgcagtgcaaggataagttcctagtccaaagcgtcgttgcccctgctggtataactgtgaaggatgtcactggggatatgttacgaaggagtctgggtataagatggaagaggtcaaattgcgagtgacctatgttgctcctccacagccaccctctccagttccagaggaatctgaagaaggttctccacctagggcttctgaatcagaaaacggagatggaccttctggaggattcaccagagcactaagagagcgcattgagcctcaagacaaatctacagaggctggagctttggtttccaagttgactgaagagaagaattccgcgattcaacagaatcatagacttagacaggaacttgacttggtgaggcaggagatcagcaagaggcgtggagggggcttctccttcatcgtcgtcataattgttgctctgatcggcgccatcctcggctacctgatgaagtcgtaattctttcaggctgtcctctgctggccataccagaggcagtcgtgcaagttgtgtttgggaagaactcgaaaaaaaaactgttgaaaccagatgtcctgagatcatccttcatattttgtcgatataggagtgggtacgtgaggaatgctgggccagtgtttaagcttttcttttccttgttgtttctccgttggatgggcattgcggacgctgtaacttgaaagttgcatcaattgcttctgtttcatagttttatcttgctgagcaaatttgttttttagcaagtaacctgctgtttcattatccggaaagaacaaggtgattcccaagaaacaa

SEQ ID NO: 37388 - DNA, 1886 bp, Zea Mays
ccccccgagtgagcaacagtggggtctcaacatgggccgcctatgtagctcaacactgaaatgcggcagacgcgtgggtggtcggagctggggcctcagcttgatcccaggctgccgttcgcggaatctctcttcccactagcgacgactgggcgacctccgccgccacactaaaccctactccaggtgcccaggtctgcgtcgggcccttgccggcgacgagcacccgctaggtttatctttccagttaccactgtgcggtttccaagatggctcgccgtggattgatggaacaggacttaagcaaattggatgtgacaaagcttgacccactgtcacctgaagttatctcacgccaagcaacaatcaatattggtaccattggccatgtggctcatggaaagtctactgttgtgaaggctatatccggagttcagactgttcggttcaagaatgagctggaacgtaacattactataaagctgggctatgctaatgcaaaaatctacaaatgtgaggatgacagatgtccacgaccaatgtgctacaaggcctatggaagcggaaaagaagatagccctctatgtgatgtgcctggatttgaaaacactagaatgaagctcctgagacatgtttcttttgttgattgcccgggacacgacattctcatggctacaatgcttaatggagctgctatcatggatggagctcttcttttgatcgcagcaaatgaaagttgtccacagcctcagacatctgagcatcttgctgctgttgaaatcatgcgccttcaacatatcatcattctgcagaacaagattgatcttatccaggaaagtgcagcaatgaatcaacatgaagcaatccaaaaattcatccagggaacaatagctgaaggtgcacctgtggtgcctatatctgcccagctgaaatacaacattgatgttatttgcgaatacattgtgaagaaaatccccatccccgaaaggaactttacctcgcctcccaacatgattgttattcgttcctttgatgttaacaagcctggttcagaggttgacgaaattagaggtggtgtagctggtggcagtatcctcaggggagttcttagggtgaaccagaagattgaagttcgccctggcattgttatgaaagatgagaatggaaacattaagtgcacgccaatctactcaaggattgtctcactctatgctgagcagaatgagctccaatttgctgtcccaggagggcttattggtgtgggaacaaccatggacccaactctaacgcgtgctgataggctggttggccaggttcttggtgaagttggttcactacctgatgtttatgtagagcttgagatcaatttcttcctactccggaggctgttgggtgtgaggacgaaaggtacagagaaggcagggaaggtgtcgaagctcaccaaggctcaccgcgcctgtctgcacgagccgaggagagaaggttgctctgagccgtcgtgttgagaagcattggcgtctcatcggatggggccagatccaggccggtacaacacttgaagtaccaccctgcccgctctaaagcgtcatacacagacgtgagcttaatttgtgtgtgccaaagaaaaaaaatgagtttgttgttagtattgtctttgtgttactgcatatccaaagccttaggccattctagtttaattttgtttcgttcaattttggaggccacttccattatgattcctgtgaacattagcaggtcagaaaccagtactgtgaacattatgagtacgacgtgtggatcagtattgccaatgtcttgctttcacaccaaattttagacttgtattcgtagggttcttgaaagtaatgtccagaggagaattgagc

SEQ ID NO: 37389 - DNA, 4035 bp, Zea Mays
tgtgcctgtgccatggtctcggtctgcgcgtcctcttcgtcgtttcacggctcgcgttaccgtcccagccaagccgccgcttctgcctcctcgccgtcgctgacgcccaatccattccccccggatcctcagaggccagccgcttcgattacgcgcctcgccttgcaaaccctagctcccccgccctctccctctcccatgggcccgaaaccctagtacctagtatccccccttcatgcgcgcctccgcggtccccatggaggcctccgcttccgcccgcagatccgccgcgggccccgacccccgcgccaagaagccgcgcctcgcgccgccgcctcgggaccccagatcttacgccgccaccgcctcctccaatggcaacacaagcgccgccgagcaagcgctggtcgacgagctgctcggccagtaccggaccgcgctcggggagctcaccttcaactccaagcccatcatcaccaacctcaccatcatcgccggcgagaaccttcaggccgccaagcccatagccgctctcatctgcgccaacatcctcgaggttccaagtgaacagaaactaccatcactatatctacttgacagtattgtaaaaaatattggaaaagattatgttaaacatttctcagcaagattaccagaggtgttctgcaaggcatataaacaagttgatccttctatacatcatagcatgaggcacctttttggaacatggaaaggagtgtttcctctacctccgctccaaatgattgagaaggaacttggttttcagtcatctgccaatggatcatctagtgctgcaccatcaaggactgattctcaatccccgcgcccatccaatagcatacatgggatacttggaagtggtgctaagacaactgtaattgctgatacaggcggtgatattgagaggcctaataggctaggtactgatagaaatgcggggagacgattagatgcttctaatgctagacctaacatacaacgcactcagagggacccttctagcaattctcttcatgaaaaacaggcagttagagatgtgggaggccttggattctccaacatttcgcagcaggctgttgtgggaactggtcaagttcgctcaaaacctaaagctcaagatggaattggggggccttattatgcctctggtgttgggtcttctgaagaacaatttgacagacgcagcaacttttatgcaagcaaggatgctcgaccatcaggatctgtacgtttggaaagtgcacttcttccaactccatcaatcaatgccgatagagttggtaagccttcatccaacaaaagctggaaacactctgaggaagaagaatatgtctgggatgatgtacattctaaagcagcagaatatggtggtagccataatgtaataaaaggagaatggatgtctgatgatggcaatgctaagtttgcaaacctccaaagggctaaatgggcagatgcaggacctgtggaacgtatagatcccaacacacataaacttgataacgtgtcaagatttggacttggagcaggtcaagaaagaagaatttcagaatacatggatcaggaagagtaccttcttggcaagcgtgaggtggaagcaagaattgataaggaaattaggtctgatggacaacagttcccagcagctcgaggttctcctctctgggtgtcccaggaaaaaacactcctagacattgggttggagcctaggatatcaaggttttcaactcagccagcagagaggtccaccatttatactggcaccatgtcagcaggtatcacttcatctgtacctgttgggttatcaggaaactatgctggaaggtcaagcctagatactgcaaatggtatgccaataagatcaactgaggcttttgggcagcagaagcatagatattggtcatcttcccctccacaagctgacacatcttcatctactgcaccctttgcacgtcagggttctccaaatcctgccgagtctgatttttatccttccagatcactttctcgccaaaatcctcaagaatatagcaaaagagcattgccggtacttgctaaagattctcatgttgtggttcacaatgatggatttactcagggccaacctagtctacaggcaacccggcagacacaaaagtaccctatcttacagtcgaagtcgcatattaagccatctgatcaattgcaggcaagtttttcgcgtgaaaattctccatcattgttcagaccttccatcgaacttggagaagtctctttacccagtgactccacccccataagctcagatctgacaagtgctagtaatttgttggctagtctcgtaaagagtgggttcaaaccaaataaccacagtgatgcacaggctcttggtccaagtggaccacttccagtggcttctttatcacttcaaaatgctgctggtgaaaataccactttgcaggcacatacaccaaacacttctcgtccaccattgccaccacctccatcaacacagagtgcggagaaagctgcgccgctctcaagtcttctcagttccctggttgcaaagggattaatctcttctccagcctatgattcatcgagtgctgtcatttcacagccaaataaagcatcaagcatgaatgttaaagatgccacagcttcagctgtgcctttgctagctctgagaccttcagttggtaaggcgtcatctaattctgattcatctgctccaacaaacgcttcattaaccaaagctatcgaaattaagatgagtgacctcattggcctggagttcaagccagagaaacttcgcaagtaccatgagcacgtgattagcagcctctttgacgacgaccaaagccatcagtgtaaaacatgtggcaataggttcaggcttgaagaactgagcttgcacacatcaagctgtgggcaaaggaagtctgagactatatatactggtatcgcacctaaaagatggtaccctagcaagaacatttacattgatggatcacatgaaattgaggacagcactgaggcttctgatggagatttaggttctgcagaagaagtgtgtgagtttatggtcccttcagacgagaggcaaattatctgtgcactatgtggggaaccatttgatgacatatattcttttgagaagggggactggatgtacaaggatgcagtgtttttggattaccccaagggagaaagcagctgcagaaacagtgttgagggtgaagagcatgtgcccattgtccatgtaagatgtatgccaagaggctcaaacgatggcatggaggttgactagaatgagtattgttcacagcagttatgctcttgaggggccttgaggtggatgagcctaaagctggggtttgcacgaggaactgtgcatcatcaggttgtctgttgcaattggactgatgacatacatgtaggatgattggtggaaggtggcaggcgttatcagaaacaaaactttggcgaagatctggaactgcccgtggatttctcagtgcccattacaaagtgcttacacaaagaataaagctttagaggaacaatttggccatgcaaatcagaattatcaaaatcttcatattttgggtctccatctgagaaggatctttatgttgatggaaagaaagctgtgcaggtgcatgtcaaaagaatgtatgatttctttacgagggaaaaggggtatggtaccccacatgtaactcggatactgctgttttttgacgatacatttctcgtcttttggagtaggaatttttgtgtagttaagaaactgataatagaacattatagaggtaggactaaacaagttagggtgtgtttggcgtttggctttaacttttgcccactaaaagccaaaagaaaaaacaaaggtatgaatttagaaagtagctttttctaaaagatgactttgtgcaaaactgaaaatatctttgaacttgcttttagtggatttctgatacaactgtaaaaatatatatggaagaatttttagtggcttttagttgtttctac

SEQ ID NO: 37390 - DNA, 1501 bp, Zea Mays
ctatcttaagatggggcatccattgatcattaaggtcgaggttgatgaggatccagcggaagccaaaaaaggggatgatgatatcaaaactgagcctaagaaaaagaccaaaaccgttgttgagaagtattgggattgggagctttcaaatgagacacaacctatttggcttcgaaaccctaaagaggtttcaactgaggagtacaatgaattttacaagaaaaccttcaatgagtacttgaatcctttggcctcctcacacttcactacagagggtgaggtagaatttaggtcaattctttatgttcctgctacaaggaaggatgatataactgataataggaagaccaagaatatcagactgtatgttaaacgtgtattcatatcggatgactttgatggagaattgttcccaagatatttgagctttgtgaagggtgttgttgactcaaatgaccttccgttgaatgtttctcgtgagattcttcaagaaagtcgaattgttcgtataatgagaaagaggctagtgcggaaagccttcgatatggattacgaaaggttctgggagaactatggaaaaattttaaagctgggtgccatggaagacaaagaaaatcacaagagaattgctcctttgttgcgcttcttctcttctcaaagcaacgatgaattaatcagcttggacgaatatgtggaaaacatgaaacctgagcagaaggatatttacttcattgctgcagacagcctgagcagtgccaaaaatacccctttcttagagagactaacagaaaaagagtatgaggttctacttttcgttgaccctatggatgaaatggctatccagaatctgagctcctacaaggataagaaatttgtggacattagcagggaagatttggacttaggtgatagcaatgaggaaagagaggagataaagcagcagttcagccaaacctgtgattggataaagaatcgcttgggtgacaaggttgcacgtgttgacatatctaatcgtctgaggtcatcgccatgtgttcttgttgcagcgaagtttggttggtcagccaatatggaaaggctaatgagagcacagactatgggtgatacaaccactttggatttcatgcggtcaaggaaggtttttgaaataaatccagaacatgagataatcaaggccttgaatgcggcatgcaggaataaccccgatgatcctgaagccctaaaggctctggatgttctctttgaaactgctatgatttcaagtggcttgtcgcctgacaaccccgccgagctcagcgggaagatctacgagatgataaccactgccatcgcaggcaagtggtcctcacagtcgcaggcgcaacctgacaacacaactctgcagcacgcggcacctgggaggtcggatgagccgcttgaaggtgaagtggtggagccagagcccgttgaggctgatcagcataaggatgacatatcggcacgaattgtcctcataacttaa

SEQ ID NO: 37391 - DNA, 1075 bp, Zea Mays
caaaagcacagcccgcggcgcatgcgccgatccgaacccagaaatcttccattccaagctctcagaagtcgcagtcgcttcgcttctctctcgttcgctcggttcccctcgtctcgctctcgcccgtcgcccctcccgggacaagaaagcaacggaacatcgcggaaagcgagagccggcctgacctgtcctcactcgacctgcgctagccgactgtctgaagttttgcccccccttttctccttcccttttgggccgtgggccggccgcgcgccccggcgcatggcgtcgtcgcgggtgatggcgtcctcgtccccgccgcagcacgccggcgccggctcgtcctcggacctagcgcgattcaggagcagcggcggcatcggatccatgaacatggacaacattatgcgtgaaatctacggccccgaggccgtcaacgccaccgtcaacggccgggtggagccctccccggcggccccggaggctgctgcccggcggacgtcggaggaggtgtggaaggagatctccgccgccggggggctctccgctcccgtcctccctccccctcccgccgccagcaccggcgccggggccagaggcggcggcggcggcgcctcggagatgacgctggaggatttcctcgccagggattcctgcgccatggcggcggtgatggagggggacatggcgctagggttccctaactgtgaaggagacgcggcagggagcgtggcgggggaagcaggcggcgggaggggaagcaggaagcgggctcttctggatcccgcggaccgtgccgtcatgcagcggcagaagcgcatgatcaagaaccgagagtccgcagcgaggtctagggacaggaaacaggcctatatcgcggagctggaatcgcaggttatgcagctggaggagtatcaagcggaactgttaacggagcaggaggaccgacgccaaaagagacttaaggagctagttgaaagggtagttccagtcatcaggaaaaaatcaccacaagatcttagaagaaacaactccatggaatgattccaaaatctcaggttaaagtggcattccg

SEQ ID NO: 37392 - DNA, 2480 bp, Zea Mays
ccacgctccactcccgacacctgttccgtttaaaatctccggcgtcgacgtggccgcgtgcgcagccacaaaccctccctcccgccgcaattaacaatccgctaatcagctcggcgcagcccgaaccctccctctaatcgcccgctaaaccgctccctccctccgccaaaaggccagtccgggggcttttcctatctccacttgttggcgacttggtagtagactcgcggatacgatccttctagacacttcgacgcgcccgttataaaggccggcgcatccgggccatgaccacacagccccttgctcattggctagggcggggaaggaaattgcgggaggatgcgaagccattggtgtattgcatatggtggcaccaagcatgaggcaggaactgcattacttgcaagaaagtcacaagctcattccaatctgattctctaaactttggaggtctcttacacctaggcctgaaagctcctctcccattagttgcctacaacattggaaaagagtttctcacattatcttagaatccattgcaagatcatacttgtggctttcttgcaagttgtgcagttgttgcctcaagcttgctgcctccctttgccagagctatcggtaaaacaggaagtactgtcagtttccgagctacaaacaagctataagtttagaaaaataatttagaaatgtacaacaaagtctagtaatacattgttaaagataaatcaatactcaataagttcctcatgctttggatttggggataacatacctgttttatttacatgctaatatttggaccaacaaaaaataccttaggaacagccatttgagaaaaaaacaaagccttttagtcctaagcaagttagcatagcttagagttgcaacttctacatgagcacaataaacagaaaagaaagagaaaaggaaaataaatatatatggcaccaaaagctattaccatgttataatataaatttaatgaccgaaattataaacatttttacaatcttagcaaacctctcaacgtgtagtctgaatcgacagaacatcagtagagtaatttttgttacatttatagtccccaatgtcgtttcaaggcaaagtttgtttggtttctctgttttcctaaacactggcttctcaattgcattctcaatgtgcatctgtactagtttgacatctgtggctattgtgattcttcctggaatatcatctgtccatcacctttaaagcataacattaccctgatggccatgtgatctgtaggtccctagaaaggaaaatcgtgatttggaaaggaaattcatcaacaaacctgagtcggaaggatgcttaggaagcgggattcaatcaattatttctggggtggtctacagccaatgcatagtctctatctgtgtgtgtgttttgtgtttcccgtgcactctattcctttcgagaggcactctatgtcaggtgcctgaaatatggtttagcttcaggcaatgaagtggacgtcggatggagatccgagtgtccacgatgacagagaccgggttttgaatctctcgtctctccatctctcatgcgttcccaacttccaactccaatgccgtctccgctggctgatcagtgatcacctctgaccctctctggtgatgtgtacccattgttaatctctccaatgaagctaccctgcctgaccaggcccacaggctgtctcctgcatacggtggcaacacaccaacactgctggcctgccctaagacacatcttcgcgttgcgtccactggatacctgctttcttagtcagcagcatgccgaaaccctccatttgtgaaacctcagcggtgataggcggtggttgtcgaacgctggcatgaaggtgtgagctcccaactgctgaatcgtgttcctcttttacatgcacgtgtccaacaagaaccaagaaccgagattagcgctacctcagtacactgccggtgcaagataaacgaaggaagctgggattgcatggcactgcggtctgttatgtagccgtggaacagcaagacaaaaagacatggatattccttgtttggattggggtgtttgatccagaaacagtctcattgctaattgtttcattattactacaaatcttggtcgaggcgtgaatatccttgctcttgatataattatagtattttgaatccctattgtgttttttacttaagtgataaatgttgcaaagaaaccattagataattgttgaatgattagttattgattacattgattgattttgatttaatgaatcttaaataaaccagaagattcatgtgtatgaatatttgtgttgggaatttcttggtcacatgttttccgcataataatatcataaaactgtggaatgaaacagcttttgcatattccgctataactttttatagcacccctatcaaatttatggggtgtttggcatgcaaaactcgagtcaaatatttcaactcaag

SEQ ID NO: 37393 - DNA, 982 bp, Zea Mays
ttggaaggtggtggtgccggtgcatccgctgatcagccactgggtctcagtactccgcgatcgctccaccccttcccacgccttcaggagtgcaatgggggagctagggagattgctaatctatgaggcaacacgagattggttgccgacagtaacacggcagatccagtcacctgtgggcactgaggttgttgaatctgtcagtgagatggagccaataatgattgtacctattcttagagcagggcttgcacttgcagatctcgcaacatcaattttgccttcaactagaactttccatttaggtatggcccgggatgagacaacactgatggcctctgtttacttaaataagctacctgatagattcccgaaaggatgtaaaatcctcattgtggatcctatgctagcaactggtggaacagtcactgcagcagttgatctggttatggaacgtggagctgaaatcagtcagataaaaattatatcagctgttgctgcccctcctgccctcaagaagctcaatcaaagattcccaaggatttgtgtgtatacaggagccatggatcaaattgtaaacgagaaaggtttcataatcccaggccttggggatgctggagatcgcagctatggaacatgactccggcccttcggtgatggccatcgttaggaatttcagcaaaacccagatttagttgatgcctgcttattttcgtagatgagatttgtggttccactgaacacaaatctgtagttttgagggtctggacataatattttgacaatgtgatgtcaaatttcgcccttctattgtggcgatgtcctgataatggttatgagcttcatggagtgtttattttgagaagtgggatagcctgcaatcaccgtagctctaaacataacctatttgccttagctctgaacataacctatttgcttggtttcaagaatgatgggagtgctttgtttgaaaaaaaaaaaa

SEQ ID NO: 37394 - DNA, 1042 bp, Zea Mays
gacagtattattgagattgatgttgttttagaggatgcataggaacaaagcaacggctggcattgagtctggcagtggaggcaacaaaggatactggtatcagtgcttgcagctacatcttcagacaactgatgttcttgaagacgaagatttatatgcaaacctgggtgcctccacaaaagtctaaacccttatacatcttgttatatttcctctccaaatgatgctgtggtgttcagacctcacaaaggctgcaggcttggcgtagagatggatttctaagaaaagaaaaaaaatggtgcttcctgcttacaatttattagttatcaaccacaaacactgtgagcttttgcagacagaaattgccttatttatatttacagaaacagatcacactggttgcaacctgcactgcatgatgaaaatgatgtctacgagagaaggggggaaacagaagaagaatctgaagatttagtgaaaccaaaacagaaaggtacataaggtctgatagagattgagaatccaaacctggtgaaattaaagaatataaaggtcaaggacattgatgtggtaatgtattgtggaatcctgttttacaacttcaaccattgattccagtgaagctaatgccatggaatggaattctcaccacgtttgctggctgtacgagtacacaaatctgatgaatggattcagctaaaatgtcatagaatggacccggaatttatgctctttttttgtgctctctcagcatgtgctagctggttaagtactagcattgctattgggcgctattttgtatgcttgttctgctgtcttttggatgtaaacgaacaagtttgcatgcttgttctgctattggataagaagtattagcattgctatttgcatgcttgttctgctggttaagaagttaagaagtattagcatgtgacttgtggagatgtgcatgcttgttccgctcgcactgcttgcttgtttgcaacctgcagcaatctgtgccaaacggacacagggcacgacaggcagtgcaggtaaatgc

SEQ ID NO: 37395 - DNA, 2976 bp, Zea Mays
agaggacgattcacccgatgtaatacgcgattgttccaaccaagattcgaaggagaggcgacgcacggcctgactgtgcatcacatcgatgccttgcaccacatcgatgccttgcacctgtctctcatcacccccgtcctcggtggctggtgcggcgatcccttctccatccacagcgccgagagaggtctcaatggtgaggtctgccatcacgcacacaaacagtgggaagacctagaggcggcgggctgccatggtgaggtctgccgtctgccatcagcccatcacgcaggacgaataggaagaccatcagttgtgcgatcagcgtagggcgcctggttcggtccggtccggtccactgggccatcgggggcaaatcacaatgaaccagagagtgcaggagatacggcgggagggggtttatgtaaaattgctgctggacgttggatgaggaagggatggtccagattaaaagtgctcacatgtgcacgggagcgccatgagcacgggacacgatccctttttttttctcctcaaatctgaatcctgccaaaatacccgcagcccagctccgattccaacgaccaccgctccttcctcgccccagcctagcagcgcaggcgcggcgcagcgcaggccctgcgccgccctccgcgcacgtccaggtatccttcgaccgcaaccgcgcgcgcctctctccctcctcctgccgcaacacgtcctcctcgacgtcgtcgcctccgcccccaagaagtcgtacgtgatcgctccggacctccgtcgtttccttggatggatcggacgccattgttcatccggccggtctgcctccgttttgctcgctgaccgcccgcgctgagcccgcccgcccgctccctggcacgaggacgatgtagaggagcgcaagaacgggaggcggcgttggggacgacggggacgagatggaggggcgcaatcccgtgcagagattcgttgatagcccaaagccatacaacagaaggaaagcgcgcggtatgcaaacaaggatggattcgagtgaccacggcgaccgccaaggtccgagagcctgtgaagaattgccaggcaagatggataacgaccgtgccgatcgtcaacgcttgaaagcctgcgaattcccagccaagatggacaacaaccatgccgatcgtcaagtttcgaaagcctgcgaatcgaaaggcaatgcctgtgaattgccaggcaagatggataatgaccaccccgtccgtcaaggtttgaaagcccgtggactactgcaacctaagtcggatgctagtgaagatggcgtatgcgaaggtttgaaagcttgtggattgacagccaacaagatggatgctactgaccaatgcgaccacaaaggctccaaagtatgtagggtggtgacaaccaagacggatactagtgaccaaggcgattgtcaaaccttcaaagtatgtgggatagcagccaagatggatgttaacgaccatgccgatcaccaaggctccaaagccagtggaatgccaaccaagacagatgctaatgatcaatgcagcaaccaaggttttgttacatgtccctttaagacagctgagaggttagatcatcttctgaaccaaccagcaaacagatactgtgctgattgtggtgctccagatccaaaatgggtgtcaatgacttttggtgttttcatttgcatcaagtgttcaggagctcatagaagtcttggagtacacatatccaaggtggtttcggtgaagctagacgagtgggcagatgaacaggttgatattttagctgattcaggtgggaatgctgcagtaaacatgatatatgaagcatttgtgcccgaaaactacgcgaagccaaggcaagattgttcagcggaggagcgcaatgattttattaggagaaaatacgaggctcaacaatttttgactaacccccagctttcatgtcctccacgacgcaacgagaaacataatcaccaacagcatagtactagttcaagtcgacatggtttaggccattcattcaggaacagctggaggagaaaagagcacgaggccaaatcaacaaagaaaacaatcgaggtgggcatggtagagtttgtcggattgattaagatcgacatcataagaggcacaaatctagctatccgtgatgtcatgtcgagtgatccttacgttatcattaacctaggacaccagacaatgaaaacgaaagtggtaaagagcagtctaaatcctgtatggaatgaaaggctcatgctttcgatacccgacccagtgccgctgcttaaactgcaagtctacgacaaggacacgttcaccactgacgaccggatgggggaggccgagatcaacatccagccactggttgctgcagccaaagcccacgagacctctgctatcgcagataccgcgcagctcaacaaatggctggcgaaagatggcatctggatcccgagggacagcgccatctccatcgtcaacggcaaggtgaagcaggtggtgaatgccaggctccagaacgtcgagcgcggccagcttgagatggagctcgagtgcgtccctctcactcaatagcttgctgctcagtaggagtcgagtcctgagtccagattcacttacttgtgtacttcttcattagtctgcctccctctgtttgtgatgacagccatctgaaccgatgcaaatacttattgggaatgacgattctgtgctgtatacttgtatgtgtgggcaaacgaaacaaggatataccatgcccattcctgttgacatgcgagtctagtatacatgttacagttttctgctgtatctaccgagcatttcctgcaagttgctggaataatccattccatggactgcgagcctggtggttattccttgttttattatgataaaagtcttgacggttttgtaatgcaagctgcccccatcgggtttaattcctgccgcagtttcggcgtcaaca

SEQ ID NO: 37396 - DNA, 339 bp, Zea Mays
taatgaacaacataaacaactatgtcttattatcatatataaacagaaataatcattgaattacaaatgtaccttcaacttgaaggagatgaaagtacaagcgtgacgcaaaagtgaatgcccaatcagccccccacagtacgggggtactgttcacctatttatagacacaggtcacagcctatgcaaaattacattcatgccctttacatttgataataattctattgtaatctatcgaggtctgaatagccttttcatctttaagtcagtttcattttgttgctatcataccgaagctttcctgctcacaccttcggcgctgtatcaaccttcgta

SEQ ID NO: 37397 - DNA, 3834 bp, Zea Mays
atggatttgtccaggctcgcctccgtcgccgggcccagccgcgcggccccgcgggcgggcctgcagatcggcgccgccgggaatggcttccgcgtctgctccctgcggcaccgcggcgccgggaacgggcgcctcacgtccgccgccgccctcctccgcggcagcagcgggctcttctacctggctcccgcgcgcgggggccctccccgtctccgcgccagagggcggccgcggtgccagggcagcgactcgttggcctacgtcgacggccccttggaggccgccaagggctccggcgaggtctacgacgacgatgccaccagctcggggcccgacgacgacgacaatgacaagggccccgccgacgtggacggtctccgggagatgctgcagaggtgcaggaacgagctcgaggtggccaggctcaacagcaccatgttcgaggagaaggctcagcggatatccgagtcggccatcgcgctcaaggaccgcgccgaaggcgcccagagggacgtgtccgcggccgtcgccaccgtgcaggaggtcatcgtcaaggaggcggacgccaaggaggccgtccagaaggctaccatggcgctgtcgatggccgaggccaggctgcagctggcgtccgaggcgctggatgccaagcgggggtcggtcgggcccatggaggttagcatcgaaggcgtggaggaggaggcccttgtgtctgctcaggaagagatcaaggattgccgggcagccttgttgcggtgtgaggaggagctggaacgcatccaggaacagaaaatgaacctgcagaaggaggttgataggctcaccgagctcgctgagaaggcccagttggatgcatccaaggccgaagaagatgtcaccaatataatggtgttggctgagcaggcggtggctcttgagatgaaagccacgcagcgtgtcaacgacgcggaggcggtgctgctgaaagcggagaaggtcatatcctcggttgacaccgtggtggagctaacatcacttgctgaagagcagaaaagcgctgaagaggatagcgtttctgaagggtatgagtatagcagcaatggcactgatgatgttcctgtgagggatgaggtgtcaagtatcgagcgtctaatggtaggtgacttgactgttgagggcattgagcagcttgaaccatcccgtgaaatatatgatgaagcaagcagcgataagatgtccgttgagcctcagaaagaagctgagcctgattcagacaagttgaagcaagggaagaagcaggaaatggaacgaaaggagttcaccaaggaaccactgagtgctcaaaaatcactgaagaagagatcatcccgcttcttcccggcatctttcttctcctccaaagctgatggagagtttacacctacatctgtctttcgggggttaatgaaatcagtgcaaaaacaggctcccaagcttgttgttgggatattgcttcttggtgcaggcaagaaattgccacaagtattggaaaggtaacctccacgacaaagcccatagttcgtgagatacggcaaattccacagagagtaaagaagctaatagagctcttacctcatcaagaggtaaatgaggaagaagcttcacttttcgacatactgtatttgcttcttgccagtgttatttttgtaccattatttcagaaaatccctggaggcagtcctgttcttggatatcttgctgctggtgtcctcattggtccatatgggctctccatcatccgtaatgtgcatgggacaaaggcaattgcggaattcggagtcgtgttcttactgtttaacattggacttgagctttctgtggaaaggctaagttcgatgaagaagtatgtcttcggcttgggatctgctcaggtgctagctactactgcagctgttggtgtgatagctcatcgttttgctgtgctaccaggaccagcagcaattgttgttgggagtggcttggctctgtcatccacggctgttgtcttgcaagtattgcaagagcgtggtgaaagtacgtcgcgtcatggacgtgccacattttctgtgttattgttccaggatttggctgtggtggtcctgttgatattaatacctctcatatcacctaattcttcaaaaggaggggttggtttccaagcaatagcagaagccatgggaatggctgcagtcaaagcagtagctgctataactgccataattgctggaggtcgtctgttgcttcggcctatttacaagcaaattgctgaaaatcagaatgctgagatattttcagcaaatacactccttgttatttttggcacaagtcttcttacagcccgggctgggttatcgatggcacttggagcttttttggctggtctgttactagcagaaacagagttctccttacaggttgagtcagatatagctccttatcgtggtcttctgttaggacttttctttatgacggttggaatgtctattgacccaaagctgcttctgtcaaacttcccaatgatctctatgatattgggtctcttgataattggaaagacattgttggttacatttgtgggcagggtatttggggtttctactatagctgccattcgtgttggtctcttgcttgcgcctggtggtgagtttgcttttgttgcctttggagaagctgtcaaccagggtcttctatcacctcaattatcatcgttactgtttttagtcgttggcatttcaatggctctgacaccatggttagctgctggagggcagtttctggcatcaaaatttgagcagcatgatgtgaggagtttattgcctgtggaaagtgagactgacgatttgcacgaccatattattatattaggctttggacgtgttgggcagatcgttgcgcaactcctgtcagagcggttaattccttttgttgcccttgatgttagaagtgatcgggttgcagttgggcgtgcacttgaccttccggtatattttggggatgctggaagcagagaggtactgcacaaagttggagctgaaagagcttgtgctgctgcaattactttggatacccctggtgcaaactatagagctgtctgggcattgaacaaatatttcccaaatgtgaagacatttgttagagcacatgatgttgatcatggtgttaatttggagaaagctggtgcaacagcggttgtccctgagaccttggagccaagtcttcagctagctgctgctgttcttgcacaagcaaaactcccaatgtcagagattcaggaaagcatcaacgagttccggaatcgtcatctgtcagagcttacagagttgtgtgctacgtcaggaaattctcttggctatgggttttccagagttatgtccaaatcgaagtctatcagctccgatgatgaaagcgaaacagtggatggcgcactagcaatttgaagacgattagataaaatgggatcccttgatagtactagatcgattgcactgttagtagataagcttgttgcatgtagaaaaatggaataaaaattaatgcaagagctgtcacaaaaatcggcgtgcaattttgtatgttagagtacttatatatttcttctctcccccaaaaaaattgtttgcatacaactcttcacaaagaaaaataatacactctagcagtgcacgtgaaaatgagacccttgtaagcagggaagaaaatagatgtcagaatgctgaatacttcccatgcttgctcaaaggagcatatggtacagtcaggccagttggacggttgggacctggctttgggtatgtttagtacaatttttgggtgtgtttgggacagttttttaaagag

SEQ ID NO: 37398 - DNA, 1985 bp, Zea Mays
tggggcttgtggttttctggagcattcctactagtctgtgttgtagctgccaagaaatgagcttggggacctgcccggccgcggccggcgacgcgacggcagaggagctgcttcaacgggcgcgggggctggtgccacccgcccttgccgctgcgcgcgcggccactggcttcggtgggcggtggaaggctatcgcagcgaggctggagaaggtgccaccgtgcctgtcggacctgtccagccacccctgcttttccaagaactcgctgtgtcgggagctgctgcagtcggtggctgcgactctagcagaggccgccgagctcggtgcgcgctgccacgagcctccgaaggcagggaagctgcagatgcagagcgacctcgacgctctggccgggaagctggacctcaacctcagggactgctcccttcttgtcaagactggcgtgctgtctgacgcgacggttccggcggccccggctgcgtgcgcacaggctgacgtgcgggagctgcttgccaggctgcagattgggcacgcagaggcgaagcaccgggctgtggatggcctgctcgatgctctgcgcgaggacgagaagagcgtactgtcggcgctcggccgtggcaacgtggccgccctggtgcagctgctcacggcgacggcgcccaaggtcagggagaaggccgccactgttctgtgcttgcttgccgagtctggcagctgcgagggcctactcatgtcagaaggcgcgctgccgccgctcgtccggctggccgagtccggcagcctcgttgggcgggagaaggctgtcatcacgctgcagcggctgtccatgtcggccgacatcgcccgcgcaatcgtcggccacagcggcgtccgcgctctgatcgacatgtgccagaccggggactccatcacacagtccgccgcggccggagcgctcaagaacatctccgcagtgccggaagtccggcaggcgctggccgaagaaggcgtcgtgcgagtcatggtgagcctgctggactccggcgtcgttctcggctccaaggagtacgccgcggagtgcctgcagaacctgacgtcaagcaacgacagcctgcggcgtgccgttgtgtccgagggcgggctacggagcctgcttgcctacctggacgggccgctgccgcaggaatcacccgtggcggcggtccggaacctggtgagcgcggtctcagcggacagcctggtgtcgctttgcgtgctcccgcgcctcgtccacgtgctccgtgacggttccgtgggtgctcagcaggctgccgcggcgaccatctgcaagatgtcgagctccatggacatgaagcggctggtgggcgagcacgggtgcatcccgctgctggtgcggctgctggaggccaagtcgaacggcgcacgtgaggcggcggcgcaggcggtggcgagcctgatggggtgccccccgaacgcgagggacatgaagaaggacgagaagagcgtggccaacctggtgcagctgctggacccgagcccccagaacacggccaagaagtacgccatctcctgcctgctggcgctttcgacgagcaagcggtgcaagaagctgatgatctcccacggcgctatcgggtacctgaagaagctctcggagtcggagaaggacgtggccggcgcgaagaagctgctcgagaagctggaccgaggaaggctacgcagcctgttcggcaggaagtagccaccaggcgatcgatcgttcttcatgtacaaagatcccgtccgtcctgtttgtgtcatagcctctatgactatgatgaagtgaagtgcggcaggcagctgttcgttcatgtgaagtccctaacaatggccaaacgaatttctttctagcggtcccctcgcaatgctaatataaaatttcttcatggtgtcgtgggcctcagagaacttctgaagatctgcgaaggagaaacaacgagttgccctaagcgtcaataaccggctg

SEQ ID NO: 37399 - DNA, 3561 bp, Zea Mays
tgctagctggaggggctgtagctggacagtgactgagagtgagaggcagcagcggtccggtggctggcctccttgctggatgctcgccgtcagggagggaagggggaaccggaggatgccggccaagtacctgggggcgttggcggaggacaggcgcccggatctctatcgccaggtgggctgcgtcaccgggatcttgcaggccttcgaccgccgccaccatctcgcctcctcccacaagaggctcctccccccaacaggccatgcacccagcaatccaagcaaagggggagaatgcacgagatattcaccccaggttgttctggagaagaactcgagtaaaacttgggctgatagccaaagagcaccagcaacagaactatctcaaacctcatattcatcatcaccctcttcgtcattctcatcccttgatggcaacaggtcaacacaacaagacctatcatccactgaccgaatgctatttccagagaggccgtttaagagctcgccgaagctcaagagttcttttgacagtgacaatggactcgactaccctgatgatgcgcttaccaagtccaagaacatgcccatagttcaatccagcctgccaactcttggtataagaaatcttgtgaaggattcaatctacaaggatagccatgaattgtcagtcagaattagcactgaagaagaagtaaaagatcacccatccaactgtggagatcaacctatgcaattgaatgggcctcaccatgacagtacacaaggaaaaagcaagggtctcatggacatcaacgaatcgcttcgagtgctagccaagctcagggaagcctcgtggactcctcctgaatctgttcatcatgcaagactctcatatgatgctcctcggttctcatacgatggaaaggaagcaacatcaaaattgagggaggtaccgaggttgtcattggacatcaaggaaggtcacctttggaatcgtgaaattgactctaggttggacccaagcttgagttctgcagacagaaacagcaacactgttactgggtccaatgcagctttcgagacccagcaggaacagcctgcctgcaagcggcttcctagcgttgttgcaaagctcatgggtttggaagagttgccagagcataatcaaagtacagcatcatcacatgcatgcaataccgttcaagagaacaagcaagatgccatgttgaactccttgagcatctcctaccagtacgagcatgctcctcaacaagaaaggaatcctgattcaactgtaagaaatttacccaactctaagttccctgtccaaactgcaccatggaagcaacaagaaaggattgtccttccacgaaaactgccaaagggatcaaaaggagcccacggaagagaacctgctgcaccatggaaccagctgaaggatcttgattttcagcaaccaaacaaagaccttagagcacttaaacagattttggattctgcaaaaggactattagaaaataagaaacgggaggaagcatttatgccaaagctatataatggaaaccatgatgaccaagagatggccagtgcgaacatgagactgaaccgtaacaccaacaacatgtggatgcctgaagagagcaacgctgaaagctctttcaaatcgcctattgtgataatgaaaccttcaaaatctgcaaacctttacagcaaagtggattcttctgtcttcccattaggaggttcatctgatctcccacagccacaaacaagcaatagcactgatagaaggaaagcttcaacgattaatagaaccgccaaagggcaatatgcgaaattgagtccaagggtgcctacttctcaaccccttgtttcttgtgacaggagatcatatggaaggaatgatgatagcagcaacaaccaaaaatctagttcactgctggtcactgagagctcaaccagaagacagcagctgccaaggaatagtagcgtaagtatgcaaaagaacaaaaattccactagcccaaaattactacagagaaaacttgatccagagcggagggctagaccacctattccttctgctgagtctaacaaaagcgaaaggcaatctggagataggaacaattcagaaacagtgtcaccccgaagcaaattcagaaggaaacttgtgcgcccacaaggtgatgatggcatgcccattggattgaacaacaggacaaggagcctgtatcagcatgacaatgatatgtccataaggtcagatggcagtataagtgttgcttcagagctggatattataagcaatgacagatctacaggagttaatatttctaactttgagcaaggcattggaactccatctggaaggaacccacagaaagtgaaaacctcatacgatgcaaatatggacgtgccatctgtagacccttcagctgctatttcggaacggcccagtccagtttctgtgttggactcttcatttgatcaggaggatttgttccctaccagcaggactccaaattcacttgctgttgatgatgagcgcgaaacattagaggaaccctggaaaccatctgtcgctatacagtccaagaacaataaactcgcaaatgttgcgagcttgcttgagaagctccagcagcttagcgtgaacaaggatgaggatgcacctccggttgaccatattgctttcttgtgtgagacagagagcccagaccaccgctacgtgtctgagatactgctggcctccggtcttctgatgaaagacctaggttcaggacagacaggtctccagctccactcctctggctacccgatcaacccggaagctgatgtttgacactgtgaatgagcttctccttcagaagtttgagaaggaaaccgccgtttatgcgctcagttccttcaccagagcgaaggatccacctgcaaagacttttagcgggcaacagctgccgaagttcatatcttcgggaattgaagaactggatatggagcgatcgtccatcagccagaaggacagcagcgtgatacctgatgcagagatcctgcggaggctgcagggatggacgagcttcagcaaggagctcccggggatggtgctggagatcgaaaggtcgatattcaaggagctggtggacgaggtggtgcatggggagtctgctgacggcccggagatgaaggctgctggcagacggagaaggcggctctttgcttgatacggtttgtttgaccatcgccatccaccatttggatgggcctgatttgtgaagctgtaactttgtttgtcttgccatgagagtgagaccctatttcatctcaagagaagagggagagagagggggtagcgcagatttggtgagagacccgaaaatgggcattcgttcgtgctatatatagatactatgtataccattgtttcttgactccttgtgatttactgtggatgatgctatttcagtaaaaaaaatggacgaatgacagttgttttttgccatgtaaaaggcaaattatatacgatgatgagtagaccactatgttgtatgatgcataatatttatctataaaaaagataac

SEQ ID NO: 37400 - DNA, 933 bp, Zea Mays
cgggcttcaagtatcagcttcgattgcaaaattagcaacggggtcccttgtagagctggcacatgcacaactcctattcaagtaacatcatctcagttggtctcaaatgatatattcccagcagctgttgtgaaggccatgctctaccctggagctaccgtgagcagcctaactaaaagcaagacatttccgagttggaatgacctgtttgacatgtacaacctgacagaagcaaaaaatgcttctgcagtagttgatctccagcgtctagagatacttgccggaagctacttctgtgttgctggagcgctcattggcatcataaatcctgggaggatgactttgtttggtacccttttgattatctggggtatggtgaaagaagcactatttgggaagccagtgaacagtgatctgactcaatcaactcatgtctacccaaccattttgattgcacttatctgtgcattcatgtcaataacttacaacgtaaagaagacagcaagaagtagtactcctgtttctatcgctaagccactgataagttctgccaagtcaaaactgaagtagacttacaagtttaatcctcgtaactcttttgagatatttatttatgtgaaaaaaaacaggtttgaggatgacctgaggatgcttttggtgtatatctgactctttcaatactgtaacattcagtttcctttattgtattaacaattcgcaagggcacaccgtctgtaatgtttacaaaaaaaaccagctaaatcttggttttcccccaatgtttctgctatctaggcaggtttaattcagtttcatattgtatccaataagattgtagtctattttaccacaaggatggaaagttgtaattcctgacaggttctgggtcagttgttattcttctgtgtttggattttcatttggggggtcatg

SEQ ID NO: 37401 - DNA, 166 bp, Zea Mays
cttttattcattcgttcgttcgttccaatggacacgaaataaagccgtttccatcaacatgagtccgcatgccacagagccaaatggtttctcgtcctgccacgtcctacggctttgtcatgtaccgtcgcgacgacaaaagcagcacaaagttattaccttatta

SEQ ID NO: 37402 - DNA, 1959 bp, Zea Mays
cggcccgcgagaggggatggcgtccacggctcgcccgctccgctcttataacagccgcttcctacgtctctcgcgcatcccttccgagcggaagcggcagcccgtcaggttatagctcactcttgatcgcttcctggtttgctaagcgatttgcctctcgtggttcggtgacggatcggaggcgctgcgaattcgaagctggtttctctgggctaagtcgattcggacttacttgttcagtaggtgtagtgtaggcgtgtagctcgatagacgagaagaatatttggcgtcgaagtttcagctaagcaacgagatcaggaagtttcagcaaagctcctggattaaatatttggcatcatagaggattcaaatctgccggaaacctgtatcttcatccagtatcaaggggaagttctgttgttgtgtgttcggtgatggatacatccaaaagcaagcaaggaccagaacatctccttgttcttgtccatggtatcatggctagccccaaagactggacatatggggaagcagtgctgaagaggcggttgggtgatgattttttcatatatgtgccggtttatgaactaaatggatgttaaaaaaagtgtatgcaaacatctttgtctacagctagttcaacgaacagctacaccaaaacctttgatgggattgatgttgctggaagaaggttagcaaatgaagtcttggaagtggttaacaagatgcccagcttgagaaagatttccttcctagcgcattctctgggtggtttgtttgctagatatgttattgcaatactccactcagtctcagtggaaacaaagaatgcaggacagagtagtgcacttattgttcctacaacaagagggccagcaaaatcgagatgtgcttcaggattaggttctattgctggattgcggccaattaattttattaccttagcaaccccacaccttggggttagagggagaaatcagcttccgtttcttcaaggcctatcaatcctagaaaagcttgctgcgcctttggctcctttaattgttgggcgcaccggtgctcaactcttcctcactgatggtgatcctagcaaggcacctctcctgttacagatggcatccgactgtgatgacaaaaactacatatcagccttggcagcttttaagaaccgtgtcctgtatgccaacgtctcgtacgaccacatggtcggctggcgaacgtcttcactaaggagagagaagaatcttataaagccctcacatcgttcactggatggctataagcacattgtgaatgtggaatactgttcgcccgtgtcatcggagggcccacatttcccttccaaggctgccagagctaaagaagctgcacagcgatcgccaaaccgagaaaataccgaggagtaccaccaaatgatggaggaggagatgctccatggcttgcagaaggttggctggaagaaggtggacgtcaacttccattcgtcattctggccttactctgctcacaacaacatacacgtcaagaacgagtggcttcacaatgctggcgctggtgttatcgcgcacgttgcggacagcatcaagcagcaggagtcacggccatgtcttcctgccaatctatagcagtagcattcagcaatccatttgttcaaattatctgtcgctagcaaataaacccatgaccaaactctgttcgtcagcatccactgagcggcgaaatatttgggactgggacacacaataagctgtgtatcattatcggccgcctaggttttacattgtttgatgtcaattgtcaaatggcatgtgtttcctcatggaacagacgaagcattcgaagttgatataaagacaacctaaattgtcatatatgctaccgatggttcgtacccaatccagcgacgacgtcgatgagatttgggttagattgtttgggagccacaagccccttgcaaatcgc

SEQ ID NO: 37403 - DNA, 2028 bp, Zea Mays
gtagagttaatttgtatgcaactctcatttctgatgtgctgatgtgattgcttgattaatatttatttttggatcttgtttgagagagaatgggagttcccataaaattatgatttatggattcttacaattgataacacagtcacaaagtgacagaaaataaactaatagcatagaacatcttctgataatatccttccacaggtactacaatgatctgcatgtttttgatttggaccatttcaagtgggaggaaatcaagcctcgacctggatgcctatggccaagtccaagaagtggctttcaacttgctgtttaccaagatcagatatatctatatggtggatattttaaagaagtttcttctgacaaagaaaaaggaacagttcatgcagatatgtggtctcttgatcctcgtacttgggagtggaataaggttaagaaggctgggatgccgcctggtcccagagctggtttttcaatgtgtgtgcacaagaaaagggctgttctttttggtggtgtggtagatatggaagttgaaggtgatgtcattatgagcatgttcatgaacgagctgtatggtttccaattggataaccaccgatggtacccgctagagctcaggaaagacaagcctgctaaaatcaaggcaaggaatatcaaaagaaaagaatcaacgaatgatgtagaagctaatattattgatgatgagggtgatgaggtcatggtggacgtagaagaagctattgaaggacaacctgaagtcaatggagtttccaatcagttgatcaaaactctgaatatcactaaagatggctcaagcagaagcattgatgttctctctgattcaacagcacaagaatcatttttggaggttatttcaatctttgcatttgcatttcagtgacacttccgttgctcattgacttgtggtacggacaggcggtgaagcccagtggtcgtatcaatgcatgcttggccgtagggaaagatatgctctacttgtatggaggaatgatggaagtgaaagatagagaaattactcttgatgatctatattcacttaaccttagcaaacttgatgagtggaagtgtatcatatccgcctcagaatctgaatggttagaaatttctgaggaagaggatgatgatgatgatgatgagactgatgatgatgaaaatgaagagggggatgctagccagacagatgaagatgaagaagagtctgatgaagatgctgcaaagaacgtgtccagtgctgtgtctctgctgaagggtgaaagtaagaccatgcgtagaaaagagaagcgtgctcggatagaacagatcagggtcatccttggcctttctgattctcaaaggactccagtgcctggagaatcactgagagatttctacaagaggacaaatatgtactggcaaatggctgcctatgagcacactcaacacactggaaaggagctccgcaaagacggttttgatcttgccgaaactcgattcaaggaactgaaaccgatacttgacgagctggctgtgctggaggccgagcagaaagctgaggaagaggccagtgcgtcgactagttccaagagggacaccaagaaacccaagcagaagagcgcacgaaggtagctttggttctgaacgagtgtgtaagcggaagccagctttagatgaagttgctccaggaagaggccagtgcgtcagctagtcccaactcccaaggtgtgaagaggggacaccaagaaaatccaagcagaagagtgcagggagatagttttggttctgaacgagtgtttaagcgtaagacggttttaaacgattgctcaaatgctcaagttcctttgaggggatttccattttctttttgaacccaagtagacaaaattgatatttgttgttttataatagtgtatgtatatactcgtacgttgaaatttgattcatgtgcaatcttgaccgtatattctcccactattcgactaaacgaacgatcttcctccacacagcatagaccatagagctcca

SEQ ID NO: 37404 - DNA, 914 bp, Zea Mays
gtcgtagtcgtcgtccttctcctgatgtgcaagtcgccgctgtctcggcccagacagcgaccccaagcatctcaagggtgtggagatggagatggaaatatcgtggagagaaatctgcgattatgaaactgccattgttgggctttgacagaatcgccggccattggttggcccattttgtcatctcctcattaatccattcccctgtccattaaccgacggcgtcatctccagctccactccacttgactccgtccccgggcctgggcgaaccctagcgccgccccgccaaggttgcttcagagttctccgtcgtgcagagacgatgcagccgaacgaggtcgccgacaaggccattgtcataatgcagcacgccgcgaagcaggtcctgggtacgtgcaaggagaagctccacctggggaagccactcagcgtgtttgaagtgaaggaactaaaagaagcgcttgaagccattgccgaagcactggaccaggactcgctgctttgccaagttgctttggatgcgggtgctcccagcttagtagaagatcactgggacgacgaaggcggagaagccgtggtggcgggtctcccatggcctgaatccccacgtccggaggacttcatgtcccttgaaaagcacatagaaacctactggagcgtcgagtacgactcggacaatatgctgcctagcttatctgattagattaggtggtagatatgatggattaattcttcttcgcaagcaatttttttttcttgcattccttcctcctcctcccaccttccttccctctatttgtaaagctagcacccccggccaatcaatctcttttgaaggatgaaatgttactagatgcatatcctgagaatcatgcaaaaaatatattcatcttaaacacacaataaccaac

SEQ ID NO: 37405 - DNA, 1478 bp, Zea Mays
aaaattcgtcacaggtctcctggtccaggccgccgccggttcaatctctcctctgacttctccggctgtcctcgactgcgaacccgatctcgattcgatccccaagccatcccatggcggctgccctctcctcgcggcgtgccctgcacagcctccaccgccgcctcctcttccacccctccccctcacccgccgccgcacgccgcgcgctacccacttccactcgcagccccatccccgcacactcccccaccttctccttctccttctactcctcctcccgcttcttcaccaccgcgcgccccgatgcgaggctgcggcacgggatgctgccgcagcggctgataggcggggtcaggtcggtggcgaacggtgggtcgaaactgggaccgctgggtcagggggtcaaggggctggggcggcccatggaggcggcgaggagcgcggccgcgcggtaccgcgcggccgtcggcctgcaggtcgaggccttctggcggcgcaactccatgatcctcgtcggtgcggggggagtcatcgtctgtttcttgctctggaggatcatgttcggcatcgccagcaccttcgtcggcctctccgaggggtatgtatgcccgggcaaggttaaccataaaccctgacaaggtttaccggctggctatgacaaaactcaatacatctgctgccatccttgaagttatgggtgcgcccctaactggtactgatgtcagagcatatgttatgtctggaggaggcccgaaactgaaggacttcaaatttaagcttggcagtaaacggtgcttcctcattttccccatcaaaggatcagaaagaaggggcctcgtaagtgttgaggccaagaagaaaaatggacagtatgacatgaagctactagctgttgacataccaatggcatcaggtcctgaccagcggctgttcctcgtgggtgatgaacaagagtacaaggtcggcgggggcttgatatctgagctacgagacccgatcgtaaaagctatggccgcggagaaggagtttgactatcttgacgagagagaggatgaggaggacgagcggagggagcgtgaggaggcggagcaagaggaggcggaagcattgaggcgcgaggaggaaaggctgcgccaggcgggtgaagagcgtaggcggcgggaggaggctgagagcctggagaaagctacgtgacatgacttactgtactgactttccaccttgcctcgtgcattgtctcctacctctgtccctcccggagtgtagcgatcagcggtttccacagcaggagattgcttccgagttcatttggagttcctggtggtcaattcggcgtcaccagtctcaaagttgttgagaaggaaggaataattttgaccgttacgcgacaggtcacttcggcgaagcaatgtaatttatagtggttgatcagttgttaacctttttttttgctgcacgtctgagcgcatggagtt

SEQ ID NO: 37406 - DNA, 1341 bp, Zea Mays
tcccatggcaacgcctaggtggctgtggctgccatgatgggcgctctcgccacgccaccccgccaccccgccatgtgcgtgccgcttttgacagaagaggacgaggcagatctccagtccccggccctccgtcccctcctcctgcgaaggctcctccagcaccactagctagagctaaccccgtgctgctgctgctgctactacctgctgccgcgcgccgttcgttgccgtgcgggcgtgttgtggtccgctgatctcgttcgcgggacgccggggggtggtggtggtggcagcggtggttggtggtgcgcggcgtgaaagaaagaaagaaaaaaaaaaggcccgccgctttgcgctgctctgcttccgtaggtgtcacgagatttggccctagcctttcgctttcctttttcatctcgctcacaagggaagggaccgagggacgagggagacgttggggaggggagcgagcgagccgtaacatccgagctgttccaatggcgacccctgccgttgctttcgtcgccagcgctttgttggggcggtggtagcgctaggagcggagcagtactaggttggtaggtggttgtagctttgcgcgtgacccgagcgcgcgctcgctcgctcctgtgcctctctacctcgcttgcgtgcgccgggaaggcagtgggtggctggtcggttctcgcaagaggttgctggtgctgttcctcctcccccggttgatgagcatggggcattgctccgagcagcggacggggttcgaggtgactaaggactggaacggcgccgaccagttcgcgatccggtccccgcggggggcgtccgttcgggtctgcctgcacggcgggcaggtcgtctcgtggaggaaccaccgcggcgaggagctcctcttcagcagcagcaaggcaatcttcaagccgccaagagcgacccgtggtggcattccgatatgcttcccacagtttggaaactgtggaacattggagcagcatggatttgcaaggaacaagatatggacaatagacgatgaggctccacctctaaattatggtgataataacagcaacaaagcttctgttgaccttctgctaaagccatctgaagatgacctgaagtgctggccacactggtatggtggcttgtattccctttggatttggatgtagaaattttgcagatggttatggtttatcataacctggctctgtgtcattttttcatggtgtatataagggactagcaatgtgtaataaattaaagaaaccactatttatttagttctatctctctctctctcccaatcatccatgatcaattcaaaggcatgttgcttcttcc

SEQ ID NO: 37407 - DNA, 329 bp, Zea Mays
gccaggagctatccatgcatttctgcatgggcctcatggccgagctatgctcaagtgccgcctctgattccctttttttttttttaattttcttctccccagccgctgctccactcggccgccagggagcatcacgcttgtttctttctctgattctttgtctgcgcagccgctagagcacagagctactggccgaacgtgcccgagtacggccgttcctgcgcgctgtctctttttctttttttttctttctttcactgtttactgattttggagattactaacgcacggttggcttcaatgaaccggagatggccggcctgagccgc

SEQ ID NO: 37408 - DNA, 1496 bp, Zea Mays
gcccattcctctcatcccagcgaacgaccctccagcacgccatccgcttagccgccccggagcattgccatcgtcgccatcgtcgccgccaccttctatcccggtgtggagcgggagagaacccgtctgcactcagaagctggtttaatccggtgggagcacaagtcgtgtctaaaatattcagattgctaagatgttgggtcatggtctagtaactgatccctcaagaaccttacgatgtccagttaattcaagggtatcaagtgcacccttggggcttgtttcttcgttgaatttcaacaggggatgcaagggaaagaacaaaatattcaatgtggatagacacaccaagtatagtacttctttctgttatgcgccaagaaatgccagaatcacaccactagcaactgcatcatttggggatatggctgattcttcaactcctatctttccccgaatccatgtaaaagatccatatcagcgtctcggaatcagcagggaagcatcagaagaagaaattcgagctgctaggaactatctgataagcaagtatgcaggccacaagccaagtgttgatgcaattgagtctgcccatgacaggattatcatgcagagtttctttgataggaaaaaaccaaaaatgaatctcaagaaaaaatttagggaacttagtcagtcacgtgcagtgaaggctattcaaggcagatttcaaacaccacgtagcaaagtcatttggcagacagctattgcttttgtcttgcttggagtgcttacccttgctttccctaccgaagaagggccaaccctccaggtggccatctcttgtgcagcaaatatctatttcatttatcagagggtcaaaagtggatggcgagcattcttttatgggtttggttctttctttgcttcctggttccttggcaccttcttgatggtatctgtaattccccctatactccccggtccaagaaacttggaattgatgtattaaatacagttgtgttcgaatagatcatatgagataatatctcatcagtcttcttttggatggacatcacgtcaccttggaacattacagtccgttctccctaatgctgatcgcgtttgcaagataggaactggagaagaataccttacttaggttgctacgcctgatctgtgatattggtatctctcgagttgttgcgtcagcattgtcgtctcataatgtgcagcctattagtgcactgttgattggcgaatcgtcgtctgcttcggctatccatttccattatctaaggactaaggagaaactggcctcggctgtggaaggccgtgacccagagccagtagtgtctggaacaattagtgcgactttactactaaatggggctttggtcattcgtcatttcctaattggattattaatcgcctgatcccttattgtactcattggaatatagtacatcacttgatttggtgtgagcgataatattaaggtgctgtttggttcacat

SEQ ID NO: 37409 - DNA, 3498 bp, Zea Mays
gctgtcaatcgcctccccactgcggcagatccgcaatccgctcctccaccaccgcgctcctcacccacgccagggacaagactgtctacctccacgcccgcctcaccaactccgcggccaccgccaccgccacgcccctcccccatggtcgtcgagtccgagtggtggaaccagcgacgcatgcgcgtcgagggcgacgtgaaataggtgctccaccgcgggcacaacgggcacagtggaggtggaacgagcaccatcgagttctggttccaccgaatccaccgctcgcacaccggatccatcgctcccacatgcccgcacaccggatccaccgctccctcccccgcgatggcctggttccaccgagacaactgcggggctagggtttggattcgtgggtggagcccaaggctagatccagcagggggagggaggtagaggaggggagggaactgctggtggtcggcagtgggcgaaggcgcgacaatccaggatatggattcctgagcgtcacccacccgcccatccacgtcgcgcggtgtagtcatcccctatccgcagccgcctcgctccctctcccacaacaaatccattctcctcctcccactcgacgaggatcgcgaggatgctggaggacgtcgtcgctgtcacgcttgacgttagggcctccgatgcttgacgttagggcctctcgcttgaagaggaacacaaacagagctcatgttttttattttgctctgcattatctactgcttctctgtgggggcgttatttacagtatgtggcctgtttgttgtgttgttcctgcggaagggcgggcgggccgaaggtgtttaagaaaatgttgttgtcaacatcaacctcctggaagggccagaacgcaggcagcgcctcaactcgtcaccccatcagcacggatgattatcacgagtacttcaagcgctcattttaggaagacatcgctgcgcaagtgcctcaaggagtggaatggtgagcccctgtccatctactgaacagagaaaataccaggagcaaatgactgcatttttagttaatccttttattcctaaattaattgtgtttgttaatgcttttattcctaaaataagtaaccgagctcgggattcttcgcaatttgatttgcgagatcacccccataaaggcatcatgaatctttatgcctgtaaagacatcccactgtctctttcgttttcgataagatgttttggccgttacataatgcctgtaaggtagaatgccattgcagttgttgcatcagaaagcagccatttaacgccattgtaaagtgagtgatgattaaatacaaccacacttctgtctctcaggtttctgtacatggagtttttattgcacctcttcttccccagcaattagtacttgcagttagactaaatgaatcttgaatgccccttaactgttggctttacatggaactacttttgcatataccagacaactattttgaacttcaatatgtttttcaattccagcaattgatcgaaacatgatatatttgacatattcatgatggatttttgtatttgatgtgtcgctttttcatctatcaatgtaattcttggacataacattgcgcacaggtaccaaattcacacccttgttattgcgagttctgtaaatcatgatgttcacatgtgatggtttgattcagttcaatggttagcaagctatttgaacatgatactatagtagtgcatatttgctgtacaaatggccactgcccagctatttgcataagatattatgtttctcctgtgacattttctatgccacatacatttatatggcatttttgtgcaatttagtaccggtttttggttgatggtgtctggaggtgtgatgagacaaaaccctttgtacgtgatgaatatggactgatcagcaatgaagtgcttgtggaaaacaatgtactacccgttgtgcagccagagccttctatcagaggaactaatatggataaggatgcccctggagccatcatctcagaacccaagcatgcaaatagcagttatccgccatgtggtctctggaatattattacacaataccatatatgacgttgttcccctttctagcaagttaacagttttggacactcagcttcctgttaaacaagcatttaaaataatgcatgatgtgggaaccataacaggcatgctcactgcatcagattttgttttaatcttgagaaagttgcagagaaacattcaagttattggcaacgaagagcccatttctgcttggaaagaagcaaagctacagttctatggtgggcctgatggtgctgtcatgcagagaacgccattaatccatacaggcaacattgatctcagggccaagaaagaagctcaactcggcatgcttcctgtttgaagcaagggcaacaaacttaccccaccagatctctgtcgccaaagcagggctagtgaataagctgtgtttcctcccggattgtcactgcttttatatttgtgcatttattttgagggaaacattttgcccaaaaaaggcctgcagtgcacgttttaaacaagtcatttgaaccaactcttatgctgaaaactgtatgtgatactgcagaaggcaacacactagcttgataggaaagttggttggcaagcataggtagtgtaaccacttcaccaatgatatcagtactcttcttgcctttaactcgtgcatctttaaatttagcctcttcaagtctggttctcatggcaggtggactctggtgccttcatatatctatatatatattttaagttgacgatcttcgtgatgctgaaactgatgaagacctccgatgaaaaaagagacatgctgcacatgcacgagggtacttgcagatcgatgtcggctctatggacgaacactcgaccaagtcagatgaggagtatgagggcctagccatgcgcgacgtgatggctactggtccgacgatgagcagcaagctgtgagttaaagatgaactcacctgccctggagagtaacatccataggagtgaggcaaaatggctggtaccaccacaacatggacccgttcctgaagatgtccaaggaggtggtagccgacaccataatgtcttgtgtcattgtgtcaccggtcggcaacacactgcgctggtaccggcgggtgttgtgtttcttaggcgtctgcttctgtgctttgagttgtgctatagagtggttgtgccaactactgattttaaaagaaaaaggtgagctgagaatcattgttgaaaacaaacatgtaattgttcgttctcatcagttgtgccaactaccaagcatttcattgatcagaatttatcgttgctcatgagaaccaaaagtaagacacttctcaataacattggatgcaaatttctgctagcttatcttcactatcttttctcgtatcaatataacacacatttatacataatttttgtgttattatatgttttcgttgcaacgcac

SEQ ID NO: 37410 - DNA, 2567 bp, Zea Mays
atgccattgccatcggccgcccagagcgctctcgtcgtggcggccgtcgccatagccaccgccaccgtcctcctccccttcccacggacgccgccgcgggaccgcttcgccgacatggtgctggccaacggcaccatctacaccgcggaccccgcccgacccttcgccgacgccatgtccgtccgcggcggccgcgtgctccgcgtcgggacctacgagtccgtcaaggagctcaagggccctcgcactcgtgagctgaatctcagtgggaacgtggtgctgccggggttcatcgactcccatgttcacttcatagacggtggattgcagcatgcgctagcttcctaatgctactctctgatactctgcagctagcgagggtgccacttcgtggggtcagaagcaaagatgacttggttgccagggtcaaggaagctgtcagaggtagtgtgctagtattttgttccaatgcattttcctgccacaaactactgctgtgatgcaaagacaggttcggttacctatgcccaaattcagttctgaatcatctcattctgtgtagtaacaatatccaaataaacaagagtagattctttgtcagagttatgctctgcttggtgttctccaattctacgtttgaatagacactatgcaatatgttctgcttgggtatggcaatctattcgaatgcccgtttctgtatatcatgctcccaacataagtttggttagtatctaactgcttctgttttatcaagttaacgggttagtgttgccaaaagctttctaccaatattactaagatctattttcctaacagataagcaacctgggcagtggatcttgggcggaggttggaatgatgattttgggggagatggtctcccggctgctgtttggctggatgatatctcacctgataatccagtctggctctctcgcatggatggtcatatgggagtagccaactcattagctatgaagattgctgggattgacaaaaacacaaacgatccaattggtggaactatcatacgaacaactgaaggagagcctactggtcttctagttaatactgctatgaaacccatatttgatgtcattcaaaatgtttctaaccatgaaagaagagaggctcttcttagagcaagtagacatgccctaatgaggggagtgactactgttgttgatgttggaagttacttccctggggcctcagctgagaaaacgtggcaagattttgcagaattagaaggattcacttgtcttgtttttatctatgaccttatttgtactcctggcatactgacacaagtattgataccactacagaaatctataaatgggctcactctatggaaaaatgattttgagagtatgcttattcttcccaatgcccacatggtctcgtgtttccgatcttattagtgaacatggtcgatcgctaagtcagtggatccatctaggtggtgttaaagctttccttgatgggtctctgggttcttcaagcgcgttgttccatgagccttatgagggtgatccggataattatggtctccaaatgacagatttagacagcctacttaatagaacactagaatctgacaaatctggactccaggttgccatacatgcaattggggataaagctaatgacatactactggatatggttgacaagattgttgatttaaatggagcgaaggaccgtagattccggatcgaacatgcccaacatctggctccaggtgcagcaaaccgctttggcaagcatggtaccattgcatccgtgcagccagatcatctactagatgatgccgaccatgcttggagcaagattggggtggaaaggtctgagcgaagctcctacacatttcgatcactgttagatggcggtgcgcagctagcttttggttctgactggcctatttcagacatcaaccccttgcaagctatccgatccgcagtgttccgcaagcctcctggatgggaggtcccctggatccctgcggagcgcttgaccctggatgaatcactgaaagcgcacacgatgtctgctgcctacgcctgcttcctggaccacgccgtgggcagcctttctgaagggaaatacgccgattttgtggtggtaccttctacatcgtgggacgaattctccagcgatttgccggggcatgtcctggcgacgtacgtgagcggcaggcaagcttatccatgacagatagcagttgtgtaagtgttggagaccaaaaagagcagcgcggacagtccggccctgaggccggaaggccggacgatccgcggtccggacagtccgcggtgatggcgcggacggtctgcgcgtgcgcagagtcagttaggatttctagtttctcgcgggatttgttacctaaaaccgcgggattaactcggaaatctgttggaagcggatccagacctcccctttatatcgatgaagggctacggccgattgaactccccaacaatcgaacaaatcaagtctatttctcgtttttaccttacgcattaggaatagttctagtctagttctagtttagcctctcaatc

SEQ ID NO: 37411 - DNA, 347 bp, Zea Mays
tgatgagccacttagggaagcaatgaagaacatgccaattggagctatcaaaccaaaagaagatgaagaagaggtgcaaaacattgacaggccttcttcattaaatgtaccacaagatgatgaaaaagatgagaggcatgcaaataaagatacatttgtctctcatgaacaagcaagggtacaagccgaagatgttgatgctccaggatcttcttcccaagtggttaacaggagaaattcatcactacttcaagctcaccctcaaaaccaaatcattgggagtccttcacaaggggttatcactcgatcccatagacatgcttcttttattgaacatcactcctttg

SEQ ID NO: 37412 - DNA, 3672 bp, Zea Mays
gctagggcgaggcgacctcgccgtctccaccccgccaccgcctgcttcacgccgcgctccctgctccgcgtcgcctttattatagtctgatgccactacgcccgccaaggcacctgccaatccctcctctttcaactcaaaatccccacaccccgggcaggcgccccgccgcgggaacagggagactactacagcaggcggggtccgggggccgagagcttctcgccgcggccgcagtcgtccgggaccgaggtggggcgccctcctgcgccggctcgtgtgcttccgccgcctcgtccacaggcttctggttcaattgaatgatcacaggcatggagcggaatggcgagagccacctcaaggacccgcttctgccgacgacatctggcgcctctcctgctggggcgtctccaaggaaggagaggaagacgaggaaggtcctgttcagtgtccggggcatctcctgcgcttcttgtgccgtgtcgattgagaccgttgtggccggcttgaacggggtggagagcatccaggtctcctcacttcagggccaggccgtggttcagtacaggccagaggaaactgatgcaagaaccataaaagaagctattgaggacctcaactttgaggttgatgaacttcaagaacaagaaattgctgtgtgcagactacgcataaaaggaatggcttgtacaagctgttctgaatctgttgaacgggcgcttcaaatggtacctggagttaagaaagctgcagtgggtcttgctctagaggaagccaaggtccattacgatccaaatgtcactagtcgtgatcgcataattgaagctgttgaagatgctggatttggtgccgatctcattagttctggggatgatgtgaacaaagtgcatctaaagcttgagggtgtgaattctccagaagacaccatactcatccagtctgtactggaagctgtggaaggggtgaacaatgttgaatgggacacagttgagcagacaatagaagttgcatatgatcctgatttcactggtccaagattacttattcagtgcattcaggacactgcacagccccctaaatgctttaatgttaccttgcactcaccaccaaagcaaagagaagcagagcgcaatcatgaaattaggaattacaggaaccaatttctttggagctgcctgttttcggttcctgtattcctgttctccatggttcttcctatgctttctccttttggggattggttggagtacagaatctgcaacaacatgacaataggcatgctactacggtggttgctgtgttccccagttcagtttattgttggttggagattttatgttggagcctatcatgcactcaaacgaggatactcaaacatggatgtgctggttgctttgggaacaaatgctgcttacttctattctgtgtatattgttctgaaagcacttacatcagactcatttgaaggccaggacttctttgaaactagcgctatgttgatatcttttatattgctgggaaaatatctcgagatagtggcaaagggaaagacatcagatgcgttgtcgaaattgacagagcttgcaccagaaacagcgtgccttcttactttggacaaggacggaaatgccatttcagaaacagagatcagcactcaattacttcagagaaatgatgtcatcaagattgtgcctggcaccaaagttcctgttgacggcgttgtcataaaaggtcaaagccatgtcaatgaaagtatgataactggggaagcaaggcctattgcaaagaaaccaggcgacagggttattgggggtactgtaaatgataacggttgcataattgttaaggcgactcatgttgggtcagaaacagctttgtcgcaaatagtccagttggttgaagctgctcaacttgcaagagctccagtgcagaagttagcagacaagatttcacgtttttttgttccaactgtggtggtggctgcatttcttacatggcttggctggttcatacctgggcaacttcacctctacccccagcaatggatcccaaaggccatggatagttttgagcttgctttgcagtttggaatttctgtcctagttgtcgcatgcccatgtgctttgggacttgctacaccaactgctgttatggttgcaactggtaaaggtgcttctcaaggtgttctcattaagggtggaaatgcacttgagaaagctcataagattaaggctatcatatttgataaaactggaacgctgacagttggtaaaccttctgtcgttcaaacaaaggtcttctcaaagataccacttctagaactctgtgatctggctgctggtgctgaggcaaacagcgagcatcctctatcaaaagctatcgttgagcacacaaagaagctcaaggaacaatatggatctcacagtgatcacatgatggaatctagggactttgaggtgcatccaggagcaggtgtcagtgcccatatcgaaggcaggctggttttggttggaaacaaaaggctgatgcaggaatttgaagttccgttgagtcctgaggtggaggcgtacatgtccgaaacagaagagcttgctaggacctgcgtacttgttgctatcgataagatcatctgtggggccctcgctgtttcggatcctctgaagcctaaggcaggccaagtcatttcttaccttaagtcaatgggcatctccagtatcatggtgaccggtgataattgggctaccgcaaaatcaattgcaaaggaagttgggatcagccaggtgtttgccgagatcgacccagtgggaaaagctgaaaagatcaaagacttgcagatgcaagggttgacggtggcaatggttggcgatggggtaaacgactccccagcattggcggcggcagacgtgggcatggcgatcggtgctggcacagacgtggccatcgaggctgctgacatcgttctaatgaagagcaaccttgaggacgtcatcaccgccattgatctctcgcgcaagaccctctccaggatccggctgaactacgtgtgggccctgggctacaacgtcctgggcatgccgatcgccgccggcgtcctgttccctttcacgggcatccggctgcccccttggctcgccggggcatgcatggctgcctcgtcggtgagcgtcgtctgctcctccctgctcctccagctctacaagaaaccgctgcacgttgaagacgcgcccaggcccagggaggactcagatttggtgtgactgcgagtgaggactgatccctcgatctcgatgtgtactaacgagagcttgctggcgtcactgatgcttaacgagccaacacctgatcgatccgtgtacagcaagcaacacgttttggaacagttcgccaattgattgtgcaataattcaagacaaggtttataactttatatgatactagtacaatgacagcacataatcatagattttttttcggaaattacaagaaaacatttgctcttttgccataacatacaatcgagatagaaatgatacaatgcgagcctcaactacctaagaaacattagggattaagggtctgggcctgtttgattcgtgattaactgtgtcatactttgactaaggttagtcgtctgaattgaagaactgaccttagacagaaaagttagataaa

SEQ ID NO: 37413 - DNA, 1977 bp, Zea Mays
ccggtgtggctgctgatagcctaaaccctaaaaccccaccgctgttcgcgtcctcgtttctctcaatctctctcctctcctcgcctctccttggtgtccgtgttcacgccgtcgctagcgcctgccgcggcgaagcttctgccctccccggcgccgggctcgggtcgtcgtcggccaggcagctgctacgcgtgaacacggtcacaccagtaccacgtgacgtgaacggtgaactcgtgaagaacagagccgccactgaggaaccctagcgacggcggcgtgctaccggtgacattgtccccctcggtccctcctccatccccgacgcagcggcgccagcctgcaggaagcctattcgagacaaggtcgatctttgctgccttggcgagcttcagccgaatcaaggtcgagcatggcggcaggccagtaaatagagcaacacaaaacccttcaaatcaatggagacctctgcagcaaccccgacccggccgccacaccaggcggccacttccccatcgccatcgccctcgtcgtcgttgaggctgtggaggccagcggcgcagcgcaacatgcgcaatcagtggtcccatctgagcgccgccaaggagcagtggctggccgccgttgctgacggtcgtgcccacgcctccgcgctcgtcaacgtccacctctcctgcaggaacatgccggcgatggatttgggggtgctcaaggatatgccggggatccgcgataaggcgaactccaagttggcgcttagagaggagcaatacagcggcatgcttctgtcggcctacaaggagatggtctgtcagctgtcctacttggttgaagcttcccattctatgcgctgtttttctaaagcggctccaaattgctccatcacacagttttctgaccgccaagataatttgaatgattcaggggatggtggaggagccccagtattcaaatggttctccgtattagaatttggtgggttaatcatctcttgcttctatggattaagtcaccactatgatctttcgtctgttgggtgtgacaatgatctcctaacccatctatatctgagactactcagagcactatatattctcacatttgaggatgccgatcaatatctgagacagtacacacattcatgtttacatgttttaaatccacatgataaaaatatattatgtttcctttaatcacctcagagagtcttgcccaggagcttgttcagatgtttgtttcagagcaaaagttgaagaggctgctactcttggaatttctctcgattgctttaaaggaaggtgtagaactccagacatcattaaattggggtgatgaactatatgatgaacgtttagggagtcagcgacctggcaatctccctctgcatgaagttttacaggtttatttaaccacttggcatgctaatatgaacatcaaccggagtagaattggtgaaatatttgagcttgttgaggaggagatgaagattaaactgtcttgaagattccgattcattttgtttggctattcatcaaggaagaagaaatggaaaagaaagatcaatcagtttactattcaccaggtttctctatccagtgtctttatctgccttagtagaagtcttcagagcttacctatcatcttagaatatagtactggtctccttgtaacccataatatatttttttaatccaatgttcggttaccctggaatcatattgggaggagagcgttggaccaacatatgttattgaaatgagatttccaagttatcaggatcattcgcctagcttcaggtttgttctgtgctgttgtagatgtgtaatatttacttcattcgcctgctgtacagatcttggtgacatgctcgtggaaaatgcatattgcttttagtggtttttcattacgcttatggattgtagatcttctgattattattatgaacacggagaaaataaagctgtggattagtccatg

SEQ ID NO: 37414 - DNA, 1099 bp, Zea Mays
cctccctgcgttcccccaccaccacggcggcagccactggttggcagcggttgtccttctccggtgtccatggcgccgccgctcgcgacacgcggcctccccctcgcctcccgcggcccgccttcttgcgcggcctcctgctcctcgtgcctgccctcgtatctccagctcggtcgccggccaagccgccggttccgctgctcctcgccacaggtcgatgcagcggcggtgccgccggggaagggcggggagtaccggccctctttcgcggacgacctcctcctcgccttcttccggagcaagatggtgaaggtccgagtactacagtcactgtttccacctctcttgcttgttctttacaaagctcttttagcgccaattgctaatggccaactagccgctatgatgcttgctagggcgacagcaatttcatgtcaatggttgatgggctcatgctcagttaattcagtcactctgcctgatggaaaatcatggtcaagtggggtgttcgttgagaaatgcaagtacctggaagagagcaagtgccttggcatttgcatcaacacatgcaaactgccaactcagactttcttcaaagatcacatgggtgttgatttgtacatggagccaaattttgaagactatagctgccagttcaacttcggggtgccgcctccacctcttgatactgacaaagccctcaaggaaccgtgcttggacatctgcacaaacgcaaggcggcgtagagagctcggaagaaatagcagcccagatgagctcagttgcccccaagtttgatatgctccctgtaaaagactgcacatcatagattattgcgcgttgggcttgggcatggtgtgccttgcttgcatttgtcagtcttcgtgcaacgatgtcaagtaatttcggtaataccatttctatgttgcagacacacacgttttcgattggatcaacatgactacatgagtaaataactctcagtctgatccatcagatcaacacccaatgaaacatcacagtgatctggatacaagttcactgggtatacaaaggaacatatacatagcaaatctgccattttacagggcaaacttaa

SEQ ID NO: 37415 - DNA, 1318 bp, Zea Mays
gaaccagctagctagcgcgttaatgcggatggccgtgcgtagcgtcgccaagcatttcccgacggcgatcgtgagcggccggtgccgcgacaaggtgttcgggttcgtgaagctggcggagctctactacgccggcagccacggcatggacatcaagggtccggccaaggcctcttcttcccggcacgagaaggccaaggcaaaaggagtcctgttccaaccggcaacggcgagcgagttcctgcccatgatagaggctgtgcacgagcgcctggtagagacgacgcgcagcatacccggggccaaggtggagaacaacaggttctgcgtctccgtccacttcagatgcgtcgacgaaaagatgtggggcgagctgtgggagtcggtgaagggcgttctgcgggagtaccccaggctgcggctgacgcaggggcggatggtgctggaggtgcggcccaccatcaagtgggacaagggcaaggcgctcgagttcctgctcgagtcgctcggcttcgcgggctgcaccaacgtcctgcccgtgtacatcggcgacgaccgcaccgacgaggacgccttcagggcgctgcggcgccggggccagggccaaggcgtcggcatcctggtgtccaagcaccccaaggagaccagcgcctcctactcgctccaggagcccgccgaggtgatggagttcttgctgcggctcgtcgagtggaagcgcctctccaggctgagtcggacgcaatgagacgatcgacgcaacggaccaagctaactgatgcggccaagtgccagttagtagggtgtgtgtaacaactaacaagcaagcatgcgcgtacattattgcccaatagctagtgcgtgttcaattattaatataccgacctgccaagagcatgggtttgttaatcgggaacatatctggtgcaaatcaactcctctgtgcaaacatgcaaacttttaatctaggccacatgatgttgataaaatggacaaaggggcgtagataattttacacttaaccacccactactaatcacactttttcaaatccccctcccactccccccgcacggctccttggaccaacattatgtggttcagattataagttttcacggttacgcggaggagttgttttgcagcagatatgttcccttgttaatcaacgtggatgcatacaagcaaacccaagggcatgcatgtacgatgcaattattgcaatggacgcgaatcatccagtttctatataatttattatactgccatatcagcattttagtgatgtggtaagagttttaatgaggaaagagaaggaaat

SEQ ID NO: 37416 - DNA, 2206 bp, Zea Mays
cgccgctccattttgaaatcgatcccgttcgtttcggttgccttcggcctcggcggttcatgaggggttcaagaatgaatccaggtgaccgtagaacgcggagcacgatgacgatagtaattgtgatgggtttatcatgcttcttttacatactaggtgcttggcagaaaagtgggacaggaaggggtgatagcatagctctgagagttaaccaagaaactgactgtacaatcttgccaaatttgcactttgagacccatcataccataagtggcgctaatccattgatcatgtccaataaaatgattgagccatgccacatccgatacagtgactatactccttgtcaagaccagaaccgagcaatggcctttcctagacaaaacatgacatacagagaaaggcattgtcctgtagagaatgagaaactgcattgtctcatcccagcaccaaaaggatatgtcacccctttctcttggcccaagagccgtgactatgttccatatgcaaatgctccgtataagagtctgacagttgagaaagctgttcagaactggatccaatatcagggagatgtgttcaaatttccaggaggaggaacaatgtttcccaatggagcgaatgcttaccttgatgaacttgcatccatcatcccactcgctgatggcactatcagaactgcacttgatactggatgtgggagattcacatgaagctcaggttcaatttgcgttggagcgaggtgtccctgcagtaattggagtacttggaactataaaggtcccatacccctctagatcttttgatatggctcattgctcacgctgtttaatcccatgggagtcaaatggcggtatgtacatgatggaagtagaccgggttttgaggcctgggggttattggatactttctggacctcccatcaattggaagaaatactaccagtcatggaaaaggtctaaacaagatgcagaggaagatcaacatagaattgaaaatattgcagaaatgctttgctgggataaaatctttgagaaggatgatattgctatttggcagaaacaagggaattcatattcatgtcatcaaaaggatggtcatgctagcaagatgtgcaaagttcaagattcagatgatgtctggtataagaaattggaatcttgtataacacctcctatagaggcagcacagctaaagaagtttccagagagactatctgccattcctcccagaattctggagggtcaggtcccagacataacagaagaagtctatgaggaggataataagttgtggaagaagcatgttaatacttataagagggtgaacaagctgataggttcttcaaggtacaggaatattatggacatgaatgcaggccttggaagttttgctgcaactcttcattcttccagttcctgggtaatgaacgttgtgccctctatatcagaaaggaacactcttggtatcatatatgagcgaggtgcgaagccttctcaacataccctaggacatacgacctgatacatggcaatgacatcttcagtttatatcagaacaagtgtgatgcagaagacattcttctggagatggataggattttacggccagagggtgcagtcatactgcgggacaatgccgatgtactgaacaaggttagaagtatggtggcaggaatgcggtggaagtccaagttactagatcatgaggatggcccgcacgttcccgagaagattctgatttcagtgaaagaatattgggttggcagcgaggaacagaacagctgataggtacagaaccatgttgatgctggatgccagcctctttccctgatgcgatcccctgatgctgttttgtcggttaatagattttgttcatactgcatacgtacagtactaaagacccttagatgatcgggacatacctggatttttgctgtgcatatatagtaatcagagcgttaagtgaactgttggcgatttgccaaggcatattgtagtgtaggcaaaagttcgtttgaaaaacatgtaggtacgagacaacttagtcgctactttgcccagagattaattatacagatgcacgcaagaagttttttgtgatttcgtatatgaacattatctgttgataatgcatgagattatttctttgagtgtttgtctgattgacctgacaagaggtcacaaggattgaattctgcttcagc

SEQ ID NO: 37417 - DNA, 1793 bp, Zea Mays
ggagcattctccattcttgaccttcgcctccactagtccactccctcgttgatcaagtagggaggagtgcagtggatatgtggcggcggcagcagactctcctccgccggctgccaccgctgagggtggtggcgcaggctccggcatcctggccggcctgccggctgggacgcttctgcgggtctgtgccggagaagaggaagggaaaggcggcgcctttgcaggcgcggggcatggtggacaggttccggatgcgcgccaagggtggcgacggcggcaatggatgcgtcagcctcaggcgctctaggtccaaccgccagggcatgcctgacggtggtagtggagggaagggcggtgatgtaattcttgagtgttcaaggtctatctgggatttcagtggcttgcagcatcacatgagaggaggccgaggtggcaatggagtttctaagaatcagataggaacaagaggtcctgacaagattgcacaagtacctgtaggcacagtgattcatcttgtcgaaggcgagcaaccttctctgacagtaaataaaccaaccagagctctggatccctgggatatacctagtgctgaagaacactcttcagatttggaccagattgttaatatagtggcagaaggttttgatggtggcttgtcccatcggcatattgcccctaagcataacactgatggaaatgacactgtaaagggaagcagcagtcactcagaggatccaaaatactttcatacatgctccaagcttcagttctcaaactctaatcgtgatgtaagaatctattcatgtcaggaggggacagatgaaaaagatcaaactgaaagtgaggatgaagaattttgggaggatgaagacgagtttgacatggatgaggaggaagaagaggatgagaaggaagaacaagatgtgcaatattgtgttgctgagatgacgaaacctgggcagcggttaatcatagcacgaggaggcaaaggtggactggggaatgcttttgtcatgaaggagatgcggccatccaaagcaaacagacaagagaagatagcccgtttgagtactgggcagccaggaactgagagcatccttatcctggaactgaagagcattgcagatgttggtctggttggattgcccaatgctgggaagagcacattgctcagtgctctatctagggcgcaaccagagatagctgactacgaattcaccacgctgaggcccaacattggcagcctgacctacgaggactacttctcagttaaagtggctgatatacctggcctgatcaaaggagcacatgagaaccgtggcctgggccatgctttcctgaggcacatagagcgcaccaaagttattgcctatgtgcttgaccttgcagccacacttaatggcaggaagggtatcccgccttgggagcagctgcacgatttggtcacagagctggagcattaccaaaaaggaatgactcggcggccatcactgattgtggcaaacaagatagatgaagagggagctgaagagatgtacgaggagctgaagaggagagtgcagggtgttccaatatttccagtttgcgccatcttgcaggagggggtgccagatctgagagtgggtctaaggaaccttatggatgactcagatccgcagggcgttgattttgaggaaaacgactgttaaatgagcgatctcggtggtctgttatcaacgccagcacggattctagggaagcggaggacgcacggcgaggaacacgtgattcagttcgagggagatggatctgac

SEQ ID NO: 37418 - DNA, 4432 bp, Zea Mays
gacgcccaccgcaccaccccaaagcccacaggaggaagacctagctagacacctgacctagggtttcccttccttggtctccttctccagggccgggagggaacccgtccatctctgagagccgagatcgctccatctcccccacatgccgctccgggagggagccaagcgtgtctccagcgcgcgccactatgcccccgccgcgccaacacccgcgcccgcgggggcacccgtcccgccccaccgcccgccgcgatctgtctccgccgctggctccatatccactgcctccgcccgcaagccgccagagccgcttcgaagggccgtcgccgactgcctctcgccgcccgccccgcacacccatggcccagctgcagccgccgcttctgccaccgcggaggcttcacggacgctccgggattatatagccaacccttcaaccatggatatggcttataatgtcctcattgaccatgcacttgcagaaagtgatcgtagttggtgaaatttgtttgcactaaaacaatcaaggattttgtcttcaggtacattccaagggtgcaaactctgcgacaaattgatctgttttgtgcgaatacgattgcaaaatgtgaaccgatggcaaataatagagcagcatcttttgccaagaataatgtatcagcagcagctgcaataaattcttcatcccttgccccaccaatatccaactttgcttcagcatctcttgtgaagtctttaaactatgttcgctcattggttgcaaggcatactccaaagttgtcattccaatcaatagtcgcggcaaagcagtcacttccttcactttcatcatttctgaataggtccttactttctcaactaactccagaagttattagcaacagagaacatcttgaatcgaaggaatgccatagctcacctgattttatatcatcagcaagtgaaaaagttgatgtgggtgaacctgtagatgatagcaaatatatatccttcgacattttaagctggcgatggcatgtgtatggcgaacggcagtcgtccttatctgccaaagaaagtgattttgtgggtcttcaagattttcatatacatggttttcttgaagtcggtgctgcagctcttctagttggggatatggatgcgaaaattaatgatcaacagtggaaatattctgttatccaggaatttccagatattgatttgttacaaccttcatcttctgccgcaagtacttttgcgtcatcacaaagtcatttaaaagcaataactgcttcaaaacgcatgagatcagctccaaatcaagtctggatgaacataccaataaacacattccagcctcgagcacggcctctttttcagtacagatactacagtgagcagcaacccttaagattgaatcctgctgaaatttctgaagtcatagctgaagtttgttcagaagcaacttcaaatgcaaatcagttgattgttccatcaagattgagcacccagagtcggcaaccttcagcagatgtggcattcagtgtccttatcaaacttgtcattgacatgtatatgatggactccgagactgctgctcctctgacactttatatgcttgagggtatgctgagctctcaaaagtcatcagccagaacgaaggctcttgatttgatcctaaatctgggggtacatgcacacctgctgcaacctatggttattggagatgcgccgcttatagataaaagtgaatctgtgaaccgttcttatctgagcaatgaatacggatcaagtataaatgaaccgagggaagcagaacctgaagtagaacagaagatcagtcctgctattgatcaatttgaatcatggcttcttaaaatgctttttgaggttctccttctcctagtacagatagaggagcgacaagagatcgtgtgggcctcagctttgagttgtctattttactttgtttgtgatggaggaaaaattatcaggagtagactgggaggtctggacataagggtggttaagactcttcttgagattagtgtggagcactcttgggcaaaagtagtgcacagcaagctcatttgcatgttatcaaatatgatgtaccaagtatcagatttaactcagaatggtgtttctgacacacattttgttcctgagcggattgatcttcttggtgggattgactacatttgtcttgagtattcacgagccaactcaagggaagagaagcgggatttgttctttgtcatttttgactacgtagtgcatcaaataaatgaggcatgcttggctggtggtatttcaacctatacttatgatgatgcccagccccttgcttcccttcttgcctttgctgatgctcctgaggctttctacatatctgtgaagcacggcgttgaaggcgtcggagacatgctaagaaaagctatatcagcagcattatctcagtctgctcaatatgaccaattgaatgtgcttctggataaggttatgaggaaacttgatggaactgccagcacattttccaggattgacaatgagttttcttatatgatccaagtaacgaaatcatgcaagtgttttggcagcattaaagatggatgtgatgatgctgatgtagcgcttagagccaggctttgctgggcaactttgcactcacttcttcactcacatatttcatcatataggcaccatggatatatttggttagttgaattgctcctttcagaaatcagtgaagaaacagatggttctgtatggtctaaaatccaaaagcttcaagaggaaattgaagttgctggtagccaagacctatcatgttcagaagtctctctgcctgtttgtatgctttgtgggcttctaaagtcaaaacacaatttcattaggtggggattcctatatgtgctggacaaatttcttatgcgttgcaaattattattggatgacaatgacatgcaagaccacacaactgctgatcataataaaaattgtcttgataaagcttttgcggttatagatattatgaatagtgctttgttacttgttgttcaaaacaatgagacggaccatatcaacatattaaagatgtgtgacatgctgttctctcaattatgcctgagaattccatccacaaatgcgatgcaagttaggggtcttcagtcccttggtcaactttttggttatacatctaagaacatcgatagtcatttggaaacccttgcatctcaccaaagtattggaaataagaatatttgccggagtgagacattgcaagatattggcatagatcaatctggtcaatccacttctttctgtgaagcatcaatggcagcactgcttctgagagggctcgcgatagccccaatgcagcttgtagcccgtgtaccaacctctttgtttttctggccattgatacagcttgaaggggcagccagtgatgacattgcattgggtattgctgttggtagcacaggaagaggcaaccttcctggtgctacatcagatatccgagcagcactccttttacttttgatcggtaaatgcacagctgatcaggaggcactgaaagaggtagaaggcaatgagttcttcaggggtcttctggatgacacagattcaagggtagcatactattctgccgcttttcttttgaagagaatgatgacagaggaaccagagatataccaacggatgcttcaaagcctcatctcaaaagctcaacagtgtaacaatgagaaacttctggagaacccataccttcagatgcgtgggatattgcagttatcaaatgacctaggagttcaatgataagatcgtgatgacatttcaatggataaagctctaagttagaatcactacttctggctgtgtttattgcagagaacctgaagatgttccgaactaagttttgcagatgctatgtgaatcatgtaaattattgctttggccagatgcatgtacagatccatgaatttctttattctttgttagactagtcacagtccaagggagtcacagattaacaagataatctgatgatcatcctgtgttatggacacagtgcattgtggtttaccaacctggacgacttgacaaaggtttaagccaaggtggcgtagatgtgactccctacaattttgtattgcagaaaccgttgagatctgaggcaaggcattatatatattttttgggcgagacatgctcggttcaataaatatttgtgtgttcgctttgcatatatggtaactgatcagaggagtgtagatttgtattgcggagtaacaatgtaaatgttaggtttgaatatactgatttcgagatgatgtaatccttctatactagcttagcttccatgttggttgtttaatttcgataagaggttgtttacttttatatgctgtttggtttacatatttgtgacgtgatgaataaccgataa

SEQ ID NO: 37419 - DNA, 2552 bp, Zea Mays
ctatggaacagtcactcactcgggagtcactctcccgtcctgatgccccgtttcaatttttgaactcccgatctggcaatccccacccacgctcccgagcaactttctactcactccggcgtcgcttcgaatcccagcgcggcggcgtgacgcgtgaatgcgtgatcgacgcgcggcgctgctcctccgggaaaccgcatggacgccgccgaccctctctgcgccatcacctcgcctgcgcggctccttccgcggacccttggccccaccccctcgaaggtccgcggtgcgctcctcgaggccatcgcactcgcccggtcgcgggctgcaatggtgctgaaggagcacggggacatccagactctctaccatgatgatgcaatgaaagccatgccccccacaaatgtcagcaaagggcaacagggaagaagggcagcactggatcgcaaacgggctcggttcactatgaaggacactggaagcaaagcggtgcctgttgtggatcgatctaagttattgaatatttcggatccagtcgcattcttcatggccttggatcggcttgaagaagctgaggatgagatcaaacggctaaatggagaggcagaaaagcgcatattgatttttgatcctttagacgaacccattagacagcctggtttgcgtgggagaaaatcattccgcagtttcaaagtaactgaggatgctactactcaagatcccattgaggtactggcttcccaaacagcaactatgacaggatctcagttctcacaggatgttatgcatgctgttgctgacaaaaatgaacagtctgttccttcacgatctggtgaagctatttcagatgtttcaggaaaagaagattcattagctgagaaggatggccgtgatgatttggcttatttactgacctcgatccaagatttggatgaatctgaagaggaagcatttatccggaagaccttagggcttaaagaaataaggaagggaagagttagtctctgtaactccattcctggagtcaggtccttaagaagcgatactgaacaaaaaggttcaatgaaggttcgccctccagaaagtcatttgcctcagactcgccaagatcgaatttcagagttggagaaacatttatttcctggaggtgcagcaaatgctaaatgcacagatgatgaatctgaagggtcaccagatattgtgatgggtgaaccatcattagtgcatgattcttccgaggttctgatgaccaatgagaactctactggaagtgaaattgacaggaggaccccaaatctgtgtgccagagcagcagaccacgctcttgatcctgaaccaaacttgcctgatcatgcatacgaaaggcaaaccagaggctcctcacttggtttgtgcaaaaacacagaagttgccaatgaacacgaggaagatgatgtacacatagaatatccaactactggcgggtctacttatcaaacagaagtttcttctcatgatttggagggcagcttgacagaagaattggtcagtgaaccaggtaggcatgcggctccagatgatatctataggacttcacatgcagctgaggatagcattcaacatctagaagtggtcaaacagggtggtgttctacaagacaagtcaagccagtcgttggagatgcctctggaagatattgatccactatatcggcctcagatgcatggtggaagcactaagaaatcgacacctgttctgtgcaatgcactgtccccgatcgaacagaagcaacaagcagctcaagaagggaaaaggaagcaacaggcaaagagggtaaaaaaagtgtctgatgaatctagccatgcactggaaatatcccaagcaaatttcgaaccggagaatgaacctcataatgttgacgtgaacatggagcaaccgacagttatgagtagcgccaaggggcaaaagggagctcaaaggagaaacaagaccaaaaaattgaatcaaagaaaaatccttggagatgttgaccttgcgcggcagtctggagtgagaagaagctcaagaatacgctcgaggcctttggagtattggcttggtgaaagattactatatgggccgatacaggacactttgcctgcagttattggcatcaaagcatactctcctggccaggatggcaagaaaacattgaaagtgaaatctttcgtgtctgaacagtattcagatcttgtcgctcaatttgcgaagtactaaacaagacaccatttttctaagaggatcacgccttgtgacttgttgctttgtcacctgactttatgatgttacatgtgttggtggaaccatagtactgcacaatgaaaaggcacacgtcctaccgaatggttgccagtatctatcttgtttggatgccatttcggctattcgatcggtggagtgtagcgtatgtgcagcggtatcacattagggatcgattcggataggcatggaatccaatagacataacattatttatcatattttaattcgaatttagatacgaatgtagattttatcgttatggatgcaaaatg

SEQ ID NO: 37420 - DNA, 4172 bp, Zea Mays
gctgtcaatcgcctccccactgcggcagatccgcaatccgctcctccaccaccgcgctcctcacccacgccagggacaagactgtctacctccacgcccgcctcaccaactccgcggccaccgccaccgccacgcccctcccccatggtcgtcgagtccgagtggtggaaccagcgacgcatgcgcgtcgagggcgacgtgaaataggtgctccaccgcgggcacaacgggcacagtggaggtggaacgagcaccatcgagttctggttccaccgaatccaccgctcgcacaccggatccatcgctcccacatgcccgcacaccggatccaccgctccctcccccgcgatggcctggttccaccgagacaactgcggggctagggtttggattcgtgggtggagcccaaggctagatccagcagggggagggaggtagaggaggggagggaactgctggtggtcggcagtgggcgaaggcgcgacaatccaggatatggattcctgagcgtcacccacccgcccatccacgtcgcgcggtgtagtcatcccctatccgcagccgcctcgctccctctcccacaacaaatccattctcctcctcccactcgacgaggatcgcgaggatgctggaggacgtcgtcgctgtcacgcttgacgttagggcctccgatgcttgacggcgggcgggccgaaggtgtttaagaaaatgttgttgtcaacatcaacctcctggaagggccagaacgcaggcagcgcctcaactcgtcaccccatcagcacggtgagccccttatctggattgttatcatggtacgcggtgcgctgcaagcctgcaagtgacatcaaattggattggtagtcagcgggtgtcatagtgtcagttcgatggaatggttctgcagtgcatgtgcttctgtaatttccgcaagaagcagtcaacttctccctgatatggcactaggacattgtagtgattcccgcacgtttgtggaactcgacaacctaccagagcgccagatgtttcattgagaagagaactcctccagtctggctttccactggtctagtctctcctttaaaccaaatttgataccactcattgaagtcaatagctgggatgtagacatgtgaaaccacacctgtggaactttcagcgtgtgatgactgggtcactggtggaataccgtgttttttgagctgctcgctttcagttcgcggtcatagtcctgtgttttttgccttcagtttcttgatgtagttattgcctaaaatttctatatcttgttcatcgtactggagatgctacttcatgtggagctggtatgtaggatgattatcacgagtacttcaagcgctcattttaggaagacatcgctgcgcaagtgcctcaaggagtggaatggtgagcccctgtccatctactgaacagagaaaataccaggagcaaatgactgcatttttagttaatccttttattcctaaattaattgtgtttgttaatgcttttattcctaaaataagtaaccgagctcgggattcttcgcaatttgatttgcgagatcacccccataaaggcatcatgaatctttatgcctgtaaagacatcccactgtctctttcgttttcgataagatgttttggccgttacataatgcctgtaaggtagaatgccattgcagttgttgcatcagaaagcagccatttaacgccattgtaaagtgagtgatgattaaatacaaccacacttctgtctctcaggtttctgtacatggagtttttattgcacctcttcttccccagcaattagtacttgcagttagactaaatgaatcttgaatgccccttaactgttggctttacatggaactacttttgcatataccagacaactattttgaacttcaatatgtttttcaattccagcaattgatcgaaacatgatatatttgacatattcatgatggatttttgtatttgatgtgtcgctttttcatctatcaatgtaattcttggacataacattgcgcacaggtaccaaattcacacccttgttattgcgagttctgtaaatcatgatgttcacatgtgatggtttgattcagttcaatggttagcaagctatttgaacatgatactatagtagtgcatatttgctgtacaaatggccactgcccagctatttgcataagatattatgtttctcctgtgacattttctatgccacatacatttatatggcatttttgtgcaatttagtaccggtttttggttgatggtgtctggaggtgtgatgagacaaaaccctttgtacgtgatgaatatggactgatcagcaatgaagtgcttgtggaaaacaatgtactacccgttgtgcagccagagccttctatcagaggaactaatatggataaggatgcccctggagccatcatctcagaacccaagcatgcaaatagcagttatccgccatgtggtctctggaatattattacacaataccatatatgacgttgttcccctttctagcaagttttggacactcagcttcctgttaaacaagcatttaaaataatgcatgatgtgggtcttgctctggttcctttttgggatgaccgtcagggaaccataacaggcatgctcactgcatcagattttgttttaatcttgagaaagttgcagagaaacattcaagttattggcaacgaagagcccatttctgcttggaaagaagcaaagctacagttctatggtgggcctgatggtgctgtcatgcagagaacgccattaatccatgtacttctccatatatttgctgattctttcatttgattcaatgtgtaagcagttgcaagatcagcactttcataatataaatatattacttgtatgaaattctagatatggtctccaatacaacattaagcttaatgtcgtttgtgttaaaaaattacaaatcatcttatgtcttgaaataaggagaaattgtttgggtttctcctccccaactttcagaattacctatttctattgtatgtttgatcatttggacttccattccatcaacaattttggtttattcagtgaggaactatgtttttaaccactctgtagtttgtacagacaggcaacattgatctcagggccaagaaagaagctcaactcggcatgcttcctgtttgaagcaagggcaacaaacttaccccaccagatctctgtcgccaaagcagggctagtgaataagctgtgtttcctcccggattgtcactgcttttatatttgtgcatttattttgagggaaacattttgcccaaaaaaggcctgcagtgcacgttttaaacaagtcatttgaaccaactcttatgctgaaaactgtatgtgatactgcagaaggcaacacactagcttgataggaaagttggttggcaagcataggtggactctggtgccttcatatatctatatatatattttaagttgacgatcttcgtgatgctgaaactgatgaagacctccgatgaaaaaagagacatgctgcacatgcacgagggtacttgcagatcgatgtcggctctatggacgaacactcgaccaagtcagatgaggagtatgagggcctagccatgcgcgacgtgatggctactggtccgacgatgagcagcaagctgtgagttaaagatgaactcacctgccctggagagtaacatccataggagtgaggcaaaatggctggtaccaccacaacatggacccgttcctgaagatgtccaaggaggtggtagccgacaccataatgtcttgtgtcattgtgtcaccggtcggcaacacactgcgctggtaccggcgggtgttgtgtttcttaggcgtctgcttctgtgctttgagttgtgctatagagtggttgtgccaactactgattttaaaagaaaaaggtgagctgagaatcattgttgaaaacaaacatgtaattgttcgttctcatcagttgtgccaactaccaagcatttcattgatcagaatttatcgttgctcatgagaaccaaaagtaagacacttctcaataacattggatgcaaatttctgctagcttatcttcactatcttttctcgtatcaatataacacacatttatacataatttttgtgttattatatgttttcgttgcaacgcac

SEQ ID NO: 37421 - DNA, 3445 bp, Zea Mays
ctgaggttagcctttcgagaatttcaaaagctaactttcagacttgactatagactctagctggctggatctcgcccttttgtgtaggaagtaaacaaagaacattagatcggatgattaaaacacgagggtaagaaggttaggctgctacgaaccagcttaggtctgttagttatcttacacactgcacagtagctagactctgtacttaactcgataggcctaatcatcgcatcagtgatctacggacctagatcagtagatgaatgaggcagcgggcatgatgcggccatggagggttgtcagagccaattgtagctttgcaaagcttgtcttgcaagcaccctacagcacggcaagaacacacgcccccacagaatcatatgctatgtcctttgtctatctcccctatatatatacccctgccatgcatcccagtaaagccatcgtgtaaagcacaatggcagtttttctgctgctgctgcggcttgttgttttctctctttccttcgccattaatgccgttcaaactgctccagcatcccatgcacaagttcacattgtgtacttgggccacaacaacgacctcgatccttctctaactacagattcccacctgcaacttctgtcgacagtctttacagagccgaatgaagcgagagaagctattctgtacagctacagctgtgggttctctggttttgctgccttgctcaattcaacacaagctactaccttgtctggaacagacggggttgtatcagtattcaggagccggatgctggaggtccatacaacaaggagctgggatttcatgggcctccgcctgcacatgcatacggaacaatcatcgcagaggcatttgaaattcggagatgatgtgatcgtcggcgtccttgatactggagtgtggcctgaatccaagagcttcagggacgacccacactacggccccgtcccgtcttcatggaagggcacgtgcgtggtaggcgacgagttcgacccggccgccgcgtgcaaccgcaagctcatcggcgcgcgctactacctggccggcttcgagagcgagctcggcccgctgaacaccagcgacgggtcggagtaccggtcgccgcgcgaccgcgtcgggcacggcacgcacacggcgtccacggccgtggggagcgtggcgcccaacgccagctacttcggcggcctgggcggcggcgccgcccgcgggggcgcgcccagggcgcgcctcgcggtgtacaaggtgtgctggtacagggacctgacgggccggtgcagcgacgccgacatcctggccgcgttcgacgacgcgctgtgcgacggcgtgcacgtggtgtcggcgtccctcgggtcgcccccgccgctcatgccgctgctgtccacgagcaccgagatcggggcgttccacgccatgcagcgcggcgtcgtggcggttttctcggccgggaacgacgggccggacgcttccatggtgcagaacgtctcgccctgggggctcaccgtcgccgccagcagcatcgacaggaggttcccgacggtgatcacgctcgggaacaatgcctccatcgtgggagagagcttccttgtgaaagccatgaagaatggtctggtagatagcagcagcgtcttcaccgatgggacgtgcacattcgagcagctgatcaaccgcacggcggcgtgggggaagatcgtgctgtgcttcgccacgatgggaggggtgtccagcgacggcgcggcgctggcggtgtacgccggcaacggcgccggcgtgatcttcgccgacaccataagccggaaatcgagccaggacagcttctggcccaccgtccacgtggacctgtaccagggcacccagatcctcaactacatccgcgactcgagaaagccgacggtgcgcatatctccgagcaagacggttgtcggcgaaacgccggcgccggccgtggcgtacttctcttccagagggccgagctccgtctctccaaagatcctcaagcccgacgtgaccgcccccggagtgaacatcctggcagcatggccgcccaagtcgtcgccgacggtgatccccttggacaagcgcttgacagagtggaacatggactccggcacgtccatgtcgtgcccgcacgtctccggcatcgccgcggtcatcaagtccgtgcacccgacctggtccccggcggccgtcaagtccgccctcatgaccacagcgtacatgtacgacggcacgtcggacgtgatgcaggccggcgggacggtgaaggcggcggacgcgttcgacgtgggcgcggggcacgtggacccgctgcgcgcgctggacccggggctggtgtacgacgcgggcgcgcgcgaccacgtggtgttcctctgcagcctgggctacacggaggccgcgatccggaacatggtgctcccccagccggcgctggacacgagctgcccccgcggcggcggcggcggcggcggcccggaggcggacctgaactacccggccatcgtgctcccggacctgggcggcacggtgacggtgaagcggacggtgacgaacgtgggcgcgaaccgggacgccgtgtaccgcgccgccgtggccagcccgcagggcgcgcgcgccgaggtgtggccgcgggagctggccttctccgcgcgccccggcggcgagcaggcctcgtactacttgaccgtcacccccgcgaagctgtcccgcggccgcttcgacttcggcgaggtggtctggtcggacggcttccaccgcgtccgcacgccgctcgtcgtcagggtgaccaacctgccggacgacggcgtcaaggtggtccaggccgccaacgccacgggcgacggttcccaggccgccgcgtagcctccctagctgcctccggttctaggcaggcggcgcacggtctgagtgagcctgtcactgtcagaagatttcgcgcgtaggtttgctgtgtcagactacgcttcgtaccgagacttttttgcgtccgtttcttgggattggtattgtgctgtagtactggttggtggttatgtattggtcggtcccaccactagtatttgggagtatttgtgtcttgattgcacaagatggttgtgtcttgatgatacaagatggttgcgtattggtcccaccactagtagcgagggtggcagtgatgaaaacagaaagaagtactagcacggaattccacggcgttgctgtcagtggaccgatacttgtccagcgtgtgattggtagcagcaggaggaggaagggaatttgtacaaggcacgtgccaagccgagcaactggaagagtgcaacttctacagtgtgttttcagcacggaacatgtacacactcctacttgaatactactactagtggtagcagtagtgttaggtaagatcttaaattgactaaaaaatccctgtatttggggggccaattttgagcagcg

SEQ ID NO: 37422 - DNA, 1059 bp, Zea Mays
atttccatcccattcatctccgccagaggagggaggcgagccgcgtttttcatttcgaaatcaaaccacgacgatgccgcaggcgatggcggacgccgcgacgctctccgccctcgctctctttgcctcccgcctctcctgtcgcaggttcggggacgaggacctccgggtgctggaggccgcgctgtccgccggcgccgacgtccccgcgctgctcgccacgcgctcggcggcccggcgcctgctgcgatcgagcgcggcggaggcactcgcgttcaccgcggcgggtgcatcgctggatggtggggatgagagacggagcctcgccgtcgccgacttcttctcacgcgccttcgcgcttgtaggcgatgtcgagagctgccttgccatgagatacgaggcactgttgcttcgagacgctaaatactgcaacgaccttcacttgcaagtgtcccgtcaggagtggctaacttttgcaacggattgtcttgataatggcttctacaccattgcctccaaggcttttgcaaatgctcttgtgcacattcatccaagccacacagggcacttggactctgctaattccattgaggagaaggacaagatcattgaaataaaaggactccagaacttggccaagtcattatctgcacagcattgtgttcagataaagtctgctgaatacatggaaaggagagcttcaggtgttcacgagaagtataatttgcaatcaggaaaaccaaagttaacaggaagttcaatgttcaggctagggattaaaacgaggaacataaagaaattgcttcgtagccaggaaaggaacttgggggatttaaagcaatcttagcgttgcatcttccaaccgagaggaatgttgtaaaaagatcagttaggtgacaatttatgcaaatggagacatgaagtggagttatggatgggtctttgattcaacattaagacaaatacgttgaagagtagttgcatcctttggtagcatactcactgtgcaagccctaacttgctctgaagacagatatgaccaagggaggctcatgacac

SEQ ID NO: 37423 - DNA, 2637 bp, Zea Mays
atgaccaaaatttccctcctaccttgtgctcgaatttggatgcctctctctctctcccatgttgcgtctgccctgctcttgttgccgtttgcgcacctggcagcggcgacgcaggtgggcgacgcgtgctcctcctccagcggcggtggctccggcctgcactgcagcccctgtggcgccggcggggcagcatctgcacgtgcgccagccccgtggacccggccacccacggcacgggcctccccttcaacaactacccgtggctcaccacccacaactcctacgctctcgccggcgccgcctccgccaccggctccgcgctcatcaccgagaccaaccaggaggacaccgtcactgcgcagctcaaggtaacccaaccagttcccgtttcatccattcatttgccgcctggcctctccactgctgaggccagctcaggtcgtctaaccgcttccgccttccgctccgacgccggcgacgctgggaatggaaacggcatcgagttttcctttggttgaggaatcaacgacgtgtgggggtactactgaaaagctagacaggagaggtgttgacagcaacataaataaagcagataaaaggaaaagcgtatcttatatcttttgcaagtgatcgtgtacacatgtagcagtagtagataggaaatccagtcctcaactatctcaagcatggtgtgctgatataggccctaattatcagccacgtttcggttgccagatgctgttgatgcaggggaaggagagatgccaccagccgtccagccagccctcccctttcgtgactgtgaccgccactatggccacgacggatggtaattatcttgtcttattaaccgagacttggatccattttcatcacaaaggagcacagcagcacaggtgtagtatgaaatatgaatgcgatgttcatttatttctgatgatacggcttgtttgcgccggagacgcaaggttggcatgggaaggagatctggagctgcacaggtgtaacatccagaaagtggcagctgagccagttgagttcaatcaagagattaggagggaccattgtttggagccggcccctttggtgaggggaggtaggcagggcaggtggtgggagggccatggggggggggggttcagcactgatgtccatgatgttgtttgagccactccatccatccatcgccgtgtaccagactagaatcagtccacacccacaaatgtgatatctgtctctggagccctgcctatctacggagcggatttggggagagacaaaaactgacttggcttccacattttgatggagactttgtttcagtagcgagttttttttagcgagcacaggctatgctatgaaatcgagagataggagtatagaagcaaacagaagcccagttcgtagcagcagagcacaacgcctaaagtgatgtttattatccttgattgatggcattgaagacagagggtgacacaaagggttcaaagtcttctgatcagaatggaaagaaacagatgttacccaatggtgaacttggatcatcagtaatatttactttctggttgcaaaactgccaccaaataaccctcttcctaatctgttacttcacatctcctctttctaaaatgtacgacgctttctttatgcatcttctatttgttaatttttagaaacctgatcattagcaactgtatttacaaactagaatcatctggtgagcttcaggaagaaacttaaattgatactactagtcaggacttctgtttgataaccagcagtaggggtacttgcttagcatagcaattcaatatggagtttgagtttttattgattcttgaggtctgccatatttggaaatatgtaattcgactaacttgtgactaattaaaaggctgatgaactagacattgtttgctttgtcatgataagtttctaaaacccaggttgctttttaaaaggctgatgaactagacactatgttgtattgctgttggtatgtaccaatatttcatggaaaatcttatatcccaagttttttatatgccgcagaggactaagtacaacaacatggagccagatgttgttgatttctttggggaatgtatgaatagtccccgaaatggtcgtactccgcttgcaaatgagatatatgagcaaatggttgcagagaaggaaagagagctagaagaaggagaagcacaaaagtcaccctccaagattgttgctgatagtctcagccagatcagtcgctcatccaccttccttctaaacattggtgtctgtttgaatgcttcaaacctttgtggtggaacctttgtatgtttgaacctctattgtggaagaactagtgtgctggaattgtgtatgacttgtgatgagaatgttgtgtatgatggcttttatgtgtattatgattctgtgagctatcatgagagctctgtgtatcatgagagctcagtgtatgattctgcgtcactgttagaagagttaccaagaagtaagcatgagagtacttccatgccaggaaagcagaaattgctgcaaaaacaggggaaaagcgagttgataggcaacatgacacatatacttggtaacacaaagcttaggatgatgatattcattctacttgcctga

SEQ ID NO: 37424 - DNA, 1646 bp, Zea Mays
cccgcgcccgcgcggaatcggacgagccacggtctaccagcacagcgctatacaccgccggccttcttggcttccttctaccgattccgtgtgctgttcgctgtcgcctattgcgcttgcgcctacttggtaactacagcgtcggccgccatcccccgcagcagccgttttctagctgcttcccgctggttcgcggccgccgtcctgggcgtctgagcgaggggtaaccctgcccttttgttcctgggctattcctcagctcgcgccgctgtcgcctcaccccccaatccaatcctccgcgatcgatcggcgggcgcggatggaggcgctgaagaagcaggccagcaagctccgcgagcacgtcgccaagcagcagcagcatttccagcggaatattgtacgaggggtggaaggtttcattgcagttagcaccaaacagatggagattgtgaaaaaactagccggggattgttgtaaatatggagacgacaatcagcattttggttttgctcttgcaagggcgtctgaggagttcggtaaatctcataaacaaatagagaaagagcgggaggatcttcttaaaattcttggagagcagatttttgagcctctccgagaaatgataatgagtgctcctcttgaagatgctcgattgctaacttaccgttatcaacggatcagacaggacatggagtctcagatagctgatgtgatgagaaagcaacttaaatccaaggaaagtagtggtaacacagataactctgtgaaactgcaacatgcagaatcgaaattatcagatcttcgaactacactggcagcgttaggaagagaagcaactgcagctatggaggctgtagaggctcagcaacagcaagttacgtacgaacgtctccttgcaatggttgatgctgagaggacatatcatcaaaatgctgctgatattctgaataaactccatgatgagatgctctatgcaaagcatcataatgagtcagcaaaccactacgatgaacagtcttcagagcctgaatcagatgcaggcccagcacaagtgcactcacgtagcacatctgaagatccagtattgactaaacctagcgaatccacagggaacagtcaggaggtgcaatttctgggggaggttattcatccattcgatgctcaggctgatggtgagctcagtctcgcggtgggtgaatacgttgtggtccgccaggtggctgcaaatggttggtctgaaggtgaatgcaagggaaaggctggctggttcccatctgcctacgtagagcagagggacagagccccggcaagcaaggtgatagagcctggacttctgactacctgatccatcccgtagttatggctgctgacttgctgtcatggtcctttttttttctacattattgtacatgacatgccccatgagtgattagcgtatggcagaaccttcaccttttctgtgcagattattgttcttctagccttttcgttggtcggtaactgtatgtaaaatgtagttctgtctgttaggatttccttccggtattataacattgtacagagctattggtgatgagatgctgtcagcttgccctttcttttcggacagtgtgcttcctgacagatttatgctaactaatggtttc

SEQ ID NO: 37425 - DNA, 2637 bp, Zea Mays
gatgctgcattactcatgagtcctggttcttcactatctaggcttagatcatgttggtcatataggtggccgccggagtgttttgatgacccaaaagatgaaggagatggatgatgtcattagacgggtgcatgctgcgagtcttcaggataatctggacagaacacttttggttgtggttagcgatcatggcatgactgatgggggtaatcatggaggatcttcatatgaagaaactgattcacttgccttttttataggacacagcgttgagagcccatattgttcaccctatgaccagaatgaagcacttcaagtggatcttgccccaactcttgctcttctatttggtgtaccaattccgaagaatagttttggtgtcgtgcttccaaagcttttaaattcgttgacagatgaccagaaactaaggatgttagagcttaactcatggcaaatcttaagattgctgcaagcacaagtgtctgctttctgccttgaagattgtattaatgtggagagcagtattgaacttgacatccttcctgaatctattgagcaaaagttatgttttttactttctaaagccatttcttctcatcagtcttcacgtcttcatcgaggttctgatttcaagtctgttgaagccgggtactatgggactgctgcagataactaccacaccttcttaagaaatgcgagtgagtggttgtctcacagagcaaccgataaaccattatatttacttgtctctgcaatcatgttgatgacaatgtcatgccttttcctcatgggtactgtgtcttacctatttaagggacgatctctgagtcaagctgatcaccattcagagtcatatttggatcaacgctggcaccttgatgaggttctcgttcttgctgggatgtttctctatgtcatcagtcttggctcaagttcttttgtggaagaagagcagtatacatggcacttcctcacttctactctgtatctaatatttctggccaaggcagttcagtcaatgctaaaaggatcaaatccaacacttggtcataaagcagaaggaaatagctttgacagaagtagctttttctatgctacaagctatgaattaacaccaggcaagagaaatggttacaagttatgtactatccttgttgttcttgttgctggaagagttataagagcttggcatcaaggtggaatcaactgggttcactttcctgatatttccaagttactggcgcaagctgacccttctgttgtaaagtctcttcagattatctcagttcttgcagttgtggtattgttttcaatttcactcactttactcagagcaagaccagagtttgttataggagtatggttgacccacatttcttgtggatttttggtcctactgcatgtttggggaaatcatattggtacttcattaccaattaaccataccacagcatcggtagctcgacaattttatgtcattgctagtgtttcagtatctgtcactgttcttgcttcaccttgggtatttccaatattttctagggaagcaaaatcaccgtcctctggttctagtcctgtaaaggcaatacatggcatcagaaaatcacttgttctcactggaatgacatacacagcgttctggggccttctgcaattgcttcttcaacaaccaatcaatgcaattcctcttttcctcattttattgcaaacagtctcgagtgcagttcatttttctctggacaaaacattacataaacaatgggtacaggttgtggcaatgcatttcttgggaatggctggtcacttcggtcttgggaatacaaatagccttgccagcattgatgttgcgggagctttcattggcatttcaagttactccacagttctttctggtatactgatgtttatgataacatatgcatcacctctcatgttataccttgggttggtccttcatgcatcggtgaaagatgtcgatgatgcctccaatctacggcagctgaaatggagctatattctagacaaaattgtcacattgccatgtacctctatgcctgcgcagcaacagtgtgcacatatgtcggagtatccatcatagctatgactgcattatacagttgtgctgttttcaagttcagggcgagaagctacagggataaatccctgtaatcagactaatgattagctgttctgatttaatggacatttgtaagaattcagaaagggagggtatcttggcctattctctcgttgtacaacaacatcgtactcacatgtttccagaccaccatgcaatccctgcaagggtctatacacatttctcgttctctttgctaatcgtattggattaagtttgtcctggacacatgacgtaagcacgttcaagatgaacagggggtatggagtacattgtagcctgagtcctgtttcgattgagagatccatgttaaccatttccgcatatggatctgggcattaagccctaaatacgtatgccgtgtatcatctgttaagaacaatgctaggaatttctgatagcaattagagcattgtatattcctgcgaaggggtgaaacacatgcgagcgaatttattcaaatgaatcgaaatatttacaatcacactgatataccaatg

SEQ ID NO: 37426 - DNA, 439 bp, Zea Mays
tggtttgctgcaacctttgcccattccacagggagcttggcaagatcttgcaatggattttatagaaggtcttccaaagtctgaagggtatgacacaattttggtggtggttgatcggttcactaagtatgcccatttttttcactaaagcatcctttttcagcttctatggttgccaaagtgtttttggataatgtggttcgtcttcatgggactccaagatctgtggtctcggatagagataagatatttactagccatttttggaagtctctgtttcaggctttaaacaccaagctggctcttactacagcatatcatccccagtctgatggacagtccgagagggttaatcaatgtttggagatgtatttgcgttgtgctatttccaacagtcctaaacagtggagaacttggttaccattggctgaattttggt

SEQ ID NO: 37427 - DNA, 1864 bp, Zea Mays
cggacagcgaagaggcaacacgcgaacgagaacgacgaagccaaagcaacacaccagcgcgcacgcacgcgcagcgtccggcgggcatcaccacctcctgtcctcctccctcctgccccgatccgccctccccgccgctcgccgcacccgatgtcggccgccgacccttccgcggctccggccgcggccgccgacccggacggccctgactccgtgcggctcacctggaatacctggccacggtcaaaggtcgaggccagccgctgcgtcgtgccgctcgccgccaccatctcgcccactcgcgtcccggatccctccgcggcatccccgccgccgctcccttaccctccgctccgctgcaagcctccctgttccgcgctcctcaaccccttcgcgcgcgtagacttcgctgccaagatctggatctgcccgctctgcttctcccggaaccactttcccccgcactatgctgccatatctgagtccaacgtccccgccgagctcttcccgcagtgctccaccgtcgactacatcgtcggcggagccggcatccctggggtaggcggcgcgccgccgcccccgccgcccgtatttctcttcgtcatcgacacctgcgtcatcgaggaggagctggagtacgttaagatggccatgcggaaggccgtcgcgctcctgccggagcacgcactcgtgggcctcgtcaccttcggcacgcaggtgcacctgcacgagctcggattctccgatctcagcaagatctacgtcttccgggggaccaaggagatctctaaggaccagattttggatcagcttggcctggcgggtgctgggcggccgggcttccccaagatgccacagcaaccgggcgggccacaggtgaatgggatgcatccgccgtccacggccggggtcaacaggttcctgctcccggtgtcagattgtgagattgctctcagcacgttgctggacgagttgcagcctgaccaatggccagtcgaggctgggaaccgtgcgatccgttgcactggtgttgcgctcagtgtagctgctgggttacttggtgcttgcatgcctggaacaggtgcaaggatcatcgcattgctaggtggtccgtgtactgagggacctggaatgattgtttcaaaagatttgtcagaaccagttagatcacataaggatcttgacaaggatgcagctcctcacttccagaaagcagttaaattttatgatggtcttgctaagcagttggtcagtcaaggtcacgtgttagatgtttttgcttctgctctcgatcaggttgggctagctgagatgaaggttgctattgagagaacaggtggccttgttgtcttgtctgaaagttttgggcattccgtattcaaggattctttcaaacgcatttttgagggaggtgaacagtctctaggactttctttcaatggcataattgaaataaactgttcaaaagatattaaagtccaaggtattattggaccatgcacatctttggagaagaaaggagccatgtgctctgacacagttgtcggtcaaggaaatacatcagcatggaaaatgtgtggtctcgatagaaatacttctcttacagtattttttgatgtctcaccgagtgaacgatcgagccagccaggaaaccaaaatccccatttgtatatacaatttgtgacaagttaccaacacccagaaggtcaaatgaggataagagttactacgatatgcaggaaatgggtagatggttccactaataccgagaagtggtatttttatgaaacgcatgctgcaactgcaaatgaaaagactggctcgtggcatttcaatgcatgacctcactagcattttgcgctag

SEQ ID NO: 37428 - DNA, 847 bp, Zea Mays
ggcgagatgctccgcctgcgggcgttccggccgacgagcgacaaagtcgtgaagatccagctccaccctactcacccctggctcgtcaccgccgacgccaacgaccgcgtctccgtctgggactgggagcaccgccaggtgatctatgagctgaaggcaggtggcgttgatgagcgtcgcttggttggagcgaagcttgagaaacttgctgagggagatgattcaaaaggaaagcccaccgaggctattcgagggggaagtgtaaagcaggtttccttttatgatgatgatgttcgcttttggcaacattggcgtaattgctctgctgctgctgaggccccaactgcagtcagtcagcagtcttccacgttcattgcacctgcaccttcgacacgaggaaggcactttgttgtcatttgttgtgagaacaaagtcatatttttggacttggtgactatgcggggccgtgatgttcctaaacaggagcttgacaataggtcacttctttgtatggaattcctctctaggacatcttctagcgatgctcctcttgttgcctttgggtcatctgatggtgtcatcagggtcctttcgatgttgacatggaagcttgtgcgtaggtatacgggtggacataaaggagcaatagcttgcttaatgacgtacatgtctgcagctggtgaggtacatttagtttctggtggcagcgatggcctgctgatattatggagtgctgatcatatccatgactcacgtgagcttgtgcctaaaattagtatgaagttgaactttctagggtgatggggagtgctccgcagctcattacaataggggctgataaaacttt

SEQ ID NO: 37429 - DNA, 318 bp, Zea Mays
aaatgttacaacattaatatataacagagttctatacaaaataattatataattacatcatacaaagacaactatttagcaacccaaagttgactgagagacaatgacctagaccactcatgaactcatcacaacatccttcacgcgcctcatcctgtggtacctgtccttgaccttggggggaatgtgagtacagcaagggtgagctcacatgcgttcatcgctcaagaagttgtggggaataatgtgcatgaactcaccaaaggtgggagcacatgtgaagtgtaaggcttaccaaagaggatggttaaagctgag

SEQ ID NO: 37430 - DNA, 806 bp, Zea Mays
cagcagcccagcccatttggcccatctcaaccgaaggaggcaaagacgcaacgcgaggtctcatgggcgaccgggccattcgtcgtctccgttgtctttgttgcagatcggtgctcctctcaccaccaggccgccacagctcgccggctttcccctccctgccatcgagcaccacctgagcaaggaaatagtttaagaatggctgcgcggagcagttctatggttgccgaggatgactacgagacggatcagaagaagcaagctgctgcagatgttctttttcactattcacaatttgttatggtttgcattggtgaggatgttcgccctactgatctcaggttacatcttatgaaggaagtttcaggaatgtccacttctctgaaggagcctcaacaggctgctgcctcaccggcttccagtggggaaccgtcttcctctggaacgatgaaaggtgacaagaatgaaatctcctaagcttcataaattattatccaactcaggacttcttctgttccttacgcactgagaagattgtaatgttcagaacttcggatgatgaggcttacttgcaatataggaatgtaaatatgttaggaacattgttcatagctgtctgctgttctgctgctttagcttctttcgtgacagcctgcttcatgtatgaaactttgaatccatttttattcagggggcagtaacgtaaatgctgctgtatttttttttaaatggcaggtgaatattgtattctgaataagtcatgtttactagaatcgttgctgtggctttgattggatcggctagga

SEQ ID NO: 37431 - DNA, 2845 bp, Zea Mays
atgaatgcaggaggagtactcggcaccaacctcctgtcctgggctgggcccctcgctagcgcttacactattctgcggtcagaccagagaagagaaggccgcatctaccaccgccagtcgcgacccccgtggttccatccatccgcgggcccgcgcggcatctaccaccggcgcggaccgaggacttggacttgcgctcgccttgcatttgcacgtgacgtgaacgcgacgtcgctcgctcgaccactgcaccaccgtggctgctcggtcgagagtgtatacaactgctctccatttggaggcagcagattgaatgatcatttcatcctcgcagtcgcagacatacattgtcccgttctctcgcggcgggcgcctgacgatctcgtcctccgcgtccgccctcctcgttgcccacgcacgcctgaaggcgacggcggcgctggctgcgcggaggaagcccgagcggacattccgtttgctcgcaggccggattgcaaggccccctctcccaaattgcaaggatagtcaggaagctaattaacagtgttcgaaagatggtccaccgcgagccggccgaggcggcggcggcggcagcagcaggaggcgagaccagcatctctacgcagcctccctcatcatcccagcaggctgcgccaccaccggccgtgttagtgtacaaggtcgggtatcctccccggaggagcctggccacggagttcaccagcacgctgagggagaccttcttccacgacagcccgctgaagcagtgcaaggaccagtccgtgtccacgaagctccagatgggcctgcagctcttgttcccggtcttgggttggggcaggacctacagcctgagcatgttcaagggcgatctcgttgccgggctgacaattgcgagcctctgcattccccaggatattggctactcgaagctcgcgtatttggatccggagtacgggctctcttcgtccccccgttgatatacgctgcgatgggtagctccaaggacatagcgatcgggccagtcgcagtggtctctcttctgctaggttcgcttctgcagaaggaggctgaccacgacaaggacagggaggaatacctgcgccttgcgtttacggcaaccttcttcgctggcatcactcaagcagctctgggattcctgaggctaggtttcctcatcgacttcctgtcgcacgccgccatcgttgggttcatggggggagcggccgtcactattgccctgcagcagctcaagtatgtgctcggcatcaggagcttcaccaaggaaaccgatatagtctccgtcatggagtctgtctggggttcagttcgtcatggatggaactggcagacagttgcgattgccttcacgttccttgcttttcttctgcttgccaagtacattgggaaaaggaacaagaagtatttctgggtgcctgctatcgctcctgtaacttcggttattcttgccacccttttcgtgtacctctttcgcgctgacaagcaaggtgttcagattgtgaacaagatcaaaaagggcgtcaacccgtcatctgtgcacaagatctacttcaccggtccattcgtcgcgaaagggttcaagatcggcgctgtttgcggcatgatcggcttaacagaagccgttgccatcggaaggacgttcgccgccatgaaggactaccagctagatgggaacaaggagatggtagcacttgggacgatgaacatcgtaggctcaatgacgtcttgctacatcgcaacaggctctttctctcgctcggcggtcaacttcatggccgggtgccggacgccagtgtccaacgtggtcatgtccacggttgtgctcctcaccttgctgctcatcacgccgctgttcaagtacaccccgaacgcgatcctgggctcgatcatcatctctgccgtcatcggcctcgtcgactacgaggcggcgatcctcatctggaaagtcgacaagatggacttcgtcgcctgcatgggggccttcttcggcgtggttttcaagtctgtcgagataggcctcttgattgctgtgtcaatctcgtttgccaaaatacttgtccaagtaacaagacccaggactgtgctgctgggaaaccttccaggcaccacgatctacaggaacacggagcagtatccgcatgcgaggcatgttcctggggtggtcatagtcagggtggattctgccatttacttctccaactccaactatgtccgagagcggtagagacacatccatccaaaccgtgcgttattgtcgtcgtcctcacaaactcttgtgtgctgtgctgtgctgtgtgtgctccatttcagaatccttaggtggttgacggacgaagaagatagagtcagcgcagaggggctgcctagaatcagtttcttggtagtagagatgtcacctgttatagatatcgatacgagtggtatccatgcccttgaagacctgtacaagaatctccaaaagcgaggcattcagcttctcttatcaaaccctggctctgccgtgattgaaaagctccagtcgtccaaactcaccgagcacatcggaaatggtcatatcttcctcacggtcgcagacgccgtgcgtttctgcacttccaagtcgatgcaggagccttgaactgaaatggatttgtttgcgtccacattctgttctctaatctctactgtatacgttatgtatcatgtattcatgtaatcagaataatatacatatgcaagtttacgaatgacaggaatagtttcgaatgctgtgctcacagttgcttaacgcaaaagctagtgtgcgatagtattccaaatgaacattattatttacagacaagag

SEQ ID NO: 37432 - DNA, 2984 bp, Zea Mays
cccccaccccctcccggcctcccctccctcagtccctcctcagccagtctatcgtggcccctcgcctcgctcctctgttcacacacgagcgcactcccctgtctcggtgtctcctcccctctcgctctccatgttcgcggcttccaacgccacggccacccgcctcatcctcccgcgtccttcagtcccgttccgcgcactcctcattccccgccggcggggtcgcctccgccgcgcggtccacgccaacgccgtcgcaggtggcggaggaggcagcgagggcgttgcgaaggagccgccgcggacgctattccccggcgggttcaagcggccggagatccaggtgccagcactcgtcttacgcgtcggcaccgaggaggcgctgcggtgcggggatgaggtggccgacgccgtgtcccggggcgtgggcatcgtcgtgctcgaggccggagaggagggtggaggcagatcgtacgaggccgctcgcgctctcagggccacggtcggggaccgcgcgtacctgctgatcgcggagcgcgtcgacgtcgcttccgcagtcggtgcgagtggcgtcgtgctcgccgacgacgtggtgattttgtggatgttataaatgatgttgttggtcaacatgtgaagattccgattttcgtcacgttgaatcatttaagtgaaggaacttattctgacttcacatccaggttgctccaatctggtgcatctggagttgttacatccttagctggcatggaactcctcaatgacgatcttataaaaaaagacttcacaaaggtgggctcagctgaggaactcccacaagcgagttactcttctgctgggatgctggaagatgttaataatgtaatggtcctaactcgtgattgcgagaagactaaagttgctggatttacaaaattggatgaagaagtgataaagttgatagaaatagaaaagcctattctgaacgaagctatcactattatccgcaaggcagcaccaatgatggaggaggttgagcttctagtggatgctgcttctcgcctgagtgagccatttttgttggttattgtgggtgaatttaactcaggaaagtcaacttttataaatgctttacttggaaggcagtatcttcaggagggagttgtgcctacgacaaatgagatcacactactatcatattctgaggttgaatctgaaaactttgaacgatgtgagaggcatccagatggtcaattcatgtgctatttatctgttccaattttaaaggaaatgaatctagttgatacacctggaacaaatgttattcttcagaggcagcaacgactcactgaagaatacgtgccacgagctgatttggtgctctttgtcctatcatcagatagaccattaactgaaagtgaggttggatttcttcagtatgtccagcagtggaagaagaaagttgtatttattctaaataaattggacctctatcggaacagcaatgagcttgaagaagctactgcatttgtcaaggaaaatgcaatgaaattgcttaccgcagaggatgtcacactgtttcctgtatcttcacgctctgctctggaagccaaactttcatattccaaaaacagtgatggaaagcattcaaccgaagctatgtataatgatcctagatggagaagcagcaaattttttgaacttgaggattacttactgagtttcttagatagttcaacggaaaatggaaaagaaagggtccggctgaaacttgaaacaccaataggcattgcagatcgattgttaacttcgtgtcaaaggctggtgaaactagaatatgaaaaggctgttgaagacttagcatccatcaaggatcttgtttatggtgcaaacaattatgccatcaaacttaagtctgatagcagttcctggcagaaccagatttcgtctctcattgagagagcaaaaggtcgagcagttacactcatggaatctacacttcagctgtcaaatattgaccttatttttgcatacacgatcaaaggaaaaacaggcagttccatgagagccacatcatttgttcagaatgatattctgagtccaacccttgatgatgctgtgaatttactaggtgactactcgacatggttgagttctagcaatacccgcgaagcaaatgtatatttggagtgtttctgtgaaagatgggatgcactggttgctccggaagaaagggctctgttagatccaaatgggcttgttaatgaaggggagaaactcaccataaaggcactggaaggcttcaatgccagtgctgccgccaaagattttgaagaggaaattcgagaattggcttttggaacatttggagggctaggtattgctggactgtcagcttctctgttgacatctgttttgtcaactacccttgaagatcttcttgcccttgctctttgctcagctggcggtttttttgttttatcaagtttccctggtcggcggaagcatgcaatagacaagattaacaaggctgctgatgaactctctcgaaaagttgatgaagctatccaaaaggatatctcacagagtgctaataacctaatccgcttcgttgaggttatcagcaaaccttaccaggaagcatgtcagcgaaaaatagattggttacagggcgttcagggtgagctatctgctgtcgagcgtaagctccaaactttgaaagttgaaatccaaaatcttaatggatcataaggtttcatttcaacttgtttatttgcaattattttttggatactaatagtttttgttggtttatactgcgttgtgatgctattgagttgacgtagtgcctttcctgtatatgatgaagtctgaaagtgtaatatgtgttgtaaattcagaataagtgataaactatcacatgataattacacaccttgagaaccgagaaggatgttttgaaaacttgcctttttgataattttacaatatgatgtgggcaagaa

SEQ ID NO: 37433 - DNA, 7315 bp, Zea Mays
atggatctcgcggggatgaagcggcgggagctccaggcgctctgcaagcggcacggcctccccgccgggggcaccaacgccgacctcgtcggacgtctcgacgccgtgctttcggggcccgctgttgtggaggaggaggttgccggagtgccggcgaggaaggggtgtctgaagcaaacgggcggaggtgccaccgaggccaagaaggttacttttggggcggaggtagggaaggccaggagactgaggtctcgggtcatatggtcgccggtcgttgccaagacaagggggaagtctgctcgagccggtactgattctgctgctgaagacggtatttctgcagatgtgggcgctgatgtcccagtgaggcggtccaggaggaattcgttcaatcctgccgaggctgaggaagcaggagaggctgttgctgttgacaggaagcccaagcgcaagaatcaggagaatgacgagggcgttgctgttatcgctcaggctagagttacgagaaggtcaaatttggagtggtctgctactgtattgcctcctgctgttgagaagaagagagggaggcagaatgcagctgagtctgatgtgcagaagtccgctctggtggaagtaacagctaggactacaaggtctcgctcaatcgtacctgttgtggtgccacccactgtggttgagaacaagaggaggaagactggagatccacaaacaactgtagagttgactatgctttcagatgtgcccagaagtgattttcctgccaccaggtctttaaggaacaaaattgtccacgttaacaacagcgtcgtggacgaaactcacactaccaggcagttggaaaacaagatgcgtccgtctactcgtaggcatcaacaggttgcatcttctccggaggataaaggtcaaaaaattcctgctaccagtaagtcccctctactgaggtggtcacggagaaactattctgaggccaatagtgcaaattcagtaaacatcaaattggccaaagactcgagcacagctcagccattggcacaccataattctcattctgaagatttggagaaacaaccagcagttaaagaaccaattaaacggtcaacacgtaaatctattgctttggctgcacttgagaaagagaaggatgtaattgaaggaaagaaccctgaagcacatgttaggcgatcaacgaggaaatcagttgtgcaggttaaagataccaaaagtattgttgaagagactcaatatgctaacagtgaagatgtggcgaagcaaccagcaactaaaggacctgctagggggctgagacgtaaatctgttatcacagaattgcatgagaaagagaagagtctcattgccgaaaagaacatggaaacagatgaagcgatattaacgcggaagcctgtaatcccagttaaaaatattaaagctgttggtgaaggaattcaaattggtaagggcaaagatgtggataaacaatttgttgtgaagcaacctactaggcgatcatcgcgcaaatctgtgctgcctgatatgcttgagaataatagtggacttctagcacccaaaatgaatgctgagatgaatgttaggagatcaacacggaagtctgttcttcctgacatgcataatgagaagcaagatcaccataaaatggctagaaatgagaacttgcaaagtggtaaatatcaagatggtgagaagcaacagaaagtaaaagattctattaggcaatcaaggagatctatcgctacagtgctacttgagggacaaaataatgatgaaggaaaaaagttcaaaaatcctacgaggaggacaacacacaaatctcatgcccttaatgcagttgaagaggtcagcatggatcacattgaagttggtgaagaaggcttgaaattgaggaagcgcagtaggtttttgctggaaatatcatcttcagctaatgtttcctggaagcatcagaatgcacagatctctaatgaaaaagataacacagaaggatcgcagcaggcatcaaattgcacaacttcaaagagaaggtcttcaaagaagagacgaacaactgctccagaagaagtgatgcctttcaaggtggcaaatgatgacatagttatcatggaagaaacaaaggacacacttgaatataataatgagtctagtagtaaagttcaagaaatttgtcaggttaatgctgcaagagaagagttctcttcaggtccattgcttgtaacagtagctcctagtgacgaaatttgcacagtgcagagtgtagctgtggtgatacctgggtcagaatctggtgacgatgcaaatcaaagttctgataagagtaagcaacctcaggaacattctgtcactcaaactgttgatgaccatttatctgaaacaagaagtgggaaattagatcaatcaacatgcatcacaggattagtctctgacaattgtgttgtctcagaggacaaaacattgatgagtgaagaccgtgaagagcaaagccctgtgtccggagaacagagagttagcttggaagcaaatgccaatgagcctgaggaaaagaacctagctaacgtcacatcaactgatctccacaccaaaagtctgcagcatgatattgacagaatagctaaagagactgataaagatgttttgtctttggttttccctattgaagagcatgaagaaaaatatggagtgagccctatagctgttgaaaagtgcgtctgtcgtgaagcaagtgcatgtgaatctgcacgaaaacccctaaccgttatcttttctaacaatctccacaccaaacatctgcaacatgattgtgatgtgctaattaaggagactggtgaagaagttttagctcaggagaattgtaatgaccagcctgttcctgcccagactgaccaagaaattaagttaaacgatgaacttgctgatccggatgttttagctcaggagaattgtaatgaccagcccgttcctgcccagactgacctagaaattaagttacacgatgaacttgctgatccggaccatgaagagcaaagccctgtatccggagaacggagagttagcttggaagcaaatgccaacgagcctgaggaaaagaacctagctaacgtcatatcaattgatctccacaccaaaagtctgcagcatgataatggcagaatagctgaagagactgataaagagcatgaagaaaaatatgcagttagccctatagccgttgaaaagagcttccgtcaggaagcaagtgcaattgaatctgcaggaaaacccctaactgtcatcttttctaacgatctccacaccaaacatctgcaacatgattgtgatgtgctaattaaggagactggtgaagatgttttagctcaggagaattgtaatgaccagcctgttcctgccaacgagcctgaggaaaagaacctagctaacgtcatatcaactgatctccacaccaaaactctgcagcatgataatgacagaatagctgaagagactgataaagatgtttcgtctttggttttccctattgaagagcatgaagaaaaatatgcagtgagccctatagctgttgaaaagagcgtcagtcgggaagccagtgcatgtgaatctgcaggaaaacccctaactgtcatcttttctaacgatctccacaccaaacatctgcaacatgattgtgatgtgctaattaaggagactggtgaagatgttttagctcaggagaattgtaatgaccagcctgttccggcccagactgacctagaaatgaagttaaacgatgaacttgctgatccggaagttttagctcaggagaattgtaatgaccagcctgttcttgctcagactgacctagaaactaagttaaacgatgaacttgctgatctggctatggaatcaggttgtagcattactgaaaggaatgaagggcttgttgctcataatcttgatcaagaaggtttccttgaagcaacaccagagtgcaaacaggaatgtggtttgcctgaggagacagtaatttcctcaaaagaaacaggatctctgctgtgtgcagatcaatcaccaattggtctggaatctttattttcgcaagaaagcatagttgaatcagtggggcattgtgcacttgcttcagcaacaactcataccgaaaatggctttgatgattcaaaagattgccataacaagtctgcacttgaaaatgttcatgtgccagaaccttgttcacacaatgatactaaaggaggcatttttaaaaatgttgattgtatgcatacatcccagcgagatgatagaatggaaggagtaccagaggctaacactgatgaagaacatgttctgtcagcctttttgctggatgcaaatcacctaaacgtagtcattaattctgaagaagtggtttgtgagggtgaagatagtaaggagcttctccattcggaagactgtaaagcttcatccgagaaaacagatgtgaatgatggcaatgtatatggtattagtgatgctgtagtgagatgtgcactgcatgctccagccgatgataattatgagatttttttgggtcccaatactgatgtaccacgtcaggtttataatgacggatgcagtgatgtcaaagaagatcgatttgcttccaaaccctggacaattgatattattgaggatgcctctgtcaaagaaagatcaaatttaaaagattggcaacttgattccaagttggagggcacagaaatagtggaatctggcctttacttcaataaggatattggtaacattttacatagtggatctattggtgaaataactccatctggttctggtttatcaaaagattcatctgtggactatagaggggaggttttagatggcttctcaatggaagcatctcttgaaaggtcttctacacgtggggaacaaaatggttgtagactagatgctattgagaatccttcaattactttagcaacttctggttataagcatgaaggtgctttatctgaggaagcagtgtacacaaagaagaattacgctggaacatgcttgtcaaatcccagggaattaatcatggagctgcaatcccatttctcaaaggaaaacataaatgaatctgatcctcatgacagccttgtattcccaactgctgaaaattcagcagatgaacagctggttaaagtacaccatggttctaatctgtctcagttaggattaactgatctgttggatggaccaattgggtgttccaataccgacgtgttgtgccagtgtgacaatcataaaaatcaatccaatgaggacaaggtagaggaagttgaggcggtgtctgctgctaaatacatagaaagtgaagttgtgctgctcccatctcaagagagatcaaatttgaataatgagcagcttaacaccaagttggaaagcccaaacattatgggatcttgccttaactgtgataacgatgtttgtaatacttcggacaatggatctgtttttgtcattggtaaaagaactccatctgcttctggcttaccagaagattatcctaaggatagtgacttgcaacaaccggttttagatagcttctcagtggtttcatcttttcaagacaatatatctgggaagaaaactgtttctggtgtagcaggcagtgagattctttctttaagtttagcaactcctgattataaacatgaagatggtttctctgaggaagcagtatgcagaacaaagaattatactggaacttcctcggtagatccgaggcatttagacatggaggggcactctatttactctgagggaggtactgaaaaatctaatctgcaagataatcttgcatttctaagcgctgagagtggaaaagatgaacctattatttgccatgttgagaaactggttgacgcacatgcttcttcagatacataccaaggtccttgtcaagatctaggcagacatgaagaacaagagagctgcatgtctattcctatgcaagccaaagaaagtggaggggttttgaggtctagccacacgaaagggtcagttacagcagcccaaattgatttggcaggtgatgcccatcttattgtgagtgataatgctgctgccaagcaagtgtttagtgaggagaaagaggaaacaaaatctatctcttcttcagatattgatatccttcatgaaaaatcatactccagtggacacgatgaccatgctgcttgtgctgccgaaactcagttctaccatccacagaaagcatctatatctgatggactacatttgggtcctagttctttgcaagtagaatcactggatgctttggatagcgatatactgtatgttaacacaggagttctcgagcagcatcataaagagggttactatgaacccagtgtctaccaaatcacttcaggcatttgcacaatgtctgaagctgaaccattcgaagttttagaaactggaaaagatgtaaaaacgccatctaagctagatgagcaacttaatcctgggttggacggagatgaagctgagaaacacagcttagactgtggtacagacaccagtcctgtgatgagcaagagaaccctttcttcaccaggatcaggaccatgccagcagtatgtaaatgaaagcaccaccagtacacagtcgactgataatcacccaaacgacctacccgctccgagatctcctgaacaatccgcgtgttttcagaatgacaacgattcgggttcagtaggcatttgtcaaagcagcaggcgaagaggtatagatgaactttgcggtaagctgcagagtttcaaagtttccagcgccgtaaaaggaagctacgtagctatgggtgcacctcgtccgaagcctggggacagcacgagccgatctgcagccgcgctgctcaggaacatagagaacacaactgctgttaaagctggccgtcctcctgtcaagccaaacgccgatggtaaggactcgtctaggcgagccctgcagcccataagcggaaggcctgacagtaggtagttcggcggttccttaataagtgtgtcgtgtttgtgttcaaccctttgttgaaagccaggtccgtgtatttgtgcagcttgttgtcatgaagctgctgtgtgcgtgtcatttaacataagcgtgcgtgaagttgtgttatggaagtggctaaatatgtgttcgttaggaggtcaattggcttgaactgaccctgctgttccgtgatttctgtctaaatatacttgtgtggctgtgtcactttgattggccttatcgatcacatgcaatgggatcacatctagcgtgctctagggtcctcgtttggtaatcgctg

SEQ ID NO: 37434 - DNA, 319 bp, Zea Mays
ccataattaactcgagctgaagttgcggggtcaacgatgatcttcgattgaagtcttcgaccgagtacttgataagcgatgcacagggacctcgcttatttttgtctaaagtctgggattcagggttcgacaaatcgagcatggaagaacgaggttcgacgggctcgacgacgatacgggagagcgacgtatatggagctgtaggtctggcgggctgatgcaagtgacagagacagccgcgtaaggcagcagtgcgtcgacagtctatggatttgggtggtttattgaatagatgggatgcgaggagccgaacaattac

SEQ ID NO: 37435 - DNA, 1063 bp, Zea Mays
ctcgatcactactatcatttgccgtcttccaccctccttccattccgttcggatacaccgtctcgtttctctctcctcccctcgcccgtcttccctcctgtgcgagctcagctcacggtcctcccacccccacgagcgcctccgcggcgaggaagagataatcagcaggcggagcggggggcgcgccgatggatctggagaggccgccgccggcgtcggcggcggaggcggccggggccgcggcgtgctccatctgcctggatccggtgctcgcctgcgtcgcgggccggtccgtcgccaagctgcaatgcggacacgagttccacctagattgtattgggtctgcattcaatgcaaaaggagcgatgcaatgccctaactgtcggaagattgagaaaggtcgctggctttatgcaagtggacgtcacccccctgctgatattgatatgggtggatgggtgactagcgacaactatgatatcacctccgagcttccttttggatttcaatggtgtccctttagtggattcacccagctagcatcaatgttaggggtgcgtgaagctgagccaacttgtaagcattttgacctgaacttcaacatgttaaagttttttcttttttactgcattgatatttcccttttatgaagaccacacaactggagatcactcaagtgctgcaagcagttcacttgtttgcccatatcttgccctgcgtggttttctccatcctgttaatgtgccttctacttctaattctggtgctgaaagcacttcatttcatcggcactcaactggcttggaaggacatgtcactcctgatttgaacaatgctccagttttccatgctaccgagtcaagaaatcatgacagtgagcacagacatttgagtaatcttcctgtatcaggaactcctgaatattctatgactccatttgggataggagtaccaagatatgacagtggcagccaacagggattccgatcatatgcacatcatcatcccctaatccataggctgttgttgaaaaagctgcatattatgctcttgtatggatcaa

SEQ ID NO: 37436 - DNA, 4588 bp, Zea Mays
ccttcctcggcatccttcggtcccggaatatgcccccggcgtctccctcctcgcgttcctctcgtcggtgagctcctgccgcctggctcgcacagccgatttgcctcagtccagatcgtgcctccttcttcctagatcgggtccgaattcggctaccctcgccaccgccctacgccaggtgccgaggcctccgccgatctcttcgccggcgaagagcggccaccagaattctggtggttcctgtagcttgtggatggaggaggaggcgctgggtcgtggtggtggtgaaaagctttgatttcgtagccgtggtggacgccgctgctaatgcccttgccgtgcctcgttggtggcgtgcaagatgtatgccgtggggaaggtgggcagcctcatctcccgcagcgtgtacaccgtctccggcccgttccacccgttcggcggcgcggtcgacatagtcgttgtgcagcagcaggacggcagcttcaagagctcgccgtggtacgtgcggttcggcaagttccagggggttctcaagtcgagggagaaggttgtcgacatctccgtcaatggcgtcgacgcagggttccacatgtacctggacagcaacggcgaggcttacttcctcaggaacgcggacccgaatggtgaggaaggggagttcattgtctcccccgcctcgtcgggagatgagcgagaggtgccgatccaggaagctcagctgaggaagtcgaagagcacttcgtgtgatagctcgacgatggaagccgacgtcggtgagggcaagattcttgcgaggacaacctcgaggcggataaccatacttgaaaggatgtttggccggaaatcgattaagaacaatgcccatgctgtggatagggtgagttcattggagcgtgcagaggtcgctgcagaactcctagataccaagtggtcaacaaatctcccacgtagttcaaaacctaatggttcaaatgatgagccttccaagagcaacaatgatcagatggaaacctcaaaacctgtattttcggaacatagtttggatcatgggaaagagatggactctaactgtgacaatgctcactgcaattcatgcagccctcgtggaggaagaaacagttcagcagatgaaaccgatccgtgtttacaagccactattgtgaagaaagaggtggttgagatacacgcgcgtgagagcagcgacttcactgataatatcacttcaatcacacatcaacaagggtcagaatcttcgtcaaatgatctgggaacagataaacttatgcagcagtctgtcgatactcaagatgagttgctgcatgatgttgaagatgtaactgaaagggagacacatgcagaggaggttatttccaatgacatttttgaaatccatgttgttgagacagacattacaagtggtaagagcgaggtggattctgagattgttactgtggatccagaaccagatcgagctaaccagaattttacagatacaaattaccaaaattatggcaccacagatatttcatctgaaagacatgaggtttcattgatcccttctgcacaggatgcagttcaagagaaaatagttatcctcagcagttctgaggctgtggagggctcactagatgcagttccagagaaagtagtcattctcagcagttctgagactgtggatagctcatatgctgtgtcctgtattttggatgacacagttcatgatgcttctgatatctcacaggctgacggtgtacaacatgaggagcactctagtatctctgatgggagtacagaaaagctaatttctgaggaaagttcattagtatgctatggtgttcccagcaacaaaaaagacttggttaatatagctgttcaagaaagtaaagcctttatcttaaaaaatcctgcctcccaaatcttggaagagagtggtccaggtttggatgtatctacagacagtgtttccctttcacatgcagactcagctcctgatttagcttgtcagcatgtttctcctaatgttgaagatacaacaagttatgagcctggcattggtcctgaagatgtaacaaaaaactcagttgtggaaaatggagcatgcagcggggaacttgttgtttctgttattcagacctcagcgggagatggactgacaaaatgcattgctcatccagctgttttttctaataaaatagaagtagaaggctcaccaacttctgctggattttccagtttgatcagtgttgaagtgcaaaacacaaaactagaagatgacacaaacaaatctagttctgtgattggagatgaagctggttttgtgcctgaggctacagctgagcttgatgaagaagcagaaccagttatatcattatctgaatatacagaagaaattcagtttcaatttagtgatgctgaaaattttgcagatagaaaggccacggatgacatggtggctaacaaaacaacaggtgaagtagaacatgatgaatctgattgtgacacagagaaacaggaagaaggtgatgtaggtcttgtaaatgacttggagaactgttctgcgtcattaaagcctgtgagtagccctgtttctattcctgcaattgacttccagtcaggaaatagtaacagagaggctaaatctctaccaaatctccgttctcatatacatgatcttgaaaggtcttatagttttcagctaagccgctcactgcaatcaactgctgaaaataatggaattgatctagtcaagagcatgaattatgcttttcttgagcagaaatcagaagctattggtgatttttcagaagaaaataacagccctcctgaggttaccaacactgtagcacttgatggcaaccatgctgatgatctgaaagttgatgcgttcattccttttgcagaattatcactatgcagacacctgttatctgaaggcatgggggaggatgctgcttgcagtgcatttgattctgagaaggtaaccttagaggagttccgtaacatgaagcaatcactgatgcgaaacaacaaactagttgttaggattgctggccgctactttccctgggatgctgctgcacctatagtactcggtatgatttctttcagtgaggaacaagtttttgaacccaaaggaatgataaatgtggagcgagttgagcaaagtgcagctccaggtggcagctggagcatctggccatttagtttcagacgaacaaggactattactgctatccagccagtttgtgaaagtattgttgagacttctgtatccactcctaaagaattgacacattttaaagaactagatagagaaaggaataaatccagggtaaagaggattgagaggaaggtgcgatcactcactccaacatctgacgagcttgcatctcttgatctcagagagggcaggaacgtggtaacatttacgttctcaactgcaattgttgggaaacagcaggttgattgccacatatatttatggagatggaatacacgcattgtaatatctgatgtggatggaactatcaccaagtctgatgttcttgggcagttcatgccactagttggagttgattggtcccaaaacggagttgctcatttattttctgcaataaaggaaaatggataccagcttctatttctgagtgcacgcgctatttcacaagcccacatcacaagacagtttcttttcaacctaaagcaggacggcaaagcacttcctgatggccctgttgttatatctccagatggtctcttcccgtcactttacagagaagtcatcagaagagctccgcatgaattcaagatttcgtgtctagaggccatcaaagatttatttccacacgactcaaatccgttttatgctggatttggaaatagagacacagacgagcttagctacctcaagggtgaagtcgcagtgaaccgacgggtcgatacaaagtcgtacacatccttgcatgctcttgtccacgggatgttccctccaatattgtcgtcatctgagcaggccagcattcccgaggactacaatgcttggaattactggaagatgccattgcctgatgttgatttgtgaggtacaagtcgagtctgcacaacagcactgcactaattttatgatgtgccgtagtgatcatgagaaggccattacttggttggctacatgtggatgctcctgctcctgatataagttcctgcaagatggaattttgtatatataggatcataatagatgtagtagctatttcttgtgtctcctgttgttgttgttgttgtcgtcgtaggactggaaatcatacctccgtgtgtcctgtaactgaaggtacaaaatttactggatggagggatctgatagtatgttgcagccccccctttttcgtttcatccttgatgtaattgtggtaccgatgtattttgtacaagaacaaatcaataataatgcaatcgaaagcgagctgttcatacgcagacacaacatgttgcattgaccctaggtgcattcggtaactgaaaatcggagctgtgtatactgtggacatgtcatctttggtatgcctgcgacttttagctgcagctaatgtgc

SEQ ID NO: 37437 - DNA, 5096 bp, Zea Mays
cgggagttgggtccggtcgggtcgggtccagtcaaccgcaacagagaagggaaaaattccaggcagcgcagtgcgcacgccctgcggcaaatacacgaatccccgagccgggggcgagaaaaccgcaaaaggagattctcctcgccccttccactagactactggagtacccgacggcccgaggcggcgagctcgtcggcgactgaccgccgccggagcagccgccgcctcccgctggttcctgtaccacagcctcgcaggagcgcctccgttcgctacgccacccgccactgtgctgtcggaaggcagctcggactactcgcgccgcctcggcttctccgcgctcgccgcccctccgccggcgtgatcaaggatggagctacatcgtgaacctcctgaagctattctgaatgccataaaatttgatctcatgacgagtacggatatggaaaaattgagcagcatgagcataatcgaagtgagtgatgtcactagtccgaagctaggattaccaaatggttccctgcagtgtgagacttgtggatcacaacgtggacgcgactgtgatgggcattttggtgtgactaaactggcggcaacagtacacaatccatacttcatcgatgacgttgttcactttctaaaccgaatatgtcctggctgtctcagcccaagggaaggcatagatacaaagagattggagagagaaaaggttcaagcaacatgcaagtattgttcgaaggatggctctaaactttaccctagcatagtctttaagacactgtcaagtccaagagtattattattcaagagtaaacttcacagaaacgccagcgtgatggaaagaatttcgattgttgcagaagctgctgacagaatgcctaatagatcaaagggtaaaggttcgcttgaaggcctgcccctggatttttgggattttgtaccttctgagaataaacaagtccagtcaaatatgaccaagataatattgtcgccctaccaagtcttctacatgttgaagaaaagtgaccctgaacttatcaaacaatttgtttcaaggcgggagctattgtttctatcatgtttaccagtaactcctaattgccatcgtgttgtagaaattggatatgggcttccagatggacgcctaacatttgatgacagaacaaaggcttacaagaggatggttgatgtcagtaggagaattgatgactaccgccagcatccacatttcagtgttcttgcaagttcacttgtctcaagccgggtttcagaatgcctaaagtcatccaagttgtactctaaaaaggcagatggagagacatccacagatacatatggaatgaaatggctaaaggatgttgttctcagcaaaagatcagataatgtttttaggagtattatggttggagacccaaaaattaagttatgggaaattggcattcctgaagatttatcctcaagcctggttgtttctgagcacgtcagttcttataattttcaaagtacaaatctgaagtgcaacctgcaccttctagccaagcaagaactatttattcggcgaaatggaaagctaatgtttcttcggaaggcagaccagctagaaataggagattttgatggtgattgtttgcatggatatatcccacaatctatacgctcaagggttgaacttgaagagctgcttcaaatgctatgcctttcagtatcaacaccagcacccgcagttattaaatctatgaattttcaaggttctctgtggactgtatggttgcaaggcacttgacttcctttcttcagcacaagaagtactatgtgagttcttaaccatgaggggtttaagtgtctctctttcagatctctacatgttctcagaccattactcaaggagaaaactagctgagggagttaagttggcactgtatgaagctgaagaagcttttcgagtcaagaaaatattgttagatccaattaacataccagttctgaagtgtcacgatgaaactgaagatgtaacttacagacaatctgattgtatccagagcaatccatcagttatcagatcttcaatcatggcatttaaagacgtcttccgtgatctcttaaaaatggtgcaacaacatgttagtaatgataactcaatgatggtgatgataaatgcaggaagcaagggtagcatgttgaaatatgctcaacaaactgcatgtattggtcttcaacttccagctagcaaatttcccttcagaattccttcccaactctcatgtattagctggaatggacagaaatcgttgaactatgaagctgagagtactagtgaacgtgtgggaggtcaaaacctttatgctgtgataaagaattccttcattgagggtttgaatccattggaatgtcttctgcacgctatatctggcagggcaaacttctttagtgaaaatgctgatgtaccagggacattgacaagaaaattaatgtatcacttgagagatatacatgttgcctatgatggaactgttagaagttcttatgggcagcaaatagtgcaattctcttatgatagtgttgatgacctagtagataaactcggcgccccggttggatgtcgggctgcttgttccatttcagaagctgcatatggagctttggaacacccggtcaatggtttagaggactcccctctcatgaatctacaagaagtatttaagtgtcacaaggctacaaattcaggggatcatattggtttgcttttcctgtcaaggcatttgaagaagtacagatacggtctggaatatgcatccctagaagttaaaaaccatcttgagcgagtgaacttctctgatttggttgaaaccatcatgattatatacgatggacatgacaaaataagaaacgaaggaatgtggaccacccattttcatataaacaaggcaatgatgaagaaaaaaagattaggattgagatttgttgtagatgaacttgcaaaagagtatgacaccaccagagatcagctaaacaacgcaatcccatcaattcgtatctcaaggagaaaatgtttagtaggtgacgagggtgttaaaagttcatcatgctgtatcgctgtcgtagcacatgctgaacgcaactccatctctcagttggacactatcaagacaagggtgattccaagcatactggatacactgctgaaaggttttttggaatttaaggatgttgagatccagtgtccacatgatggtgaacttcttgttaaagtttgtatgtctgagcattgtaaaggggggaggttctggcctactctacaaaatgcttgcattccagtaatggagttgattgactgggagctgagtcaaccaagcaatgtatctgatattttctgttcatatggcatagactcagcatggaaatactttgttgaatccttgaaatcagcgactactgatactgggaggaacattcgccgggagcacttgctggttattgcagatagcttgtctgtaactgggcagttccatgcattaagcagtcaaggtttaaagcagcagcgcactcggttatcgatctcgtctccattttctgaagcatgtttttctaggcctgcacaaagttttataaatgctgcaaagcaatgttcagtggacaatctgtgtggaagtctcgatgcagttgcttggggcaaagagcctttcaatgggacgtcagggccttttgaaattatgcactcgggaaagccacatgaaccagaacaaaatgagagcatctatgatttcctatgcagctctaaagttcggaattttgaaaagaatcatttggatacccgtagacaaagtactgaaaatgcttcgatatgtagattagcatgcaagtcttctaaaggcagtacgaccgtcaatggtgttgctataactatcgaccaggactttcttcatgctaaagtcagtatatgggataacattatcgatatgcgtacttccttacaaaacatgctaagagagtacccgttaaatggatatgtggcggagccagataaatcacagttaatcgaggccctgaaatttcattccagaggtgctgaaaagatcggtgtgggagtaagagaaattaagatcgggttgaatcctagtcacccaggtacaaggtgcttcattttgctgagaaacgatgataccactgaagacttttcttaccacaagtgtgttcagggtgctgcagactctatctcaccccagctcggaagttatttgaagaaactatattacagagcataagcttatgcaacactcccactagttcatttttttaactaaaacgtggcaaataaaaaagaacggatggagtaggattttggaaagtgttcctggcaacatcttgttctgatcagaccatattaccaatttctgataaggaaactacgtgtcgcattttaaggatgaggtgaaaactgaaagggtctggcgctcagaactcagaaggtcttctggactggaggtgtatgtcaactcaactcaatgggactatgtaaggtgggcctgagtcatgactgcggtttcatgcctgcaattctctagtcagtagtataaatactagtctgcgtgttttctaatatgaagatccatctattttattacttaaccatagcgtagatgattggtaacagatagatacattttatttactgattaaaatgcagcagcgactccccgaacttaaaacaggtaaacgggtgtggaaacttagtggctcattcaaaactgtctaaaatcgggtttgctcaaacaaagtgtcgacatggcatgtcatgttgaaatcatttgagtctctaaatttggtttacagacttttattagtgtgcttcaatcgtagcacaccaaatcagtattcggtttgagcatccgatttctgatggttttgcacaggccggccaagttatatgatctagttttttaacttaggggatctaattgatacaacatgccaagtttaagaatggctattgtatcttactcttatttattgaacaagtaatgcacattcccagtcagccgagcggctttgcgtgatgaatttgatgaactacacaagttaaactaagctacaca

SEQ ID NO: 37438 - DNA, 2860 bp, Zea Mays
accgatcgatgcgctcgtcggggccggcgggcaaagccaccagtggtcagagatctagctatggcgccggcgcttctgctgctgcgacttctggcattgattgcgacggcaagggaggcctgcgcggcgagggcgttcgccgcggcgtccaacgcgacggcgcatggggcgacggtggtggccgggaagctgaacgtgcacctggtgccgcactcgcatgacgacgtcgggtggctcaagaccgtcgaccagtactatgtcggatctaacaacagcatccagggcgcgtgcgtgatgaacaccctcgactccgtggtcgacgcgctcgccagggaccccgcccgcaagttcgtcgtcgtcgagcaggcttttttccaaaggtggtgggcagagaaaatcccaaacattcaggcagtagtccgcaagctcgtggattcgggtcagctagagttcataaatggtggatggtgcatgcatgatgaagctgctgtccattatattgacatgattgatcagaccacgcttggtcaccggatgatcaagaaacaattcaacaagactccaagagctggctggcaaatcgatccttttggacattctgcagttcaagcttatttgcttggagcagaggcaaattttacgcgtacaaaccacataatgtggaccatgggagatgattttagttatcagtatgcagaatcttggttccggaatatggacaaacttatctatcacgtgaacaaggatggccgagtgcatgcgctgtattctaccccatccatttacacagatgcaaaacatttttcaaatatatcttggccagtaaaatatgacgatgatttcccctatgctgattcgaaaaattcatattggactgggtactatacaagccgtccaactttcaagcgatatgttcgagtgcttagtggttattacctggctgcacgtcaaatagaatttttagtgggtaggagtttcttagggatgttcacgaccagcttggaagacccaatggcaattgcccagcatcatgatgcagtctcaggtacagcaaaacaacacacgacagatgactactcgaaacgccttgctcttggagcatctaaggttgagaaaggagtcaatgttgctctgacctgtttactaagttccaacggaacatgtgcgccttcagtacaaaaatttagtcagtgcccacttctcaatataagctactgcccttcaactgaggaaacagtttcaggggcaaagaatttagttgtagttgtttacaatcctcttggaagggaacgtagtgacttcatacagattcctgtcaatgatgaaaaccttgttgtaaaaagctctgatgggactattattgagtcacaactagttgaggttgataatgtgacaagaaatttaaggaaagtttatgtaaaagcgtatcttggaatcacaacaaacaaaccaccaatgtattggttactttttcaagcttctgtgccgccaatggggtggaattcttactacatttcgagatccacaggatccaacagcattaggtatgttgcaaccatggtttctccaaggaatgacacggttgaagttggaccagggtctctaaaactttccttctcatcagcatctggacaactggagagaatattcaattctgtctcaggagtggatctaccaattcaacaaagctttttttggtatagttcaaatcaaggtgatatcgtggatgcacagggatctggagcatatgtatttagacccaatggtactacaccaactattgtatcatcatcggttagaaactatagggaagattgggatcttgaagtgacagaaccagttgcaggaaattactacccggtcaatctaggcgtgtatgtagccgatggaaaatatgagctgtcagtacttgtggaccgtgctgttggagcatcaagtattcaggatggtcagctagagattatgctacacaggcgtgtaatcagagatgacgacaaaggtgttgatgaaccacttggtgaagttgtttgtttggatggaagttgcaaggggctcacagtgaggggaacatactatgtcaaagttgacaagatagggcatggagctcactggcgaagaacatatggccaacaagtctattcaccctatcttcttgcttttactcatgaggatgagacaagttggaaatcctacaatgttgccaaacaaagcacgatggatgagaattacagtcttcctgataatgttgccattattaccttgcagaatctagatgatgacaccacattactccgcttggcccatctatttcaggatctagaggacgctcagtattcagtgatagcaaaagttgaactaagaagggtgttcggaaagagaaccatcaaggaattagctgagactaacctttctgccaatcaaaagaagtcagagatgaaaaagctcaactggagagtattggggaacgataaaagtgatcccatcccactgaaaggtggtcccgttgatagtcaagctcttgtcgttgaactcggacccatggagatacgcacattcttgctgaagttctagattgcatacacttagtaattgcctagtttttaaaggggaaaaagaaacatcagaatctaggacccatttggctatcattggttttcaattgactgggtaagaggacatcaataccaattctacattctattctcgctgctttcatgtatatatctctcaatcacccactagctagttggactctcatcagacttcgcttagagttcttgacccaagcatgcatattgaattcatatatcttgatattgtgaggtttgttttagaatatgatacccctgcttatatgaaa

SEQ ID NO: 37439 - DNA, 3129 bp, Zea Mays
ggcgtccacacacctgacgttctgcctcccacagtcccacccgacatcctcgcccagaacgcgtcgctaatctcgcgatcgcgcctcggccgttccgcgcctgcctgccgccgcccgcgattgtagctcaccccgacaccgtgccccctctcccctggcgtgatgcccgcctcccacccccttctccgcaccgcacggatctagcgcgggaactgctcagccacggctccgcacaccctcccttcccatgatacggagctgtcctatcctgctcgcgaggcaacgaaagggtacgtgatcctctgtctacatggaaggtgaggcagatcggggggagagtggctcgtggcagtcgcctcgatggcgtccttcgcgccgtccggcgaggtgtcgtccaagcacggcgtcgtcggctacgggatcgtgggtgggcccaacggcaacgccgtcgcgcccgctgccaagtccaccgtcgtcgagaccaccatcgagaggtttgcatatgcttctagtgtgccacgattgctacttctgcagataaatgaagtcagcaaggaatacttcttaaaaactgtaagtaatattgttggtgataaattgcttaagcaagctgcttcacaatatcaaatgcaggcacaacgaagccctcagacaaacccaagcaactattctttatcaggtcaagtttctggtcagcagactgctcccagtggttctgtgacaggagatgaacagaagggatatccatgggcgcacaccatccctatgagacaagctattgccagcactcgaccacctcaatttcggccttcctcgtctggccaaatgcggagtaatacggtacaaacaatgcagcatcacgtgcagcgaccacaaacatcttcaccagtgtttggggcaaatagtattcatgcacgtccatttctgcggccagttggaggtccagctgcaccatttagaccacaaatggcagattccaatccaagagcacacttgattcagggagctgtgaccacaatatctaggagtgtgccaaaacgatccatagtgtctggaaatgcgccagtcaatcaagccttgggatcttcaaaagtcagtgctggcatggaaagccagtcacaacaattgagtgcgcctaagcctttagctgcaacaagcttaagtcagactcaatctcatggcattcaagaagagcctaaaattcaggggaagaaacaactattattcgagagtttgcctgcaaccgatctaaagtattggtctctagagaggaagctctgccaaccattattaataactgagaagatgttcgcgtacagggagacggtgttggaggaggcacatcagggcatggagctacatgagcactgccgccatatagttgacaacgatgaccaacactgtagattccattctctgtgtgtacaccaagttgggctgaggaacactgagcagcaacaacaatatcgtaaggagagtgcatatgttggacaaatgaaagtataggaaagcgctatgctatttgcatgtttgctgggagaaagaaaagatagatgaaggatacggtgtttgatactgagactaaggtggtgttgcaaactgatatggccaagaagaacctcttcgtcaagagatgtgagatttgtccacttgtctttcacatgttctctctactatcgctctaacagaatgttagtaccatgagcaagctaacctggattgatggagatgagatagtttgacttaggatgattctagaaattgaattgttttgggattgacggaatacatgcaacaagttcagatcgacgacgacgtcttcacactgcatgttttcttgcttcgccatcaccttcttacagcaccatccatttagctttctctcctcttgcatgaacgactaactgttgaaactggtgcttctaatggatgaggtggattaatctattatatgattattgaggtgtttatggttccatgtcttaataaagtgtcacactcacgttttgtctcattttcttgtgtatatctgttttcatgttcatgttgtccctgcacatatgtttagaataatcatcagcattactaaatctcacttcaagcttggtcttacaggtatgttcccatcatataatcctgcatgatttcactatttgccttggtgtattataaattaattatgttaatattatgacatctacccttgtgatagtactggtctaaattttctaattgcaccaaaactgtatgaagcgaatcagttggatttagtcaaaggtggatttattgcaaatgtgcagtgtgaagaagtatggatttaccctgcttgaattcctcatcctccccttcctatgcctcttgatttggtgtcttcaatccatcttcgcagttcgttcttgcaacaatctcataacccatggtcacaaatccactgacaccaatttgccgtgatgcgcctttatttgctagccaaagattgtttatcccatgcgtttgtggagtgggtggcccgcctcccgttgacgccgctaacaacatagacacaacgacactgcattgtgccctgtgctttttcactctcaccgagcttgctcaacaactggtggctggtgcaggatgtggacgatgacggagccgagagaggtcattcgaaggcaatgccggaggtgacgacaagggtcataaatagagaagaggtaattgtggatgggttgagggataatgtgttcgccttctcagagaatgttccaggcaccacaaccaagggcatcatggacacagtcctggtcacccagtactttggcaccatgagattggggcctcctcgaagtcatctcgttcatcccccatggtcctggagctgtcaaggatgtctcggcatagataagagatggcttcctgcatgctaatctttagtgagaaaacaaaggattgatatggcccatataggtgagggcattggtactatcatgctatgaaattgttaattatagtcaatatatgatatataaagctagacttgattggtctgtaaaagcatagttcgattgagctataagtgcacttgtgagtgagcctaggtatccaaacctgtcagctcttcatggaaatcctttgggtcagactgtg

SEQ ID NO: 37440 - DNA, 733 bp, Zea Mays
gcgctatcggcatttcttgcgaggaattttagttgtgcagtgaagacagtgctatgcattcatgtgcataatgcatttcattcaggtacgtgaattaactacgtgatgcggagaaccagaactaagttgacctcaagatggtgcaaggagtggtcttcttcgtacaacgatgtcgtcagttagaccaacctgaagggcaaacaaaacaagtgtcagaacaaaggctgatcatcaagtgatcaacgtctaacaatactaacctagttttatccaggtgaagagcctgcggagctttgctactttttgtgcaaaggtggttcccaagcaggaggaagaaccgaaaatagaattgtgttgctgtggatggtgctaagtgccggtgggctcgaccttcttataagtctaagtacctcttctatacttcttattgaggatagtcacttgagctagcatatatttcaaacttataaataatttgtaacatttcaaagtatatttctttgaatcacttttgtaataactccgataaagataatgtaaatttgttgtaacttgtaaccttttgtaatcaagaaattccgctgcaaaatgttggtgtgtgatttgtgtttacttaatcttgtggttctggttgtaagtggtttatccgaggtccttgggacactcggacggatcctgttaagttatttggtgcacatgcatagccgtctgaggtctttgagacaaggacagg

SEQ ID NO: 37441 - DNA, 860 bp, Zea Mays
ctctagcgtagttcttggggaattcgtgtggatcgaggaagggatttttgtgttggggtttggaaggtggtgttgctgctcctactgttcttggcatgagcgttggagatggggacagactactacaatgcgctcaaggtgagccgaaacgccacggcgcgatggaggaggacctcaagaagtcgtaacaccggctggacatgaagtggcacccaacaagaaccctggcaacgtcaaggatgaagttgaggccaaattcaagatctccaaggcctaaggggttttgagtgatccccagaagagggcggcatacgatcagtatggcaagaaagggctgaaggcctttgcagatatccaggagcgttgtgaggctgaatggatgaaggaaatacttggtgattatgatgctattcatgtgagagtggtgatctattgaaaaatacttggtgttgaacagagccttcatcctcatctagacagagacaccacacctgagtataacagaaaaagaattgcacaatggattccaccgggtcaaacttcattcattgcattaaatgaaagaactccatgcttcttttccactctgtcagacaggcaacaattcaggtacaagttagcgtactcgtgcaacttgagtagcatgttggagccaattattaaggaaaactatcagttattgacagtctgtaagaacgaacctgcacattgaggcttatacgtggagagtgccataaattggttgttatattcttttctctattcctttaaaatataagttttgtgtgtcgcacaaagcacatagatctgttcttcccctcgcttctcacctaccagtaggtttttacatgagaaaccac

SEQ ID NO: 37442 - DNA, 4161 bp, Zea Mays
cgcgcccccgcccccgctcgtgatgcccgtcccgcctccccgctgtggcagccgccttcgcgtccgtcgatccctccgtgcacagatgcgccccaaatcgcgcctcccccaccgcgctccgtgaaatccgccctcctcaacctccccgccacccagaactccctcgcacctcatccttcgcgcgatgctcgccgatgtgccgccttcaaacatcgtcgtcgtcacctcctccccctttcctaggagggcatcctcgccgatgtgtcgccttccaacatcgacaccaccgcgtccccgcaccaccctcccccgtgtgcgtccctggccccctgagctcgcgcaggccggaggaccgcgctcgcccacctgaagattgctccctcccccaaggagctggcggcgacgcggctgcgtcaggagatttgggtccaacttcacatcttattcctcttcagttctcggcagctttggaattgctcagctcagcttttcgacgccgagtctatagctgctgctcaccactgccctcggtgtctgtagtctgtccatggaatgctttcatactgcttgctactcgcagtgtcgtgctgtgcatgcctgccttcgaggcaacaaccaccgtgcatacattgtccgggtcgggctggtatcctttgctgctacttgctgatgctgataagaagaactgcagcttttatcaccccggccgaaaagtcgtctcttgactcgttcgcgctagcttcaaagatagagctaagcaggcgaggcctagaccgtccatgatggcgacaggagctcgacttcgagcgggcctccccagagatgatgctcctccgcagcaggaaatggtagcagcaaacggaacgggccaaccgcagctggtggtggacgaacacaagacgattcttgaagaggtccccagagaagaaaatggcaccctttctgccgccaattatgctgctcaaggtcatgagaatgttgccgctgagtactacaaacaacaggaagaacaggaaaaagttgtcaggagtgaatcattagccatatggctgtctaatatcgcaaatatggttctctttgctgcaaaagtgtatgcttcaacttgttgtcatgatatatcttgtggtttactgccttttcaatgcaaacgccaaatccctatagaaacccaattggaaaagcgtatgcagccactggaatcaaggaactagctgaggtctccttccctcaagatgacaaacaaacagaaaaaactaccctcaaggtgacctaaacacaaagggagctacataataccctacaagactagaccaggttagacactaattgtgattactaatatgtgtgtttgccccgctgaccgtaattgactgctcacattgatcagcacggtgcaccgccgttctgtatgtcgctggctatgctaattgtgcagccgacccccttccatcctcagtgccctcctaccattggcggcatgggatctcggtgatggaagggcaggggcagcacaggatctactgcattttttacaacgcagtggcagacattggagacgggttcgtgtgggatgccgactcctagctctactgccacgccaggtagctgcttcctttctctctacgtgatgtagcgttccgctgattgggcaccgcagacggtctgtggttgtggatgggattatcgttttggcagaaagctggttgaagctcgtgatgaactaatgaaaggaaggtttgccgcttgcatgcgacctgtcccccctttctgttcaaaggcgttcgacaccccaccaggccgaggatgccgtgatctcctgtgcagcgcggacaatgcatgcaaccaacaccgtgggtgtgtgggtgttatagccattggattatcggattgctgctatgccgtgttttggtgtcaaattaaaactgtctttcttgcataaaaacagcttgccggttctaactcaacggggtgaaccacgtatatattctcgtgtaaggagggtgaataaactaattccctatttggatcctcctgtccacgaagccaggcaacaaagtcattaatgtcagcaccactgatcatcatctaactacattagtttacaggggttcgaaaaattttataggggtgagctgaccccaataagaacatgtagctccacccctgctcctagctaactgtttggcagtggctaacaattagtcgacaaatattaagctgacaaacaatttactgggacttgttttaattattgtctaatagacgtataaaattaaagtatagtagatagtttgttttatccctgcaagacaaacaatagtagcatatttttctttctcttctatctgctaatagttttcttttcttcagacactcttcccatatgaactttttgtgaagctctatagcaaggttgagttgcacccttttggtcttcataaccttggtaacaggccaatttatgctgggaatgcactttgtactgtgaaatataccgacgaggatccttgcatgatgagtattagatcaacttcattttcccctactgctgatgctatgtctgaaacaaaggttgcacctatcacccagggaaatctacatgggtgaatctgacatcccaagacacaaagcggcatgatcttgcaaatgcatgtgtagtagtcacaggaggcagaggtttaagaagtgctgaaaattttaagttgttggagcagcttgcggagaaatttggtgcagcaggtttgacctaactgttctttaattttcttccttgtccatacaactatctatatcttggcggcctgaaatcttacaggattcattccctgttgactatttttctgtgtgattacttctcttctctgaagcgggcgcgactagggctgctgttgaagcaggttatgttccaaatgaccttcaggtaagcttgttagtctaccgtgagttctgtatgatctagctaattgatagttgtaatgccttcttattacaccatgcaaggatcctcgccggtatatttttacaccatgcccacttttaagaaaatgaaaacacagagttgcaggagaaggctgcagcagcttgaatctcagctaatggaagcgaacagaatcaaagaggaaggcaacactggaagtatccgatggaaggagaacatattagaccaagagaatgaattacagaacataaaacaagagaacgacgacctgcagacaaaggaatcagcggcttctgagaagattaaggaactctcttcccagcttactaatgcaaaatatggcatgataaatagtaacaccaaggagataatgagaaggggggcactgaagaggacgatgaacctgttgtagtagttgccaaaatatgggagaacaacaagtttgttgactatgattcatctaaggagaaggagaatgatggtgactcacaggttgatttggaatcaaacaagggggatgcaggtcttgatagcaacgggttgcactcaactaaggagaacagtggcagggcatcaccaactaaacaacaccagcagtataagaagaagtctctgctgaagagattcggtggtctgctaaaaaagaaaagcgaaaattagcataaaactgtctgatgatattctttgttctatcatttgacatattttttgtaaaccctctcagagatgctgaaagccaacttactattgagagtactatgaaacctctcgcgcagtgtgaaataaatgacagaaatgaagtgtgtgttggtgttggtgctggtgctggagacactaacataaccggtggtattatccaattgtattggagttctattcttgaaaggtgcttggatacaaacgatcaaagcttgaaggaggcttgagtcaattgaatcatctgtaagtaatttagaagaaatattgtttttgttggtgaagcgagtttgttctttcctttgggctctatttatttatgaattgataacccaacaggattgtagtttgtagccatttagatttgaatccgagctatgactgagacgaatacaacatatgcattttgtagccatgtatatctgaatcagagctctgtgattgagatgaatatggttttatgtgccgtcgcaacacactgacattgtactatggtattataagtatcaatatgaagtatttctttg

SEQ ID NO: 37443 - DNA, 3236 bp, Zea Mays
ctcaaggagccagccactagcgagctcgcccgcccgctcccgctccaggccagcggccagccggttccctcctctcgcgcccggctcccgcgcggccaccggccctggcgcccaggccagtcgctgcgcgccgcatagtaccagcacctgcgcgccgccaggccaggcccgcactccgcaggccgggctactccctcctaatttttttattgcttcctccatttctcgcaatttagggaacaagttctgtacaattgctacaggtctggaagtgtttgactcggagcttctgctgaatggcattgtcttcttccacgaataagccatatgagtgtgatttggataggtttggttttggcaccatgcaacccaaacaaagcactccgggcttgatgaggacatggaagatgcaaatacagtacctcactagacactagatttttgatgagatgcagttgtcagggctcaggcctgattgtgtgacagttgccagtctgcttgcagcctgtgcttctgtgggagatcttcaaaaggggaagcaactccattcatatttactaaaagcaggacaaacgtggtactgtggaatttaatgcttgtggcatatgggcagattagtgatctagcaaaatcttttgaaatctttggtcagatgcaagctacaggtatacaccccaacaaattcacctacccgtgcattttgaggacttgcacttgcactgggcaaattgaacttggagagcagattcattcattaagcataaaaaatggattcgaatctgatatgtatgttagtggtgtcttgatagatatgtattctaaatacagatgtcttgataaagctcgaaaaattctggaaatgcttgaaaaaagagatgtggtttcttggacctcaatgattgctggatatgtgcagcatgacttttgtgaagaggctcttgcaacattcaaagaaatgcaggactgtggagtttggccagataacataggactggctagtgctgcaagtgcttgtgctgggatcaaagcaatgcgccagggcctgcagattcatgctcgggtttatgtctctggttatgcagctgatatttcaatttggaacacgttggtaaacctgtatgcaagatgtggaagaagtgaagaagctttctctttgtttcgggaaattgatcacaaggatgagatcacatggaatggattgatatcaggttttggacaaagtcgtctttatgaacaagctctcatggtattcatgaagatgagtcaagcaggtgccaagtacaatgtgttcacatttatttccgctattagcgctttagctaaccttgcagatataaaacaaggaaaacaagtacatggtagagctgttaagacagggcacacctctgaaactgaagttgccaatgctttgatttcactatatggaaagtgtggcagtattgaagatgccaagatgatcttttctgaaatgtcactgaggaatgaggtttcatggaatactatcataacaagttgttcacagcatggacgtggactagaagctttggatttatttgatcagatgaagcaagaaggtctgaaaccaaatgatgtcaccttcataggtgttttagctgcttgcagtcatgtgggtttggttgaggaaggccttagttacttcaaatccatgtctaatgtgtatggacttaatccaatacctgaccattatgcctgtgttgtggatattcttggacgagcaggccaacttgaccgtgcaaggagatttgttgatgaaatgcctatcactgctaatgcaatgatttggcgaacacttctcagtgcgtgtaaagtacacaagaacatcgaaattggggagcttgcagccaaacatctcctggagttagagccccatgattcagcatcatatgtcctcctatcaaatgcatatgctgttactgggaagtgggccaacagggatcaggtcagaaagatgatgaaagacagaggaattagaaaagaaccaggtcgaagctggattgaagtaaagaatgcagtccatgcattctttgttggtgatcggttgcaccccttgtccgatcagatatacaagtttttgtctgagctaaatgataggttatccaaaataggatacaagcaagagaaccctaatttgtttcatgaaaaagagcaagagcagaaagaccctactgcttttgtccatagtgagaagttagctgttgcttttgggttaatgactttgcctccttgtattcctcttcgagtgattaagaaccttcgtgtatgtgatgactgccacagttggatgaaatttacctctgaagtcacaagaagagaaattgtattacgagatgtgtacagatttcaccattttaacagtggcagctgttcatgtggagattactggtgaattgggctgttgcaaagtgtttacagcactttttttgatagaaaaatccccccaatgctattcctaatggttttcattttaagatgtctggggtctacacttatatctgctattgtgacatgtatgtatctggaaatggattcgccatggcaaatctagcatgtctagataaacatgtacagggctttggaaattggaagagtcattcatatctgtcgcatgaagttgaggatttttatctttgtggttgtcattattgtcgcaactcatttgtttaaccattataatttgttttgtcctgaatgtcactaactctttgttacctgcaacacttgcttgtttcaggcaccattcattcaaagtcaagtgtctaagattcaccgcgttaaatgagacatctgtaatcatgacatggattaagatatttgtcagactgcagaaatgcagatcaatatgctgtttactgactcgatcaggatcccttaaagtggtaacatttacgatttcttgtgcttatttcagattgaagagagtgcagaaacagatctcggtggtgatcttcttgaactgaagagcgaaatctgggtgtgctctgctttgatcaattggttgcagaatatgtcatatatggatattatggcatgctgcagtttgctctcttcctgtaatttggtgttttgatgatgataagagttttttatagccattatcttgtgaaaaaataacatttggaagttaatacaaatgtactaggttctgtagctcttctcagttctcatgctgaatgtcgatccattatttctatggcacctggaatgctaatcttttc

SEQ ID NO: 37444 - DNA, 1859 bp, Zea Mays
caaaacctgcgtttgtcccctaccctcgtgtccgacatggaagcctgcactttatatgctatcaccaggtggatcatctttgcatctttttattccttgtcagttgcttcattgccttccacattccaatcggggtagatggtcctttctgctcccattcttcgttccccatcctcctgcagattccaatcccttcctccagatacatacagcatagggcgagagtggctgagtgagtgagggacacagtttcgttccaggaaagcctgctgcacacatgtgacgccttgaggcttcccgatacctggtctggtgatcgctggatgatggacgccaagaagattaagctgcacgactaccacctctacggatcgcagcagctgtttcccgcggccggggggctctccttccacccggctgcggggctcatgagctccctgccgcagccgccgcatgccgcctggctgcacgaggaccaccacacgacgaccccgaggtcggtgctcgcgacgcatggctcgctgcagggcagcaggtgcgtcggctccgacgccgccgcgttcttcgccgccgaggagctgatgatgggcatgccgcgcttcgacgactgccctctcggcgggacggagatgacagcgtttgccaagaggccgacgacggaggacgagcagctgcactaccgtcgtccaggtccagtcgacccgctgccgctccgtgacagcgcggcggtgaggacgtactacgtccggccgcagcagcgcgacggcgccacggaggcgcctccttcgctcgaactgccattccagcaagggcggcggcagcagcagcagttgttcggcaacgcttccaccggcaggctgctcggcggcgaacccaaagcccactcctttacagctcatgttgcgacgagcacgcttctcccggcgatggaggcgccggcgggcatgcagcagagcccgacggagaatccgctgtccaggagctgcagtaccatcggtgcgccggcgacccacgtcgggagcgggaacgtcgccgccgccgccgcgccggggcatggcgcgccgagcaagacgcggatccggtggacgcaggacctccacgagcgcttcgtcgactccgtgaaccaactcggcggtgccgacaaggcgactcccaaggggatcctcaagctgatgaactccgatggcctcacaatctaccacatcaagagccaccttcagaaataccgcatagctaagtacatgcccgcatcatcgacgtctgaagggaaacaggagaaacgagccgtcggaaacgacgtgcagaatctcgaccccagcactgggatgaagatcaccgaagcactacgcgtgcagctcgacgtgcagaggcgcctccacgagcagctcgagatccagaggaacctccagctgaggatcgaggtgcaggggaagaagctgcagaagatgttcgaggagcagatgaaggcgagcaggaccgtgatggagccacggcaggaggaggaagatgacgacgacgacgcgttcaacgacgtgcacgtgcagctgctggcggccgcggcccgcagcgacgccgggttccagttgaatataagctagcctttggccgccgcgcgcctccagctggctcgatcggctttgtaatcgtagggtttgactacaaatatcagcctagtgactcatggatggtgatgcctacaatgtttgggaggaggagctgaggagtgctttgttgccaaatcgaccgagttgtctatttcctcttcttttttagaaacaaaaaaaggaatttaaagtgttggaatacatgggagggaggatcctcgtcctcctccgtgaaggtaaacccaaccgagccaa

SEQ ID NO: 37445 - DNA, 2486 bp, Zea Mays
ccaaattccaattcaaccccctctctctactctgctcttcaaatcatcaccaccgcttcaccgctcgcgccagccaatgtcaggcgacggcgacggcgacgtgcgcggcctcgaggcgacggctgccgccgcggcagaggcgacgcgggagctgcaggaggcggccgcggccctcgtcgcaacccgcgccgccgaggaggacgcgctgcgccgcagcgtcgtggcgctggacaccgacgtccgccgcctccagggctcgctccacctcgacccctccacgctcgacaaggtcctcatcgcctcgtcttctgcccttctcttcctccacctcttctcctgctaggctctggctcatgaaagcgcggttgctcctcccgcgtctcagatcgcgattagcttgacgacgcggagttatgtccctacggcgaggattcccatccgttgctctccgtgccaatctcgtgcatggcatggagatgcctgcctacacgattaactgggttgccttgtttcgtccacattttttgatgatgctggttgtggaatggatacgccccactactgtttcggatgttccaggataagagcacgtccaattctggtagcttgtcctctgtctgtgtctcataagctgggactgggaggagttgtgtcaacacgacttctatagtgcattcaaagtttcaaacaccccctaattattattctcatgatcatacgcctgtagtactccaatccagtcaacctcctgtacaacgagggacaataccagagccagaaacacttggaacgggcagaagcgtaccaattaataaaatggattcaaacaataggaatgcctcgccggctgcccaaagaagtaaagagcataccttatatttttcatgggtcaatgccaaataaaaggcaatgatacgaacacagtacgttcaaacattcttttgtgtcgcttgttgcttcatgttttacctagttagcttgttatacaactattaagcacggttgttgtttgttggtatatgatccgatattccgacgctattggtttagctttgaaacctagtttttttacattgttgttgctcctactcgtactgatacaccggctcctccactgttggaaggaaaatcagatgccaatgaaattacaacagcaagaatcagcagtggaacaacagcaagggggagaggaaaagctccccgaaaatctcctcctctactttgagcaaatcctccacgatgacccactcatagttccattgcgcaagatacttctggtgcagagaccacaagcttgccatctccgccgagatcctccccgagctttaccatgctgctcgggatgcctactacaacgcaagggatgccccactatcgcgcactaatctcatgaggcacaccaaggcactgctcatactttgtcctgacctactcactgcatggaactccaggaaaatggtgctatcagcgttgtatgatttcacaaagctcaaggatgaactgcaattgtgtgccttgatcctttcctactctccaaagaacgagagcacatggagccatagacaattcccatctatttggactttggagctgattttgatataataaaactaaactgcatggagtttgaaataactgtctgccacaggagatgggtgataaaacaagttgctgagcaacatcaagatatgttggagcttatagggaatgaatccatactggtcaaagagatagcagagaaatcgaaaatgaactatcgtgcatggaggcatcgatgttggcttattccttacatgacaaggaaacaagtgctggatgaactgaatgagtcaacaagatggagtgagctacatgttgctgacaactgctgcttccactatcgaagatctttgctgcttgcgctactagacaacttctttgggaatgaagaggattcccttagttgggagtcagatatttgcttgctatggaaggaggagcttaggtgggatgagatgctgatcaaacgctaccaggggagagagtcgttatggaaccaccgtcggttcctttcacacttgtggatacaacacttgctcactgttgaaggaaactggcccgcaacgacatcccagatggatatgtttgtcatccaggagatacaactgctgtcagagtgcctgcatgatcctgtggatgagtttgaggagtcgcgtgtccaagcagagctttcagcgctctacattatgtggataacaaagcaagtcccggatgtgaaggggaagctggaagagaggttgcattttgcctccatggggaggctgaaggacgtgctggcaggagcctgcaggccagagaagaggttttggatgaatttgctcaacctggctgatcaatccagtgacgtacaataatacatgacctttcttgttgagtttgagccgtcaacatacatgacatggacgccaagctcttgcttcaggtcctgtctcccggatttctgccaa

SEQ ID NO: 37446 - DNA, 3525 bp, Zea Mays
aaggcagaggcccggcccacctaccgaagtccgaaacctcgccaagcggcaccaaaaaaacgcagccaatcgaaaccctacgtccgccgccagcttcaagctcccagagaccaaaccttccctccctacacactaacccacaccagccgccggccagcagcagccatgccgcccaagttggacccctcgcaggtggtcgaggtattcgtccgcgtgacgggcggctaggtcggcgcggcgtcgtcgctggcgcccaagatcggcccgctcggcctctccccgaagaagatcggcgaggacatcgccaaggagaccgccagggactggaagggcctgcgcgtcaccgtgaagctcacggtgcagaaccggcaggccaaggtctccgtcgtcccctccgccgccgccctcgtcatcaaggcgctcaaggagcccgagcgggaccggaagaaggtcaagaacatccggcacagcggcaacgtcgccctcgacgacgtcgtcgagatcgccaggaccatgcgccccagatccatggccaaggagatggccggcaccgtcaaggagatcctcggcacctgcgtcagcgtcgggtgcaccgtccacggcaaggaccccaaggacctgcagcaggagatcgatgatggggtttcgcccggttcgacaacatcagggacgacagcggcgccatgccgctacacctcgccgccatgcaaggccgccccgcctacatgcaggtgctactagagaacgacgccattgtctccgttctcacaggctcatacagctgctgcaggtttaaaatctctcctgcgacagcaactgggcactaaactcaagcaatccctccagagcctcagctctctgctggttagtgccttactggtgtctaccactggctagggaccggtaatatctatgctgtctgacaagtcatctggccactcccttaaggaccaattaactcgcatggctgagaatgactatctacttagcggtggccttgaaggtattggttctactggaaagaagtgtgaagtcgctcgccgaagaaatggtttagataccaacaagccaaaaaaaggggcaacctgatacaacaggtggtgggccaacaggaagagagctgaatatcggacaagcatgtttccattcagaaccgagcaacgcttcaaaccagttcatcctagcccaattgatgcaggtgaattcattcttaagcaggacaacaactattactatacatcccttgtttagtctgcaaagctggtacaatggcaggtgcaacattttgagataattggattggacaagcttcttgataatagttctgtagaatcaatgaatgaggaacatacaattggtgattcattagacgaggctgagcaggaggaattgaaccatgagattgctctggagtctactgaagactgcactggctccttgtgcaaagccactgcttttctatttcccaagacagcttttgacttcctgacaaatgtggctgctagtttgtttggtattcatggttctccatctccaagctcagttttggtagatcctcgatatgaaattgtgaagatggcagaaatgcagccatgtgcagaagaaacgccaaaagaagaacagatagtgaagtttgtggcgcagattgacaagccaattctctcttcagaggatgccgtctcaaaaagattcgatgtagtcactgactgtttggatcatcattttgtgaaggaaaatggccatgaaagtgttacaagaggttggctgaagaaggtgcgactggaatggaacatcctgcaaaatgacctaccagatggtattcatgtgagagtttatgaggaaaggatggatcttctgagggcttgcatcgttggggcacctggaacaccttaccatgacaatctttttttcttcgatattttctttcctcctgattaccctcatgaaccaccttgactggagcggcaagtgactcgcggcgggcggcggggactcgcggatggcgcccgcgaatcgcggcgttgggcgggcgggcgggcggcggttgtttgcggctgcgggatcctcagcggttgtgcgcgcgggagccacgcgagctggcggcggcggctgcgagatcctcggcggttgtgcgcgcgggagccacgggagcgaggggagagcgggcggttgtgcgcgcgggagccacgcgagctggcggcggttgtttgcggctgcgggatcctcggcggttgtgcgcgcgggagccacgggagtgaggggagagcgggggcagtctacatgtgagtcttaatagttgtagaagactttggaaagtagtggaatgtcacattctaaaaaaatagcctattctaatagtaagattctaattcctcaaaatgaaaagaaacaaacggggcctaagtgttttggtgattaagtatccaacacaaatgttttgaactctttatgtgttaaacaggcaaaaagtatgtttctagacttggtaaattgttttatgtactaacatggttatcaaagtgttagaaacagtgactaaagaacaagagaagaaaagggagaagagttggctgtgtgcagccaacactagctcggtctgggtgcaccggactgtccggtggtgcaccgaacagcgtccggtgcgccaggctggtccgcgtgaactcgctgctctcgggactcgacgacggcgtacggttaaaaatcaacggactgtccggtgagtcatctgcgacgaactcgatgctctcgggaatgaagaaaggcgacatggctataattcaccggactgtctggtggtgcaccggactgtccggtgagccaacggttgccagcgccaacggtcggccgcgagatctgcgggcgacgcgtggcagctccaacggtcgaaaggagacaccggactgtccggtgtgcaccagacagtgtccgttgcgccaacgggctcgaagttacaacggtcgactgtgtcgtttttggaaggaaatagcgcaccggacaggctacaatagctgtccgatccggtgcgccactcgacagaaggcaaggatggccttccaagttggtctccaacggctcctagctgccttggggctataaaatgggcccctatgcgtatggaggagacacccaagcattcactaagcatcctaagactccaagactctaacttcacgcattttattctccgtgttagtgatttaagctccatttgagttgcgaacttcgtgtgttgtgttttgagctcaagtcgtgacttgtgtgcgtgattgtgctgcatatttgagtcttgtgtgtgttgttctcccaaccttactcttgtgtgttctttgtgatcaatattgtaagggcgagaggctccaacttgtggagattcctagcaaacgggaagaagactataaggaagaaagtcgtggtattcaagttgatcattggatcacttgaaaggggttgagccacaacgtggaagtaggcaattgttacttggccgaaccacgggataaaaatcacgtgtctcttgtgttg

SEQ ID NO: 37447 - DNA, 1124 bp, Zea Mays
aaccatcaaaccacacacgaacctagatcgacctgctcgctctgcacacctggaacaacgtgttcctcgtcccgagaagagtcgaggaaaaatctcgcattcgcaaaccaagcaaatggaggcatgagctccgccgcctccccgtctctcgccgatctcccccaaaccctagcctcgacctgaccgccagcgggcccgcaggccggagaaggagtcggagtcgcccccacccacccaccctctgccgcgggcggggagcgggcggcggacgagatgccgtcgcacggggatctggaccggcagatcgcgcagctgcgcgactgcaagtacctgcccgaggcggaggtcaaggtgctctgcgagcaggccaaggccatcctcatggaggaatggaacgtgcagcccgtgcgctgccccgtcaccgtctgcggcgacatccacggccagttctatgacctcatcgagctcttccgcatcggcggcgactctcccgacaccaactacctcttcatgggcgactacgtcgatcgtggctattattcagttgaaacggtttctctgttagtggctttgaaagtccgttacagagatagaattacaatacttcgaggaaatcatgagagcagacaaatcactcaagtgtacggcttctatgatgaatgcttaagaaaatatggaaatgcaaatgtatggaagtattttacagacttgtttgattatttgcctctcacagctcttatagaaaatcaggtcttctgtcttcatggaggcctctctccgtcattggacacattggataacattcgttctcttgatcgcatacaggaggagagctgcgtgtgatttgcactaagagaggagaaaggtataagggcaagcgaaacagcccccacctatacaccgtgcacaactggttatgtgaaaaccccctcgccactgactaaaggagagattacaaccaaggggattagtctaccaaacagaatctaaagttctggggaaaacgacctaaagagctgatcctggagattagaatctcccaacatggaccatatactacactcatcaaccattgttttaggagacccagaatgttcgacaaaactccatcaaacacacaggta

SEQ ID NO: 37448 - DNA, 3281 bp, Zea Mays
atgtcccgttcattcttcccgacctgctcctcccagaaagcggaaatggaggagatggccaaggagctcgacgacctgcgtgccgaggtggaggcactcaccgcccagctccgcgccaagtctgacctcgctgacggcctcaagcgcgcgagcgcggaccacgccgcgcggctgcgggatgcccgggcggaggcggagcggaatgcggcggaggccgcggccaggggtgaggaggccgccgccgccggggagcggtgcgaagtgctagagtccaggctagccgagaaggagcaggcgctgaggcacctctgtgcggcgcacgaagcgctcaaggccacgctccgggagaagatcgagggcctcgagggcgacaagaggggtctcctcgcggcgctcgaggacgctgaggcgaggcgcggggagcacgaggccgccctgcgcgcccgcgacgtcgaggtcgcgcggcttagggggcttctgtcagagaaggacaggaggtgcggcgaggctgagaagagggcatcggcgccacgagatgtggtgatgagggacgacatgctggggaagctggaggaggagaaggccgctgtccagtgtaagctcaagtggaaggatgagcagttcaggcacctcgaggaggcactcaagaaggttcaggatgacttcagggctgccaagaaggagtggggctcagatagatcaactttggttgatcggattgacactcttgaggctgatttggattccaagatcagggttgcagaggatttccggtccaggctggatatgtgcagccaggcattagcccatgaggaaggccgcaggaagcgagtggaaacagagatgtctgagttgcgccacatgtatggcaatgtgatctctgaatatcaaggggccaaatcaatggtcgagtcgttgagctccaagacagatggggatattgcatatttgagaagctcactggctgagaaggccacaatgctcaaggaaatagaatacagtaaggcacgtattgaacaagaaaatgaggatttgcggtcaaagctcaaggagtatcaggaggcacagattggtggtgcagatgctgttgtatcattgaaaagtctgcgggagaagttccgagccctggagcagacacatagaagttgcaccgagaagctaagaggtaaggaagaagaatggagactgcagatgacaaagcttgtgaatgacttggatggatgcttatcgcagttagaatccaaagatattcttatcgtgcaactgcagaatgagttgctgggtagtcataggtcccttgagctacaaacagtggataattgggaagcattgataatacttactgttgtacagacaaaattttatgagtcctgctcatttgttgatactgctaaactgaatatgcagcatcactgtgaagaaattgagaaggaaatatcttctgccaagaaacagttagaagaacaatcttgcattattgcccagtctcaagctgaacagaaacaacaatctggggttataacaaaattgcatgcaagaattgaggagctagagcatatggaacaagaacataagaagatgcaaagacaacttgatgcatacaaagagatgagggacaacatgttaagagatgctcactgcctaaaagatgaaacttcaaagaaggaaagcaccctgcaggtgaaattgagggaggcattaagtgctcttgatgaagcaaactgtgcccttgctgacaggaagcgtgagctgagccagttagaaatcagtctccatcaccaaaaggaagcgattgagcatttggaaaaactgaaagttgatatggaagctgaagccaagagctatatgtgtgacaaccgtatcctgaagagagatctggatactgctcttactgccaaagtggaagctgaggagttgcttaggcaagaaaaaatgcagttaacatgtgctcttgatgaggcaaaatataccctttctgagaggaacagtgagctgacccaatttgagatcaattttcatcagcaaaagcaagcactggcgaacttagagaaggtgaaggttgatatgggaactgaactcaaaacatgtatggatgaaaattgtgtgctgaagagagatttgggtgttgctcttattgccaaaatggaggctgaggagtgtcatacaaaagaaaaggaggagttttgtggcataattaaagagaaaggaatgatgattgataaacttcagcaatacgtcgctgtgctagaagaagaaaacatggtcaagaaacttgatttgggaagtcttatcaagatggagtgtgacaagtccattcgtgaagtgaagaactggtattctgaaattgttgagatctctgacaaaaagcttttggagctggaagaaaggcttagattcgctgagcagaaattttcatgcagggagcaggagatcatgaatatgtttgatcaagaggaatcagattggtatacactaattgcagagaaagaaattgctatttctgatattcaacaaactgttgaatctgttcagcttgacatcaagcaccttcttgaggcagcagcagcaaaagtggcagaagttcagctagaggtgaatttagtgcaagagaagcatcagtcaagaaatttgaagaatcttattgaacagctcgaagctcaaactgcttcagaaatgtcagaaaaggcagaggagcatctagaagttacgaataagctgaaatcattggaggggagaaatgaaacgttagatgagcatctgcgagagcttaagtctagaacaactgatatgtctaaagctgtactacaagagaggaatcagttggtcaatgagctgactggactaaccaataccatcggggaggtaatttatggaggtgaaagtatgatgtcaaatttgagaaggatcatgcagaaagttaatgaggaaccttgcaatgacaggcttacctcagaaaaaactaatggtagaagttcttcacctttgatcaggcacaaatcagggcatgtcctagatagaagatcgcctctgaaggagaacaactactagttagtataggtcagatcgtgtactgatattgctgtaacagttgtactcggttttctatgaatctaacatgccgcccctagagctgtgccttttcttctccttccccagtgccatccgtgttttgttatttaaacacagtggctgtgttagcgaacacttattttatggactgaatttgaataacatagtttcccaagtgttgaatgaaatgaagcctattgtgtttgctgcaa

SEQ ID NO: 37449 - DNA, 165 bp, Zea Mays
aacgctgcagccgagaactctactgccgactgcacacatgcagaggacacgggaaactctgaatgtagcgtttgtactcttccactctaaaagtctagagacgacgcgtgcaggtccgtcaaagcaaatgaaagcagggcacgtgcatctaagtgagggataaag

SEQ ID NO: 37450 - DNA, 1398 bp, Zea Mays
gacggactgtgcctgcggaaaggagtaagggggaaaacatcataggtcctctttgcgcgacggccgccgcctcctctttgtagtttcattccgccgccgccgctccccgctctctcctctgcttgcggactgcgtggagcaccagcggcggccagcgggcaggaggagctccctccccaaacagagaggggtggggtatcagtgcgtgcgctcctggaggagggcgtggaagagcagagcaggcggcaagcaggggtttgggaggatggtttcgctctcgacttggttccgctatgccgcacacaagtttgattactgcatctccctctcgttgaagcagcaacaactatggaataatagcacaacgtggactgattttttattgtctgctcaggaatagagaaatataatgtgggccagatcagcagcacgcagctaactgatgtgatattcaaaaatttcttccatggcaagctcacctacgtgtgtcagaccaaaggggaagaagccatggctcccatcgtatctccaactggaggagccgtccttgtcagaaagctcgcaaatttgagccccacatccagtatcgctgggcaggtcaacctactcaacgctgtttcctgcagccatggatgccacgtccagcagttcccgtgcatgcgctcaagtgtcgactccgtgccctgcagggaagtgtttgtcggggacgttgtcttgttaaaagacccagagaaatctggcaattttgttattcgacgactggctgccctggaaggctatgagatggtctctaatgatgagaaggatgagccgtttgtgctcgagaaagaccaatgctgggtcctggcagacaacctagtccttaagccaaaggaagctagagatagccgcttgtttggacctgtcccaatgactgacatccttggcagagtgatatactctttaagaaccgctgttgatcacggtctagtcgagaacagcggcatggccacgaaactggatggtccagtactggcagtggagcttgatgtggaagagttggcgaagaacaataaggcgtagacacttgatgttttcgacatgctgcgctataactcaccttaacaatggatgttttttttttgtttatgatctgctgctgcttcaagtagaagtgcattggaatgttttttcacggtttgcctgtggagcagtcaataatggtcttgacagataacccagaggccgctggaccgtgttcactcagaattctcagcaggatacatcgtgtgactgtaaaaaatgtctgcataaattttcgtccaatctgggtactgggagaaaagagcagaaaatatatggttacgggttcttgtctgtacattctaatatattttattacatctctttaaaatattc

SEQ ID NO: 37451 - DNA, 4162 bp, Zea Mays
ctcgcgtgaaattcccctttccccatttcgcgtccgcagccctcggtgctccgccccgctccgctcagctctcaccaccgccgccctatccgcgccgctcccgccctattccccaccgcagccggcccgattccgcgcccacccgcggcggattcgactcccagtcgcggatctggtccgtggcgcgacggggaggaacccgagcgcggttgcgacggcgtagagagcatagcccggcgaccgcgcggattccatcgacgacggccgtgcctagaaggagctctgtccagccgccagccaccgatccactccccgcatccttccgggcctggagaagacgtccgccgcaggaacccgtgtgtagcgagggacgtccaaaggccggcgcaagctcaaccacacacgagtaccacttcagcgcgacggcaacagcaaaggcgcaggtctgttcaaggtgtgtttggttcggttccaagatcactagactgaagtgacaaagttgtgttgcacgctgtgcttctaacaaatggaagcagctgctcttgctcgtagaactagagcagtggaagaactacggcgtttatctacagttgctgaatctgatgacacaccagaacagcgcctatctacagttgctaaatctgatggcatgccagcagaagagcaggaatgcgatcacttctccctgaggggttatgttgctatgcttcagaagaaggatccaaaactttgctctcctcatattttccatagccagccacaatatgatgagcaccatggccatcgacctacatctggaaatgtttctatcgagcaggatggaatgaatgatggctgctctatttcaattgttcggattttgcctaatagggttgatcccagaagaatgttttattgcaaacaacaatcatctcaagggaatgatcaattgaccctttcaaagaccgcccaagaatgcaattcaaaatgcagttctcctggcaacaaagcaattactgcgatgaatattccagtagctgaagaaaatgttctagaggcactcgttgaaagaagtgttccagcgacagaagatttacaggcctctcccaataatattgatgtctcagcaaatatcttgaatgttgtccccaaggatgccagcgatttacctgatgatgttcaaacgatatcaaccattgaagaaaatggcacaaaaaatccatgtagcccaaaacttcgtgtgatgccaaatgaagatgagagtaacatagttcaagatgttcctaattttgaccccaatgagtctaatgtttgtaaaccattatcttgccacaaaggcaaacaaatatctgggcacaaaagcagccaagtctgcaacaagggtccacgccgagcatcgttaaaaaggaaagttggatctgatggtaagaagaaaagggacaaatcaactgacctgcctgatatttcaggtctaaaattttgtcagagaaagccaaaaaagatgaggcttttatcagaactcatagatgctgaccaggtagggatttctgcaaatgccgttcaagtggaccgtactgacagtgttgatctttgtgagggtggtaaaagaaaaaggcaccttgaggttggaaaagataatgatactcctaatcagaaactggacaaaatccagtcaagagctgtcaagaacaaggcaaaacacacagcagtagacaaggtagacgatggaccctctctaatgaactggctgaagaacactcataagaaaattagaacagatagaaaagactcagaacacaagaatcttgattcctctgctatttcaagatcttacccagatatagttgcttctgatgatatgtatcatgattttataccctcagttggggatgtggatcaggtaaagttaccatctactaccagtgccaagcatgggaaggtaaatgcacagaatgacaacctggagcaaaatatgcagaaggtggatgaatccaggaacttgaaacagaggttcttctcaagtgaaaaatcaacgattttgctaaagcgaaaggtacagtccacttcagttgcccatgacgagaacattgagaacagtattataaagagagacatgctcaggccagatgatgtgcctcaaatgggacatgaaggctctgtccagagatgtttggcaaaggtttctcttgataaacagaagatccagaatgtgcctggcctccgcaagaagaatataccaaagaataagaagaaagtaagtcaggaggtgcatgagaaacagaatgtgatagatgacatccccatggacattgttgaacttctcgccagaaatcagcatgagagacacttgatgactcagactgacaccaattctttggaaaactgtcatgatcaacccaaggcaggtgaagttgattgtgctgaatctgcagccaaggattgtcccgtgaattcatcgaatgctaattttgagaaacctttggcattggaaagtaagcagaagtccttacaggatcatgcatcatccagtacacaggctacaaacgtgaatccgcaggatttacatactcagaagttgccacagtgtcctgcagcatccagcaccaaggttccaaatggtcctccttcagaatcgcaaacgcagaattcgcttcaggttcacgcattaccagtaccacccatcgtacagtctttcaatgcgtacccttcaaaattacctgcccttgacatactggagtgtgcccaggaacaaccgacacgattccacagggacgatgaagtcaccatcgcatgtacctcgcctatattttcaaactatcaacatattgctgaaacgcctgctcggagctggagggacagcagggaaaagaagctaatgtgggattctttcaagacagcttcaaggaatccaccatcaccaccaccgtcatatggttttcaattcggaaacaggcttcaagaagttgattcagctcccattcatgcatatggagctcaccagccagtaattgtggccgtagatcagccgagaagtgttccaagcacagcgttggctatggaggctggtaggctgtacgatcaaaggatccctggacagccaggcctttacccaaaagagcccatgcctgcaacacatctcctgaggctgatggactcatcaacagctccaggcttcacaaactaccaaagagctaataggcggcagatggagcttcaaacgcaagctctcggctcgcagtacacacagcatgagcattacaatgcgtcaccgagcacgtcatatggaagccaaccgctgacactggaagacttgtctcggcgtcatttccagcaagacttgcgcaggcctttacgccctcaccctcgtgtcggtgtgctcggttcattgctgcagcaggagatcgcaaactggtctgggaactgcgggccgcagtctgggtacagactaggtgattgtaaagggacaaggccgcctgatgccaacagagcaggaaactacgagaccttgagctcggcaggatggaacaccctgcagttgggttctgttagctctgctgccaatctggagtaccggtttccatggtatggtacgggtcagccttcgaccagtggcaatgggaggaccattcatccgttggataagctcgtgaggaaggatatctgtgtgactaacagaaacccagccgatttcactgtaattagtgacaagaacgagtacatgagaaccctttgaaagagagaaaggctttgtttaagcaatcatcattggtagagcgaggaaggctttgagcagcagctaccgggagccgggtgcagcctccagttttgttctgtgcaaatgttttatacataggcgaagaactaatgtcgggttgccatggaaaaccccaataaacttgtgtgttgtaggtagataggcagatgtacaagacaagcatgcgtggctgtggccatagtaatgtttttctttttctttttggttttgcctttttttttggtactcctgtcccagaataaactgcaatttctacaattcaaaatttatcccaaaagaatgggccgtataggtgtgagctatgtcatgtggttgagcaatgtgtaaggtggtcaactcgttatttttggtatagcatcagactgctctgatgaaagcttatttgaaagaagaatggccgaatcttag

SEQ ID NO: 37452 - DNA, 1615 bp, Zea Mays
aacaaaataccgatcgcccgaccccttcagtgccttgactcacgcccgcggcaaccggcgacgaggcggcacgaccctccagtccggagtccgccatgcctcacgccgccgccaccgccgctgcggcgctcccgcgtgcctctctgctcgttatctcggcgccgctccgcgactccctcgccgcggcgccgtacgagccccccgcgggcgcatccgcctccgtcaagtccctcctcgcctctctcctcccttcgccttcccctccccagccccagcttcaggagccggcgggtaaggagtctggggacctcctcctcttctgcgctgccgtactcgcggcctccccggagtaccccgcgctgcactgggtcccggcgagcctcgtgggcgcggccgccgccgcggtgaacgagctggcggcggcgggaggttggggcagcgttggggatatggtggtggccgtggcaccggaggtggtgcctcctctcaaggccgtggtgaaggactcgtgcgtcgatgctgacagcgacgagattggggctgtgaagccgcccaaggagcacgcagcagtcgccgcgcaccagttccggtggctggtgtctcaggtacagggaatggtaagctttgtacacatagcgaagaatgtgaaagcaacggaattaagtttgtatgaagatgccatacttgatgcgtgctgtcagaacattcctgcagatgatgagttatggtaccaggttattgaggtatctgtgatgttgctgacattcacccagcggagcaatcctcgtagcccctggtatgatcgaatgcttagtgagatgttgggccacctggaacggcagccactaaataaagagcgtcgtgttgcatggttgacccttattgggccagtttttgatgctatgggcctcttcctgttggcacattttcgccgccttttctcactgtttttccaatggatgcacactgatgataataagacagttcttctgactttaaagcaaatacatgccattatcaagcttacctggatcaggaagtcaccttatactttgaggctggtggacgagcttgttctattatataaagaatcagccacaaggagcaaccgtgaaatcatgcgagatcatatcctggagatacttgtactgcttcagaactgcaagggacatcaatttgaggaagcttggaagaaacatgaactagacccagacttgacgatgctgctgtccactttcaataagctttgtataaaaaacagttcaccgtgatgttgagttcaactacatgtgttatcagtgtaaatatttcaccatcgcctatcctgtcactgaatatttcactactgcctattctgccactctcatctgctgaaggaaatcagccttgattcttgtggcagatccattttaaaaaaaaatctagtacctgtagaggcagctggacaaggtaatgaacaactcatgccttgtcgacagccttcttcctctgcatccgttctggtacacgcgtttgtgttctgtgtgacttcatcgtggattcagtgcagctgactgcactgcatgcaacgtgtatattttgctcacactcagtgtggctcacagcttgatgatag

SEQ ID NO: 37453 - DNA, 707 bp, Zea Mays
caaatcctaaccctaggtgggtgcagtgcaggtcgtcgcagcgccgctacgagggggaggggatcgaactcgaaggagaatttccattcgaccccatccacttctcacctcaatctcgcgagaagcgaagccggaggaggagggtgcgaggagatcgcgagcagccggagccggagccggagccggaggcctagtagatgaagacgttcgatccgtggccggtcttcttccgccgggagtggaagcgcaattggcccttcctcacggggttcgccatcaccggcttcatcatcactaagatgacggccaacttcaccgaggaggacctcaagaactccaagttcgtccaggagcacaagaagcgctgaccaaccagtaatctatgacatggacgccggatggcactggcagagggatggtgtacggtgttgtccgaattgcctgtctggacagccagttatgttatgctgtttgaatgaaaaattagcttctttttcttcatctaaatgcgtgcagcctatgctccatctgtaatgtaataagaggcaactgacttgatccaaaagctaccagcttctgattatgaatgatacttcaagtttgatctggttctctgacctgggcatcgatccacttatatgcatgcaacaaatgcttatatctttatgtaggttttttctggatgttgggttgttgttgaattagtt

SEQ ID NO: 37454 - DNA, 1933 bp, Zea Mays
cttttatcgactcttggcgctaggccgcattccttgccgagcgccgccgcggctggagctgggttcagtcggcgcggccccgttctgcggcgaactttttcttaatggtaggggcggtgaacgttgtggacttgcatctgtctcctctctcctgtgagcgagcgcatccgtggcggtggccggcgtggtgttcgacgaaatgcaaatctcggcgatgtttgcatctctcgttacattagaggcaacagaaaatcactggttcacagattcagacagagtcaaaggagcatatggatggtcattataattttatgtcatcttttggtggatgtggatgcactaagaaaaaggagcttatgggacagctagaaatccaggtacaaaatcaaactacccttcccatccacaagaaaggagcaaaactcggagttggatccggagctacgatcagtcaacgacaacgggacacaccagaaacatagagattggattacggaggagtgtggagtcccaatcatatattgtggccccaaccaaaaactcttggttgaggcatctgtgcatcagcgacaggaaaagagagatgaatgaacgaacctaatccatccatcagcagcgtaaccaaatcaggcacagagctcccgcgatccagtcaagtgccctataaaatccagccccgcttggcttcacccacccttgggctcgcagtcgcagcaacgatggggaggtcgccgtgctgcgagaaggcgcacacgaacaagggcgcgtggaccaaggaggaggacgaccgtctggtggcgtacatcaaggcgcacggcgaggggtgctggcgctcccttcccaaggccgccggacttgtgcgctgcggcaagagctgccgcctccggtggatcaactacctgcggcccgacctcaagcgcggcaacttcacggaggaggaggacgagctcatcatcaagctccacagcctactcggcaacaagtaggcagcccgaccgacctcaagcactaaggcacccactaaggcactaactgtgttgtctgtgtatgatctgtttgttgggtcacagatggtccctgatcgctggaaggctgccgggcaggaccgacaacgagatcaagaactactggaacacgcacatccggcggaagctgctgagcagggggatcgacccggtgacacaccgccccatcaacgagcacacgtccaacataaccatatcgttcgaggactggggccaggggaaggcgctcaagtgccccgacctgaacctggacctctgcatcagcccgccgtgccaggaggaggaggaggccatgctgctgaggccggtgaagcgggaggaggccgggctctgcttcagctgcagcctggggctccccaagagcgcggactgcaagtgcagcaacttcctcgggctcaggaccgccatgctcgacttcagaagactcgagatgaaatgagagcttccatccatctctgtctgtctctctctgtaacttcacccctgataacacgcagtagtagtagtcaccaactgatttgtcgctccattaattctgtctctctctctctctctctcgctatgtaaattagcatcaccaactgattgattgatcatgggcaattaataatacttgttgctgctgcaaattgacattaatcacggttgccatgtgcagctgagacagatcttacgacgtttaccaaaccactagtagagcagcagcagcaagcatccaaatggcttcctgctgtgggctgtcccccggcgatgcggtaggggcgccgccccctgctgtgggctgtgggctgtgtggcctgcggaaaaaaggcagctggttttggaaggatctcgcgcagcaacttgcctgatcgattggattagttgcggatgtagcgtctggcggcaaaagctgtgctagcgtactc

SEQ ID NO: 37455 - DNA, 2335 bp, Zea Mays
atccagccgtgcaggcagtggcggtggaccggagatctccgctccagctccgattgagcccaagagaagtcgttggtgcagacagccttggattggatgtggaatgaggcgatggcatctgacggatcatcctcctctaccttccgggggttgtacggcaacgtccacggcccggcggtgctcactggcgcggcgttcgcgctcgtggcgctcctcatctcgctctggctcatcctgcagcacctcagatcctacagcgatccagctgaacagaagtggatcatagctgtgctgttcatggtgcctgtttatgcctgcgaatcgataatctcactgtggaactcgaagctctctctggcctgtgatatattacggaattgttacgaagcctttgctctgtacgccttcggacgatacttggtggcttgccttggtatgtaaagcagctgcacagtaataatctgcatatatatatataatcacagcatattttccgttagttctctagagggatcgaatcgctgtagtgtaatcttgtgatgatcagctacgtacatatctatgctctccccactcgccacagctctctgaattaacagctgtgtgctcacttcttgttacatgactactacacttgaggcggggaacggcaagtgttccgtctgcttgagagcaggaagagggacgagctgagccaggagttgctagacaaggcacgagctcgtaaccgcggcggagcgtacagtttcttctgtgaccctgacgctctgggagagaacctgtacacgattataaagttcggccttgttcaatacatgattctcaagacactatgcgctctcttggcgttggtcttggagccttttggagcctatggagatggcgaattcaagtggaattacgggtatccttacattgccgctgtcataaacttcagccagacatgggccttgtattgccttgtgaagttttacaacgcgacgcatgaaaagctacaggcgataaggccactagccaagttcataagctttaaggccatcgtgtttgccacttggtggcagggagtcggcattgcgatcatctgccaaactggactcctgcccaaagagggcaaagtgcagaacgcgctacaggacttcctcatctgcatcgagtgtagatggctatcgcagcggtagcgcatgcctacgtcttcaccgtggagccgtaccagcacgtccctgctctacctcctgatcacggggaagtcatgtgtcaggaaagcaaaatggaggtggaggtggatgtcgacgacgatacaggcggtacaccagcttccattgcgcagcaggagacccatgtcgaagctccaggagggacgagcatcaaggagagcgtgcaggatgtcgtcctcggcggcggccagcatgttgtcaaggatgtcgcgcttacgatctcacaagcgatcgggcccgtggaaaagggcgtcgggaagatccaggagaaattccaccacatctcgctgaagccaggggacaagaaagagcctcaagttgctgtggaggagcacgtaactgagaacgtggtggatggcaaacctgctgttgcggtcaacgcggaggttgaagtccaacagaaggcgcaggatcgtcgtggcgaggaagaaggtgtgcaactcaaaagaacagagaaggaaggacgattgtcacacctgagagtgccatggtggaagatgcaaaggaagcgggagcaggtgcaggagcaagcggagtcgaaggctgaagctgtgcgagggccggacggtgaacaggggtgattgtgttggcctgcatctaaatgggctgtaagaccaactccagcagcctccgtatacggctctccatccccttttttcactgcgcagtacactattcatcagtccagcagactccgtatccctctccctaaaaagcacgctgtgtacttatactcctcttttccacgtcttctctcctctccgtacaagtctgagaaatggtgcaattaaaagccccgatagagtgtaaatacggagtctgttggaatgcaccatgcaaaaaaaccactttatctatgatcacgtctgcttattttacggataccttattttacggatatggagccatgctggagttggtttaagtggtgtgtggatgaattgtggagtgtgtcggcccaacagggtcagttctggtgtttaaaggagttgtaacagacttaagagagaaattaagaagaaaatagagaactcaccacagaacgttgcgtcgaccctctctggcggcgaaaacgtgctcacgtcccggcgaacctccctcttgccggcggccaggggcca

SEQ ID NO: 37456 - DNA, 391 bp, Zea Mays
tatgggtgcagcttgccgaggccgatggtcgcggatttgaaaatgaagaggaagagcagtgctaccactgatttgagagcttttttagcaagagctgctgcaaaaaagaaggttattattgctccatcttccaatgaaagagagatgcaattggtgatatttcaaggacagactgaagctagtaatgcaacacccgcagaacaagagagagttgagaaggaagatgggacaaaaaaatttaaatggatgcttggttacttttattgaaaggcaattcttcttgcaagtcaaggatgaggacattgccactcaatttcaaagcttaaaggatcagaaggttgtcttgtaatatgaggagatacagaaacttcttgattcttgggacaatttg

SEQ ID NO: 37457 - DNA, 1738 bp, Zea Mays
acacgtttctttatcgtaactttttcactgctccagtgaaggcacacatccgccgccgtttcttctcccatcatcttcctcgcagcgccggcgctccctctcccgctcccttccttactcgcgctcggcacacaggcggcggcgctcgggctctcagcgacggcgtcagcggcttaccctcgcgccctcgcctccggtcctccgcacaccggccggtgaccctgcgtgcgtgcctatctctctcatcccgcccccggtggatcgtcaacgccaccggccccgccagctgcgccgcgcgcggcctgatggctgcgggagccagcagccgctgctccaccaaggcgttcgcgccgctttggtagcgcttatgccccaaagcgaagcgttacccgtcctcctagcgcttcagcgcgctgaagcgtgcgcttagtgccgccttttggaaccctggcctcttcgcatttgcagggagaagactcagtttatcccttgcactcccttcccagaccccactcatgtagagcctccggcactgggtctgtcctttattactataactgtgatacttttagttctgattctgattgggcagttgatcgtgtggtgcagtccagtgagggaaattattggttggttctcacaggctctctaacttatgccagtcctgttataggttatcagttcctctgtatattagtcatatatacagcacttgcccttgggaatgggggagacaaatgttcagttttatgtacttatgtcagaaatctcatattactatatgagataagtctcttcctaattactatattagataagcttccaaccagtgtttattcataccattgtctctctctgtctaatatgttgtttaatgaactctgtttcccccttattagtgcatgcatgattgtccattcttatttttgtccatcattaattacctgttcattaccataggacaacattgcatctgaactgcattggatcctaagagatgatggatgagtcttttcttgataggatggtttcccaacttcggtcaacatgcaagtactacactggatatcccaaggacttagggcgatcaagaattataccattcacatctgagcgtcagtttgtgcagctattacatgaaggcaggtgcacatatacacagcatcttgataaagttctggaagaggccgcagctaaattttatccacatatcaagtttgtccgagttgagtgcccgaagtaccctgggttttgcctcacaaggcaaaggaacgaatatccatttgttgaagtattctacaacccagaacaggctgcaagcccaggaaagagcgtggatcctaacatcaccaagtattctgtaaaagtgctaccgttcaactatgaccaaagcgtgtatggatttcgagaatatttcaagaagcatggtttcaagtattctgaaacaaactagatctgttgttaaagatctgcctcgagagtagtcctagggacttgagtagcatgtggaggcagttgttgtatggagttgaaatggcgtgaggctctaatgggaggccttgactagttcattcgagaatgcctgtcatgtattcatttgtatacgggctactgctcatgcctagagatttgcttttccgtacctatgaaccattggatttggtaatgttttacctctcaaagcccggagtgagcaatttgcatcattttttcaagcactgtcgatttgagatttatt

SEQ ID NO: 37458 - DNA, 230 bp, Zea Mays
cgataagttttaaacaaaagttctatggaggatccattcctcgcgcagctttactcctggttttcttattttgataccatcttagaacagaagcaacaaaagttggttgcttcctcacctaaaaacaacatgggacaaagccctgagtacgaagtgtactttcgcaagacttacccaacaaagtaaaagactctcaaggatatgctggatttgggaatcaaggagaggct

SEQ ID NO: 37459 - DNA, 1842 bp, Zea Mays
gaggatggcgggatccgaaatctgtgaccctccgcgtcatctgaaccctagggccacggcccgccaccagtagctcgctcggctccagatcccgcgccacaccacatagcatggcagaagatacagcgtagcaaggtccggacgttcaccagagggcagtggggatggggatggggccggcccgcgtgcgctctccgtgcgggaggcctcggcggcggtgccgctcccgcacccatcggcggcggctgcgctcgaccttaggcggcggggcggccaggctggcgctgtgacctgaaacggtggcgggatggggaggaggaaggagcacctagagagagtccgagtggaggcgtactgctgggacgtgttcaagccagtggagatggtggagatcgacagcatggagaagcttgacgacgcgttcaggatggcaagttggtgtcagaaatgcatctacctaatgcccagaatggagaagatagcaggacaatatcctgggttactcagaccttactcctgcccctctctcctgtttattctattatctggctccatttgtgcagcacaaaacttagcactttgtttcattttggaatattcttgcttttagtttctgatttaattgtagcttcttgctaagtgattgacattatctggttcttattcatttcaagttgttctttcaaaaaaattggaataaaagtcattttggaatcgtgtggttctattgctgctagcttagtaaggtaaaatagcctgacctcgtcaacaattagttctttttaggagaaaaagatgcaacaaatgaggattgatgcttcccgcaagagtacatgatgtacaatatatatctttagatggtttcattgttgtagctgatactaagaatgtagcttttttctttattcaaggtggtcgcagcgatctgtgattgtttatgcccaaagcgtagggttacccgtcttgttagcgctaccttagtgccgcttttttgaaccctagacatctcagaagaggggaagcactcggagatgaagctgaagcagagcaaacgtgagacgcaccgtgggcattctctatccaaggggaaggttgctcttttcttatattatttccctatgtgtcgtgctacattataaatatcaagtaattttaatggtacttcttttctgttgctggaacatgatctggattcaaaatggttggctattgttgatgtaagaatatactttatgtaccctcaagatcattctgcattcaatatatctagaacctaatgaggctcattctgcattcaatatatctagaacctaatgaggcatttccttggcttttagataccaaaccttgctactgtttgttcatatatatatatatatatatatatatatatatatatatatatatatatatatatatatatatatatatatatatatattcatgttaagacatcttattgtatccaatttcttatctcagatatcttgttctccccacaattttatgttctacatgagtggagagatcatatagctcatgagaaagatgagggtactggttagtggttgtatactgccaaataaagcttgaatcgagataggtgttgttgtttttttctttatatcctgttataatggtgcaaaattggatctacaactttgctagctcccccccccccccccccaaaaaaataaagcagatacctacagatgttggacattgtaaaagaattgtaaaatcaaaatatccatatgttgagaacaatgttgtcgtaatcgcttaccttacactgttcgtactgcaattgattattcttatgcctttaaagaagtagctgaa

SEQ ID NO: 37460 - DNA, 346 bp, Zea Mays
cttcatgttattatcatgtttaaacagattgccaaaaagatgatgtaatgtactagagaatacagagagcatacacaaaactaaattacaactattgttcatgttcatgtcgcgtattccaagatctagtatgggaacttgtagagttcagagttataaggcaaacatgtcacaatacgtaccgagctgcattaaagtagcatacttctatatctagtaataattcgtgagtaaagtttgcataagcaagcacagttttcagaatgcttcaacaacatggatgtctatgtacacaaaagtcttccatatccaaaagtgatgaagctttttctatgcttacaaaaac

SEQ ID NO: 37461 - DNA, 1430 bp, Zea Mays
gattcctttttaacttggcatcactcaaacagacactcagtacttaaggaaaataacaactgaagtactccctccatcctaattagtgaaggacaaggtggtcttttgccaggattcttatttcgtctggaaatcgcttggataccttgtatttaaggatggagggagtatatgtttgccactttgtatttgcttatatattatgggcatcgtaaatccatagtggtacttcactgttttcagtgcgacaatacagaatcttttgaatcatgatactgcagatagacacgacagatattctttttatatgtggtggtgcttttgtggacttggaaaagactatttctgaaaggcgccaagattcatccataggatttggggcacccattcgtacgaacatgagaagttctggagctagctgtccaatggttacctcatctttattagaatctgttgaaagtggtgatcttgtaagatatggtctaattccggagttcattggtcgtttgcccattctagttctgacagaaccaaagaattcactttccaaacaatacaggaaaatgtttaacctgaacaaagttaagctgcactttactgatggtgcacttagattgttagctaagaaggcgatagctaaaagcactggtgctcgtggtttaagagccatcttggaaactgttcttttggaggccatgtatgaggttccagacgaaaaaacaggaaatgagcgagttgacgctgttgtggtggatgaggaggcgattggttccgttgataggccaggttgtggggctaaaattctccgaggggatggtgcattggaccagtacataacaagaaccaatgtgatgaatttacaggaaactaacgatggtttggccggggagctcgaggaagcgtacatgctgtctagaattgttagcttgtaatttgaaaggctggggaggaagcgtatatgctgagttctgaccaacttcgtacatcgtgtaacatgtctaccccaacacaggccggctactttttgctcacaaaatcacctgtactctgtctccattcctgttaagctctaacgagcagatagatccggggcaccttttccatgtaaacaggagttgccttttgattgagcaaccgtcctgcggagtaaattgttgcccatttttccccgctgcccccaactgggcagctcgattgtggttgacagagttgtaaagatcatcaatttactgatatgatatgataagaaggagcactttcacaaagcacaccagatcaaatgtagctcgattatctgtccgttggcaggtttcagaacctgatagcaaatatgttcagttcagccgtgaatatagcatgttgcagagtcactagacacacggctgagattcattattcaatgattgcatcatgcattctgaatttctgat

SEQ ID NO: 37462 - DNA, 2932 bp, Zea Mays
cgctccgaccccatgattgctggcatctgtttctaaacagaagggcaatgaaaagtttggtaatgccaaaacaggagcagacactaaagcttgtttcaaggctgcaaaggaagcttcgtgtgcgggagtccatacaaatatagcacccttttttagtagacccgtcagaggtcgagccaaaagaccaaaatgacgaacaaagcgacggtagtaccctgccaaacccaaaaaactgcgtaattccttcacagtcctgggagaagaccactgagaaacagcctgaatcttgcttgggtctgtagctactccggccgctgaaatgacatgaccgagataggataactgaggcctggcaaatgaacatttattcaacttaatttgccattgatactgtatgagtagttcgaagactgctcgaacatgctgaatatggtcttcaaagctcgaactgtagattaaaatatcatcaaagaaaactagcacacaacgacgaagtaatggtgctaatgttgcattcatggcgcgttgaaaagtggctggtgccccggtcaaaccaaaagccataactctaaattcatagtgacccgagtgtgtttggaatgctgtcttatgacaatctgccggtaacagccgaatctggtgatatcccgctgtcaagtccagactagtaaaccaggaagcttgccccaattcatccaacaactcctcgatgacaggtaccggaaaagatgtcttgacagtaatagcatttaagtgccgaaaatccacacagaagcgccatgaattatccttcttcttgaccaataatactgaagaagaaaatggactagtgctgggttgtataattcctgactgaagcatgaccgaaacttggcgctctatttcatctttgatagctggtggatatcgatatggtctgacatggacaggaacagcccctggcactaatggaatggtatgatcacactcacgagttggaggaagaccatttggtggtgcaaacacagctttaaattcctccaacaatgccatcagcacaggtgttaaatccaagtgtgcaaacagaggtggttcagattctatcatatctaattccactatcgacccaggtggaaaaacagcagacaatccatgtaatagcacccaggaacgttgatatggaatgatcatccacttttgggaccaatgcaccttcatcggactattagctgccaaccaatccataccaatgatcatatcatatgaagccagatccaaaactctcaagtcagtgtcaaacacgcagtgttgaacggaccatctagcgccaactagctggcaagaacacttcaaacgattgccatccgctacctgaaccagcactgacttggccatatcagttacacctgataacctcgatgccacccgggatgcaatgaatgaatgagaactacctgaatcgatcagcatcaccacttcaatgccttgaatcagtccccgcaacttcagagtatggttcaactccaatcctttaacagcagcaatggagatggccaaacattcagtctctatgatctgatcctcgaccacaacatcctcaggaatggtgtcttcatccccttcatataattcccagagttcctgtagagcatgtaactggactgtgggaggacacttatgatcacgcgaccacttctccgcacaacgctggcacaaccctttagctcgacgataagcgcgcaaggcagcaagtttgtcatccaagacacgagcacgatgttgttcagccggctttgtttcttcgatcacagctccagtcttgtcgggtcgtgctgtcaagaaaggaggcactgaagatttgccatacccctttcctgacgacgcccattctggacgtcgatgctccaaacgtcggtctgacgtggccacctcttcctgcagcaaggcgagagcgcaagcagaatccaaggaagaaggccgttgaagaataatagcagcacgaatgtctgaacgaagaccatccacaaaacgttgcacaaaatagagaggatccacaggtcgcccgtacgacaccaacttgtctactaatgaagaaaactgatctacatattcagttactgtgccatgttgacgaatgcgaaacaattgtctaataaacaactcatgctcatcttttccaaaacgctctaaaagcacgcggcaaaaaacaggccaactagataagtgtgaatgttcgtccagagatgaaaaccaccgagcagcccccccaacaaaatgcatcgacgctaccctgatccataggtgcggttctacttcatacatgtcaaagtagtcatggctgcgacggatccataatttggggttttcgccatcaaacacaggaaaattcaacttaggcaaacgaccacgcatcgcgccccccatggttggatatgacagatcgcccacatgctgatggaattccgaagtatgcacagctggagaacgaggcaatgatgaacacatacccttgaccggggtatggaggagggtggtgaccgacccaaaaccatcctcccggtggctcgattcgacgcggtgcccatggggcctgttggctggaactccggcaggttgttgctcgacagccggtggagaaggagcgaggatgcccgccatagcggacgaattgtccactacagcacgctcccaatttttggagatcttgcccacctcgagtcgcaggtcatccatcatcccttccatgttcatccgccaatcttccagcacaccagtggcttgttctagagcccccacgcagcggtcttgtccagtggtgaactccgagaaggtcgcgttccaacgcgactcctgctcggccactctgcgatcccacttggagtcatgttcagagaaacgccgcgacaactcatccaggatgagttgagtgtctggattcatgagaacacgtcgg

SEQ ID NO: 37463 - DNA, 3040 bp, Zea Mays
ttttttaacgcaactggctggttttcgagataacagtgggggttaagcatggtaaccgaggtgacagtaaaagcgttagaaaaagggtaaaggtaacttgcgagccatttggcactcgagcaccaccccccgggcttatgcacatgggtctccctccctctcccgtccatatccacatatataaatacgccttcccccccccaccgctccaggcctcgcccccccgtgccctcccccgtcccactgacggtggcccccaccgcccggccccgctcgtcggcgagcgccccttccccacgctgcaccgctgtcctgggcttcctgcccaagagatccgcccgactccggtcgctcggaggccggcgagccgcgcgtgctgggcgccgggatgcaggcggccggcgccagccggtggcccggatctcgctggcggcgcgtctcggcgaggtgaggcagctcaattctctcgtgctcacctcttccgtttccgttccaaagcggggtgctgtttttttttgttcttgtctgttattgttatcttttcccttttcactcatcggtttcagagtttgtgcaaaccgtagtggcgagctgccaaacaaactttacttttgctggtggcgtagttccatctggtggaggtctgggctctggagacaatggcagtgaattcgtcggggaaaggttcttgtttccttcctcctttgggaggtggagtgggttggagccagagagtccctgatttttttagtgcattttgttgcagagcagccacatggtatgcgctgttttctgctggctgatggcccgatttccagtttgaataggctggtatttttgccggcatctggtaattattcgctagtttactccctgttcgtagagtgaaggcttttggccttttgccttgcgtctgcaacaaataataatgaataatggaatcagcggggcatcatccgtacattttatatattttttcttctgttttgagataatgcagataacagggatgcgcctagtaaatgcctctccgtgtttctcgcgcgaaacttgtttacgagttaaggcagtatgcgcatcaagctttgttaaatcaggaaaagacaaataatggaagagttacaagattgcaactcaagaagcctggttgcccttccgggctctttggttctgcgtctctttaggctgtttggccagcaggatcagagttcatggcagaagtacatactagcttactttctgttggtcaggaatgagtacttctctggggagtcgaagaaacactcagatgtgttctgtgatatttcagaattagatttctttctatatgctacagatttggatagtgaagaacttgaactgaaggagcagaaacccattacgaaggctcaatcaggaggtgattcaagtggcaacagatcgaatgattgctacttccccggccttcatgatgatctgtctcaagactgccttgcttgggcaagcagatcagactacccttccctttcttgtctgaacaaaagattcaatttgttaattaacagtggatatttgtacagactgcgaaggaaatatgacattgttgagcactgggtctatcttgcttgtagcttgatgccctgggaagcatttgatccttcacgaaagcgctggatgaggctaccgagaatgccatgcgacgagtgcttctcctgtgcagacaaggaatcacttgccgtcggaacacagctgcttgtcttcggccgtgaatatactggccttgctatttggatgtacaacttactgactcgcagttggtccccatgcactccaatgaatctgccccgctgcctttttgcctcgggaagctcaggtgagattgctattgttgctggtggatgtgataagaatggacaggtgctgaggtctgctgaattgtacaattcagagattgggcactgggagactatcccagacatgaacctgcccaggcggctctcttcaggtttcttcatggatggcaagttttatgtcattgggggcgtgtccagtcagagggattcattaacttgtggagaggaatataaccttgaaacaaggacctggagaagaatacttgatatgtaccctggtggaaccagtgcatctcaatcgcctcctcttgttgctgttgtgaataaccagctctacgccgctgaccagtcgacaaatgtggtcaagaagtatgacaaggcaaacaatgcctggaacatactgaagccattgcctgttagagctgactcatccaatggttggggtctagctttcaaagcttgtggcgatcgattgctggtaatcgggggccatagaggacctcgtggcgaggtaatattgctgcattcctggtgccctgaaggtggggaagatggtgctgactgggaggttctctcggtgaaggaacgtgcaggcgtcttcgtttacaactgtgcaataatggggtgctgagttacctttgcttcagtacatgccactggtttagcaagccaaccatttcttgctgccatttagctgccctttataatgacttgtaattcagaaatgacaccccctcccctcatttcgcggagctctcaattgattgaatgttttgtagagagcaaagagcattcagttcagtttacctggaactacttttttttcttcttctgttaaactcgttcagaattctttgttcttgtccagtacgaattttatgcagtattcgttattcatcatttttgcaaagcttgtctgccccattgttctgagacaaatctaaggcctcgattttcaatgcaccgtacttgcgtactggtgttcagagatcttgggtcagctcaaacagttcaggaagatagtcagaagtcagaactttgttgtgtataatacttaaaaatgtactgcatattagccataccttaatattattctgtactgatattcagaaatcttgtagtcagctcaaacagttcagcaaggcagtcagaagtcagaacattgttttgtataaatattccagattattatgaaatgcatattaccc

SEQ ID NO: 37464 - DNA, 1626 bp, Zea Mays
acaggaacgtgagcggtgagcaaccctaccccaggcccagcttgcgcgctctctctctctctggacgacgacgcctacgccagggccccaggtcgctgccgccctacgccaggtccccttcgccggcgacgagcaccaggtctgttgttacttctctggtgatggaccggaattcagatcaaaactgaaagattggaggagcatataccagtttgagtgtaaatagaggatcttccttatgtttgatgattagctcattgagcaacatacagcaacagatagctacaaatcgtggcatatgactccaaaatggagtgcatgctcttcaaatagctacagagaactaccttcacatgaaaatggagagtgcaaatcaaccttaacagagtcagtcccttcacctacaagctgttttggcttgcacactgcaaacacaatgtgctccttatcttcacaaaagaaggatggtaatgtttataaaagaaggaagatggataaggattcaaattctcctataacatttgaagatgctaaagaaatggcaacccaaagttgcacaatttctgatgaccactcatcattactgctacccattatctcctcagaggcattgcttttaaattcaacagcaggcatggcaggtcctatcctagattgtgaggagcctgctgatgttccattggagccaaattctggtacagatgatagatgcttcatttcaaacatgtctccaacttccatgactccagacaaaaagaatgctgctgaatgttcctcatcgaatattggccctacagaatcaattaccgagcatatttcaccaagggatctttgcattgccatactgatgaaagatggactaataaatgaatcaagaacaagaatggcacataaagaggaattcactgacaatgatgctaaccctttgttggcatgcaataattgtggctgcttggaacattcattgaagatgctgatatgcgattcttgtgaagcaggatttcatttgtcttgctgcattccttgtattaaggagctacctactgatgaatggtattgtgctccatgcttgtgtaagaaacccaagagtctttatggcaaactctcagagggcaggataaatccttccaggaatactaacacaaggcctcatgggatgagtcacatagagtacatgctgaaggatgctgaaccatatgtaactggggttcgacttggtagagattttcaggcagaggtgccagaatggtctggtccatcatccagcagcgatgtttactttgacgagccctgtgcaattgattctgcagaactaactacatttaatttgtgcaaaatgagtaatcaaagtcattcttccattggtaattggatccaatgccgtgagaccttgaatccaggagattctgacaagcaagttgtctgtggaaaatggagaagggcacccttatatgttgtacagtcagataattgggattgtttttgttgtcttctttgggatccagtccatgctgattgtgctgttccacaggagttgaagactagtgaagttctaaagcagctgaagtttgtaaacatgtggccgagccaggcatagtcctccatcggcctcaagctcgcagtcta

SEQ ID NO: 37465 - DNA, 1608 bp, Zea Mays
tgtatttaattattagtgcttcccacctgctacatatatggtgttccagctctgaaccgagctgcatcgatcgtggacctcgcccccgcgcctcccctctcatcagttcttgcacacacgagttgcagttccagcagacaaatcctcccactggtacttccaccacaccacagtccacaggcagagaagagcgaagatgcttcttcccaggcacagattcttcaagttcaggtccttgtagatgagctgcagctgcaggatctcagaatcagctaactattttccacgcatagtcgcctttaattccaggtgacagcaagggcaggtcgactgcgcttgttgcctactgctactccgatcgatacatacatacagattccctgcaccggccgatcgcgatcagagattgaggaggcatcctgtccagctgttccacttccatccatccatccaccaccagagaagagcatacagtagtgcaccactcatctcatccccttctgctgtgcccctgtggtatagcaatagcttcattaatttgcttgtggtgctgctagctgtgctgtgtgcctacctgccctgccactgccacacacaccacatataactccctggtgtccgtgtccacagatgagtgcacggccctgcccctgccgctgcggcctcggcgccgcgcaccacgcgcacgcgggtgcctccccttgctcctccggggtgccgtcgacgtcgtcgtccacgtccatggagccgcgtgccggcacggacttctcctgcctcagctggctcctcttccgcgtctccgcctacgacgacgacgacacccacaacctcctcctcctcgccgccggcgccctctagcgcgcgcctcctgccgcccacagctcttcttccctccacttctaccaatttgctccctccatccacacatacatacatagctaggttagttagttagttgagttctctctccgccgtctgtcagtgtcagctgctgcaactcatcaatacaactgctgctagctagcttattagccttagctgcggtacacccaaaccaagaaagctaattaagggaaggaaataaagctccgtcgtctcgagccgatcgacgaccaccatgtcggcggcacggcggtgcggcggcgtccggcgtcggctggatagggcggcggcgggagacaacgccaacggatacgtcgagactgaccccaccggtcgctatggacggagatatgatgaggagctactagctgcacatctttgtttgctcattctttcgagattttccctttaacttgttcttctctttgctggatttttttttaaaaaaacaatcttgagatggcatacgattagttcacaattgccccagatggattattcattaattaattggcagcatgaaatggtgaaccaccagatatatcattaaatatatattactaattaaacaatcacagttgcccccagatggatccatgcattcacgagttagatggcatgcatcatgcatgcatgtatgaacaattctaaactattgctagatgtacatatacatacagaaagacagataataataaataaaaccaataattatatgtattctat

SEQ ID NO: 37466 - DNA, 280 bp, Zea Mays
cacgaacttcgcagctcctaacagattgtggccggtatttccatgttgcgtgcactgagcggagaggataaaaaggggttggacggaggagcctctgccctcgctatttgatgcggcgcaggcaggacggaggggagggagaagaagggggcccctgcgctagcggtactcgttccggcgccgggacactagtctggtggcgagcgactcttccctggggcgctggactccggtgagttttacactctttcctcagcgcatattccagggaccatagcgg

SEQ ID NO: 37467 - DNA, 285 bp, Zea Mays
ggcaggaaacaactctagggttgctatcactactgatatgtggactgcagacaaccaaaagaaaggctacatggctatcacagcccattttattgatcaatcatggaagcttaggagcattgtgatgaggttcatttatgtgccaagtccacatactgctgaggttatcgctgaagagttgaatgaatccttaattgcatggaatcttgatgagaaggtctaatgggcattgctacacttcttgatcctcgatttaaaactgaaatgttactagtttgttttgaa

SEQ ID NO: 37468 - DNA, 4295 bp, Zea Mays
tgccgccgacgagcatcaaccctatactaaggttattttggctgtgcatatcacgttgtagagttctgggtttttgctctgaagaacaaaatggacaatgctcagagtgacaaccgaactgataccaagcaagatgatgatgcgcgccaaagcaaacaggatgatgaggaggcccgccttgaagaatataaaaagatcattgatcaaaagatttccctccgccggagcaaccaaaaccctgaaaggcctgatgcaaactacctgagaaccctggactctagtattaagcgcaatacaaccgttataaagaagttgaagacaataaatgatgaacagaaggatgtgataatggatgagttaaaaagtgtgaatttgagtaaatttgtcagcgaagcagtttcttacatttgtgaggccaaacttcgctccgctgatatacaagctgctgttcaggtttgctcgctccttcatcaaagatacaaggacttctctccttgtcttatagaaggtctactgaagatcttctttcctggaaaatctggagatgatttggatgcagataaaaattcgagagccatgaagaagagaagcacattgaaacttttgattgaactatattttgttggaattgtcgaagatgctagcatatttgtaaatattataaaagatcttacatcagcagaacatttgaaggaccgtgaaggaactcaaacaaacctatctcttctatctacctttgctcgtcaagggaagttttttgtagggctacaacctcatggtcaagaagcttatgacgagttctttaaggacctaaatgttactgctgagcagaagaagttctttaagaaagccttgaactcttactatgatgctgtagctgaactactacaatcagaacatgcgtctcttcgtctaatggaggcggagaatgcaaaagttttaagtgccaaaggtgaactaagtgatgagaacacatcctcatatgagaaactcaggaagtcttttgatcagttactacgtggtgtttcctcgttggctgaatctcttgacatgcaacctccagtgatgccagatgatggaaatacaacaagagttactacaggaaccgatgcgttgccttcttctggaaaagaatcatctgcattggaacctatctgggatgatgaagataccaaagctttttatgaatctttacctgatctcagagcatttgtgccagctgtattactgggagaggttgaaccaaaatcaaatgagcaacatgttaagggccgtgagctatctggtgagtccacttcagaacaagagactgaactacatgacaatgttccaacttctgccactgaacgtcaactagaagttaaagtagatgatctagtgaaagagagtgaagacagagataaagagaaggggaaggatggagaaaaggaaaaatccaaggagaaggatctggataagaaaaatgaaagagagaaggagaaaggaagagtcttggatggcgcaagtctggataacctcctgcagaggctgccaggatgtgtcagtcgtgatctcattgatcaattgacggttgagttttgctacctaaattctaaagcaaatcgaaagaaacttgtgcgtgccttattcaatgttaataggacttcactggaactgttgccatactattctcgtttggttgcaacactctcaacctgtatgaaagatgttccaagtatgcttctgtctatgcttgaagaggagttcaactttttaataaataagaaggaccagatcaacatagaaacaaaaataaaaaatatacggtttatcggggagttgtgcaagttcaaaatggctcctccagctcttgtttttagctgtttgaaggcctgccttgatgatttcagtcatcataatattgatgtggcttgcaaccttcttgagacttgtggtcgttttttgtatcgctcacctgaaactaccattcgcatggctaacatgctggagatactgatgagattgaaaaatgtcaagaatttggattcacgccacagtacacttgtagaaaacgcctactacctttgtaaaccgcccgaaagatctgcgcggatatcgaaagttcggccaccgttgcatcaatacataagaaagttgcttttctcagatcttgacaaatcaagtgttgaacatgttttgcgccaactacgcaaattaccttgggcagagtgtcaacaataccttctgaagtgctttctaaaggttcacaaaggaaagtacagccaagttcatctgattgctcttctcactgctagtctcagccgctatcacgatgactttgctgtctcagtggtagatgaggttttagaagagataagggttggattggagttgaatgactatgggatgcaacaaaggaggcttgcccacatgcggttccttggagagctatacagctacaagcatatagattcatcagttgtttttgatacactgtaccttatcattgtgtttggtcatggaactccggaacaagatgtgctggatccaccagaagattgtttcagaatcaggttgatcattacacttctacagacctgtggtcactatttcagtaaggggtcttcaaaaaggaagctcgacaaattcttgctacactttcaaagatacattattagtaaagggcccttaccactcgacatagagtttgacattcaggatttatttggtgagctacgaccaaccatgtctaggtattcgtcaattgaggaacttgttgccgcgttagttgagtttgaagaaaatgaacgttcagccccagtagaaaaggttgaaaatgaaagacactccgacaatgaatctcagaaaagacactcgcgagatgctggtccatctgtgaatggtgaaagcgctgcaaatggaaccgaggaaaatggcaaggctcatgaagtagcagatagtgagagctattcagatactggcagcattgatggacgggaagaagaggaggatatattatctgaggataaatcaaatgatggctcagataacgaaggcgacgatgaagatgatggcattcctgttgtttctgatgaagatgaaaatgttgaggttagacagaaagtcatgaatgttgatcctaaggagcaagaagacttcgatcgagagctcaaagcccttcttcaggagagcttggagtctcgtaaatcagaggcccgttcaaggctccctttgaatatgatggtgccgatgaacgtcctcgagggttcaaaagactcaagggccacagaatctgagagtggagaagaaacagtagacgaagagggtgggaatgctgggggtagcagcaaggtgcgtgtgaaggtgctaatgaagaaaggacacaagcaacagacaagacaaatgttaattccggccgatagttcaattgtgcaaagcacgaagcagcaggaagctgctgagcttgaggagaagcagagcatcaagcggaggatccttgagtacaatgagagggaggaagaattgaatggagcatcccaaatggggaactggggccaaggagctaccagtaccagcagtatcagatcaggtggccggggcagctgggatggttcagcacggggaggtggtcgacaacggcaccacataacgggttctggtggtttctaccacagttatggcaggagaagataagttcgcctgtgtgagctatttcgccctgagccttttggcaggtagaaagcatcctagtctgacaaattgcctctagcaaatgagattagcgtttaacacagcttgatggacaattgcctctagcaccctagtctgaaaataagacaattctaccactggtcatgggagatagcaatgccttgagaaggagctgcaaatctgatggtcctaatggcttgagttgctacggtgtttggtaaagctggttgtgatggctgtacccggatacatgcgcatactgtttcgacgccatgtagggggtatctggtcaaagttcgctgtctgatgcctgttctaatttagtggagtattactggcaatgtggtacaagcatcttgtcttgaaaatcgaaaactgcacggtatgtgtgcgccattttttgtctgatgaggtgtgttccatgcgtgtatttcatatgtagctacaccaatcgcgtgtccaccgaacgatgctaacttgctatgccgatggagcatgctttctacccgcatcgcaacccgcaaatccttgtccagtcgtttgtcttccatccaggaatgataccgagttctcatgtcacgcttgacgcttctttccgtcctgct

SEQ ID NO: 37469 - DNA, 603 bp, Zea Mays
gcgaactctagtgactcttcccccttctcaccgtgagcgcttctccattcaaattcgccctcctcgcggccttcctctataaattgatgcctcgacctgttccgcctagttgttacgaaccctgtgaaccactcctcgctcccgatcgtccaccgtagcgccctaattcggattttcccccgaatcggttgtctgtgccgcggtgagacgtcctgccgtggccagccacctccaggtgatgaaacaaccgagttttgctgtttttgctcgaaggtggtgccaaagcaggaggaaaatcagtaaacttgttggcgggaggatgttttgcctcccagttatgtaatattaagtgctgcacacgaacacccgttatgtaataaatactctctctattttttatatgaatgtaaattatgttattgtaatccttccgcttattctttactccgattatgtgtgtaatgtctgcgtgatgggtgaagcgctcttgggcgatatgatgaagatacagataaccaaatttgccgagtgattgctcgcacctgcatgaatgtatgaggtccttaggacaaggacatctgtaggtgggcctaataccttagg

SEQ ID NO: 37470 - DNA, 2912 bp, Zea Mays
gctgttcctgtttgcgacactccctgctaccactcagccgagccgagtagccgaccgaatcggcgtctcctccctccgcagctccgtttctccgacgcgctcagccgccggctaaccatctcaattctcacgacgtcaccgcctagtcgccctcactgacgacgcggcgccatgcctcctcttcctcgcgcccgcgccatcctactaccagtccctcctcctctccctcggttccaacgacaccgccgccgcccacctgcacgcgctcaccatccgcccccacctagcgggcacgggcgccaacgccctcgccgccgcgcacgtcgccgccacgctctcctcccactccttccggacccgcctcacgagctactccgtgctcctctcctaccctgcgtaccgctctctctcactctccgcgccggatcgcgacactgtgctcttcgctttgaagcaggaaacctacgcaggcgacccttacgaggcggtctccgccgaggccgtccccaccttcctcgcctacgcggcctccggttcggtctccgccgaggccgtctacgccaactacggccgcgcagaagatttcgcttacctcgccgcccgcggcatcgacgtcaccgggaaggtcgccgtcgcgcgctacggcgaagtgttccgcggcgacatcgtcaggaacgcgcgggatgccggcgccgccgcggcggtgatttactccgacgcgaaggactacgcggccgggaagaccttcccggacggaccgtggatgccgccgacaggcgtgcaggtgggtagcacgttcaagggggtgggggaccccacaacgccgatgtgggcgtcgtcggagggctgcgagcgcctgaccatcgcggaggcgatgagctccgatgacatgccggggataccggcgctgccggtgtcctggaaggatggggagaccatactacagctcatcggcggcgatgtggcgcccgagaattggcaaggaggcgatggcgcggcggcctataggtttgggcctggcccggcagtgctcaatctgacctacacagggaatgagacgatggttactattcagaatgtcatttcggtgattgaagggggagaagaacctgaacggtatgatcaaaatccccaatcaccttacccccaatacctccttccaaactccaatttaggtaaggggcactgtatcatctacagtacaaatccgtctgtgggctcaagcattcagcctgaatgcgatggatggaaatttaaccttcgttaggtgaatgtgactagcaaaattgaagtgtatgagacactttttttctttgaacagtgtgtatggcacactttttcattgaaacggtgtgctcacacacactaaaagtatttgtaatcatactacagaggcagagttatggaactttgggtggctagtgatgaaacagtcaccatgaaccacttagtgttaaagatatatcacagatcttgtatggtatttcgaactacttagtcgcttacaaattgcaatctcattctttgaaagtttaaaaaaatctgtacaaattctgtgcaattatcattctaaaacatgcaggtatgtaatccttggaaatcaccgtgatgcatggacatttggggcagttgatccgaacagcgggacagcatccttgcttgagctcaacggttgtctgagctgcaaaagaagggctggagacctcgacggaccatcatcttgtgcaactgggatgccgaagagtatggattgacaggatccactgaatgggtcgaggagaacagggcaatgctaacttcaagaactgttgcttacctaaatgttgattctgcagtggctggtcatggattttatgcatctgcaactcctcaacttgatgaattgcttaaagaagctagtaagcaggtccaaaatccggacaatgggacacagagtctctatgatttgtggatgtcttctaacagttctcctttgattggaagattaggagggggaagttcggattattctgcatttgttcaacacattggtattccatcagtggacatggcgattgggtcagactatccggtctatcatagcttgtatgatgacttcatatggatggaaaagtttggagatcccttgttccagaggcatgttgcagctgcaagcatgtgggggcttgttgctcttaggctctcagatgaggagatcctacccttcaactacagcaattatgccacagagcttgagaatggagcattgggcataagtgaaagagtacagggaatgcctgtcagcttatcacccctgcacaagtcaatcaaagagttcagaaaggcagttgcaaaagtggattctgaattgaaggctctacagacatggaaaatttggtccccatggagaaacaaccccttaaaggtcagagacatcaatgatcggttgatgatgaccgaacgggcattcacagaccgggaaggactgtctggacggccatggtacaaacacctgatttacgcaccttcgctgcacaacgattacggggctgaagtgtatccaggcattggtgacgccattgagagggtgaagaaaacaaatacttctgaatccttgcaatctatacaacatgagatttacagggtctctcgagtcataaaccaggcagcgcttgttttaagtggagggctcacgtgaatgcagtagctggactgatacagtattgcatagtatggtgatattaaggggaaaaataaatttcactggcagtcattacatttgtgccgagttcttattttgattctggtacctataaattgcatattactctttccaaacttatccggttcctattttaaatcgtattctcaaaatttgtcatgggttcttatttcaaatttcaataaacactcggctccataaacttattgtt

SEQ ID NO: 37471 - DNA, 2029 bp, Zea Mays
gaacagtgcacattttccctctaagtggttcactgtggatttatgaaaaatagtggtgcagatatggataccattgatctcaagtacatacagaaatgcagatttgtggttgcctctggtatttttgatggctacgacattccccatcagccatccaatattagtcatcggtctcagaagttgttctgcttcctgatggtggtagatgaagtatctcttgattttgttcaaaagaacgcaagtgtcaagattgacagtgctggggggaaatgggttggtatatggcgacttataagggtacatcgcctcccatttgacgaacctagaaggaatggaaagataccaaagattttaacacataggctgtttcctgaagcttggtatagcatttggattgatgggaaaatggagctcatagttgacccacttcttattctcgagagatatctctggcgtggaaaaaacacatttgcagtagctgcccataagcatcataggagcatctatgaagagggtgatgcaatcaaacggcggaagcgatatgctcgtcctttggttgatcttcagatgaaattatactattatgaggggatggagccttggagcccaaagaaaaagatgcctagtgatgtgccggagggagcagtgctgatccgggaacatacgacgatgaccgatctcttcagctgcctctggttcaacgaggtcaatcttttcacgccgcgtgatcagatcagctttggctacgtggtgcataggctcggaggcgctctcaagttcttcatgttccccaactgcgaatacaattcgctgttcatcctgcacggacacacgagagaacactcctctaaagtcgagtgggccaaaacaaccgatgagattgtgaagaagggactgaaggagagtagaggaggattagggctatggactccgtatcctgcagatctcagctccgtggaagtccctgctgtaaaaaggacttcaccggcaggctaggctgggattttttggtcttctattcgttcatggttgtaaaaagtagaacactactgatttcccccccttttcttttctcgcttaatcagacgagatcatgtaattcctgtagattctgtggtaactgaaccccgggggtaccgtaggctaatgcttggagcttgttgcttccagccggttctgtgcaatttaacactcatttacatatgtgccataaaaataaaaatagaagattcatggttcatcacatctgctatagggatatcaaatcaacattataagtcaacgcctgaaaaataattataacaactggaaataatcagcaccaaagcatcatgcactttcaaatgaatcatttgcctctttcagctgatacaatctcatcagcattctgtgatctaccaaaagttcctacaccagaatcacaaggaccaactcgagtggaatacgagaccaggtctgcacctccggccatccacgttgaacacgatgccaggctgcacggcagcagccttccccagatgcaagttcagaaatccctccacctgaaacagttgcggtttttcctcagtgcctctacgcaagctcacgccccatccaaggtcaccttccggcgtatctgacagtgtgagggcccatctcagcaaacgtgagcttgacttcttgttcaactcgatccaggccccgattctggagtcctcatcaatttccagctcaagaccaacgcaacctccagcagttggtttcctcttccgaggaactacactgggtccatgcaaagcagcagacagggtcaactttatgtcatcagggaactggtacgagatttgcccaaactctgtacagactctgctggcttcaccgccgtttactggcctcgcggcaactgagatcagctgcgctatagaaacagcgaagttcttcgatctcagtattaggccgccagcatatctgtggcttttactcagcaaaggtggcctcagcgaagatcgcaaactggccagccaatgttcctgttaagcaaactgttacc

SEQ ID NO: 37472 - DNA, 2958 bp, Zea Mays
ctatacatcgcacgggccagacgtggagcaggccagggtcgaggcccaactggagctccaggaaggcacacaggccgaaagccgccaccgtttcttcatctcccatctgccggcgctccatcttcgactccctccccgactcgcgctcggcacgcaggcgacgacggcggcgctcaggctcgggctcgggctctcagcgacggcggggcagtcccaatttcggcggcggcgtcagcggctccccctcccgcctcttgccaatcgcctcgcgccctcgcctccggtcctccgcacaccggccggtgaccctgcgtgcgcgcctcccgctcccctcccgcctccggtggaccgttgacagcgcccggccccggcggctgcactgcgcgccgcgtacggccggcgggcagcgggagccagcagccgctgctctaccaaggcggccgcaccgctttggtagcgcttatgccccaacgaagcgttacccgtccgcttagcgctgaagcgtgcgcttagtgccgcctgttggaaccctgatctatagttggtcttcttataacttctcatagtacactttcagcaacacattggactacaatggagaatatgcgttatgctgaggagctcgtgagggagtttctagttttcaggggtttcacaagtacgctgcaagcgtatgagacagagttgtctactgagattggcaggaactttcaaggagacaagatcgtggatttagtgttctcagagtatgtaccgaaataccaactggacaagttgctcggtctgtttgcctttttcaagcagtgtttcatgtcacctgcggacacagagttgttctcaacccttgttaagttggagctgtcagtattaaggtactatgttattaatgctttgaaatctggaagacaagacaaagtaattgaattctttggtgagagtggcaattatctgatgcaaaagcgtggagattggctggcatggtttgctattccatatattaagaacccaagcttggatccacaattccgtctatatttctccaaagagtggctggacactttggttctttcatttaggaattttttgagtgggatattcaatgatactcggaccccagctcttatgagaattagtagtgaaaagaataccatcaaatccctcaagaatgacataaaacaactgaataataaattggcagagctacaagcatccttagaggagaaggaagatgaaatctctctgttgaggaggaactataatagtggtggttatggaaacaagaatgtagttggtactagtacagctggttcccctcatgaagagatgtcagaaaactatgaagaatcctcggcctcgagtagcatgatacagggttttgattctcggtcctcaagttcagtgaaatcttatacaagaggtggaaaattccatgaatcttctgagatcaaccatacagaggatcagcaggttttggtgactgaggaagagtttcctgaggtgaaagtagatttccaggaaacatttttaggccataacagtccaattagccgatgtcgattttctgcatctgggtcaaatattgctagttcatcaattgatggcacagttaggatttggacatatgattcgtcaactgcatcatccagaaatgctactatatactgtgggtctgaagtcagtgcactttcatgggaatgcagatctgacagattggcacagctaatggaggaattaaagcttggaatgctgatgcaaagagagttgtttgcgacctgagtacatctagaaactttccaagcatcttagatttgaaatgcagccctgttgaacctgtgtttgtctctgcagctgcatcaagacggcatggatcaactacatttgagagaacaggatttgccaacttgacagtgtggcatatgaaaacatggaagccattggtagttcatttgctttcatcctctcttgaacttgtatgtggatttgtagccagtatcttttctaaaggcttccccccccttttttttcttctactgtgaagactgtcctccctcttggtgaggatccacctgccattacttctctttgcttcaatcacaatgggaagattttggcagcttctgctacagatggaatgattcacatgtttgacatgtctgctggtcttcaaattacaggatggcctgcccatgattcacctgtgagctctgttctttttgggccagcagaaactagcatcttcagcttaggctcggacggaaagatacttgaatggagtttgcacaatcaaggtcagattctttggtcaagagattgcagcagattctgcaatccggagagctttaaaacacgaatgcatgaaatagcattggattcaaatggcaagaggctgctggtcacctccggtttggttcgggccccaatataccaggtacaaggccatgaaagcgaactgaggacactgccgcacagttcatctatcacaagtgtggattggcatccaacactgccaatgtacatcactggatccgcagaccactctgtccgggtcacgtctatcttatgatgatctataaaacaaggtgctggcaacaacctttcccagctagctagcatgcatcaacccttattgacagtcttatccatgcgtgaggctcggtgtcacgctatttcctcgcatggaagatgagctgtgttcttgttttgtggctttggtgtgcgtctaattctgtaccctttggtgggttgctccaacatttttttttcttgttgtaaacaggcatagagttctgtggtcatttgctttaaaatgagtgatagatcaaaataagtaaactttgtagcccgtctctcgaaatctcacgtctgcatacgcagatatgctatatactgtatgtacttgtaaatgaatttgtagcccgtctcagatagtacttcgcattacaatctatcatccttcac

SEQ ID NO: 37473 - DNA, 1781 bp, Zea Mays
cgcaacgaatcccactatttcgcatcagttcgtcctgactcctgcgtccggctccggccgtcccactcccactcgaaagcacgacgacaaaacctcgaacgccaccgtcacgctcacgccttcgcccgaacttctccagttcttccggggagacgagaaaggaaccgaggatctcgttcctttggcgcagcgggcagcagaggcctcgccgagggagatggccggccggcgcgagtcgcccctgatgcgcggcggcggggcggggcctccgctgtctcgggggtcccgcatcgccgcggcggtagtggtcggcgtcgcactcggctgcctgtgcgcgtttctctaccccgccggcctcttcccccgtgcccccgactccgccagccattggccccgccagacgttgtcatcgcatgattaagggggattgcatgattaatggctgaaccagttgcctgtgatacatctcgggaagttgccaaactaaagtcacggctggtattgttggaaaggaaaaatgctgcatttaaaatgcagatgaaggaattgtcaatgaagcttcaattggctggacaagggaaaaatgaggccctatataaggctggtccatttggtacggtgaaagctctgagaacaaatccaacagttactcctgatctatccatcaatcccagattggccagcttattggaacaggttgctgtgaagaaagaactgatagttgcactggcaaactctaacgtgaaagagatgcttgaggtgtggttcactaacataaaacgagccgggattccaaattatctagtagttgcattggatgacaacatagagagcttctgcaagtccaaggacgtccccgtttaccggcgcgatccagatgatggcatcgacaacattggtaagacaggcggaaaccacgctgtttctgggctcaagttccgcatactgagggagtttttgcagcttgggtacagtgttctcctctccgacatcgatatcattttcttccgaaacccgtttgatcatctttacagagattctgacgtggaatccatgagcgacggccacaacaacatgacagcttatggattcaacgatgtgttcgacgagccttcaatgggctgggcaagatacgcgcacaccatgcgtatatgggtttacaattccgggttctttttcataaggccgacgattccttcgattgagcttcttgatagggttgcttaccgcctttctcacgagcccaaatcatgggaccaagcggttttcaacgaggagctgtttttcccgtcgcatcctggttatgaaggccttcatgcgtccaagagaaccatggatatgtacctcttcatgaacagcaaggtcctcttcaagacggtgaggaaagatgctaatctgcggacgttgaagccggtgatcgtgcatttgaactaccatcctgataagtcggatcgcatgaaagccgtgattgaattctatgttgacgggaaacaaaatgcccttgaacgcttccctgatggatcagaatgatagacaccagcttttgtaggacaggaaaaaaaatgccaacttctagtttctagtcgtctcgaaagtaagcacgggttgacttcttacataatgcattgtcgttataaaatcccgtgtgcttgctgagatgtcaactttcactgagcatcaaaattcgtataattctctacttgctacaagccttggaaagctgctagtgtcagcccatggtatattcccgtggcattggtgctgtttcagcttttctttcc

SEQ ID NO: 37474 - DNA, 1367 bp, Zea Mays
acccgcacccgccccatctcgcgcggcgaactgcgcgccctggttctgggaagaaacatttcactgcgttttttccctggcgcggcccagatcaagatcttaacgaccctcacggcccagcgccaggccgccagcatccgacgcatctaaccccttccgatgcgtgtcccgatccaacggtctccgtcgtcccgtccgcgtgataaagcgccggcgcctcttctcgcgtggcctcccgaaggttctaggctcgattgaacaaattggagcggcactacactcctccacgcctccacctccagcctcccactgatctggcctctctcgagttaatcctagatcaatatgagaaggggctacagttacagtccttcaccaccaaggggctacaggagaagggcgcgcagtccaagtcctcatgatcattatggtggtcgtggtagggatctcccaaccagtcttctggtcaggaatctccgtcgggactgcaggccagaagacctccgtcgcccatttggacagtttggtcgagttaaagatatatatcttccaagagattattacactggggatccccgagggtttgggtttgtccagtattatgatcctgctgatgctgctgatgcgaagtactatatggatgggcaggtagttcttggtaggcaaataacagttgtttttgcagaagagaacagaaagaagcctcaagagatgagagctagggacagagtcaggggtcattcttatgatgacaggaggtattctcgctctaggtcgcctcgttattataggggccgctctccttcacgcagccaaagctactcgaggtctccacctcagaatccaagacacagacttagagagaggtcctactccggctcacctgtggacagcagatcaagaagtgggagcccttatgaggatggatatcgcaaatcatcacggagagagaggtctctttctgtcagcggatgaagcagttttacggtctagagctattgctgtgaatctgcgcatggtggcctacttgctatgtctttctgaaccatatatgttctgtctagattatcattcccagtaccagagaagtatcgtgagactgtttgctgtactttctagtcttgaggatacagaagggggtcaccgattctctcagtagatggactattgaccactagctacgccagttccactgctttgtgtatttacaggcagctttgcggtttgaataaaattgtttgcatcgtgaaagctaattggtaaaaagactgaatcatgaaacgaacgttttgcatccctgttccctgatggcatttggatacgattttttgttctttcgacgaacaatttggcaaatctgcatctta

SEQ ID NO: 37475 - DNA, 4945 bp, Zea Mays
agctgcccttcagctccacctacgttcttttgtccgtattccagtctctaaagagagcttaacgtctacaatcacacaaacactttagccagccatcaagctagtaatctctctcaaatacccccacttttttcttcttctttattttagcttcaagtcttcaacattcctctgcagcagccagcagccaccagtgaggccgtgagggtgagtcgagtcgagtccaccaccaccaccaccaccaccaaatagccaaacacgcagtggtgctgctctctagtcctcccttcttccactccgctaaccccccgtcgcaagcacgcacgcgcgcgctcatcggattcggctacgcgccggcgagatccgggccgccgcagcacggtccggcagacgccgccgaaggcgcaagccgcgatcttgtcgccgcgggagctgcattggcgccccacgcggccgttccggcgtttcttgggaggttgcggcggcgggaggagttcgtgtccgggatccgccagatccgtgctcgccggcggcggcagcagtggtggtggccgccatggaggccgatgcgccgctcgacctcgcgctcttccagctatcccctcggcgtcagcggtgcgagctagtggtgtgcggcaatgggcggacggagaagatcgcgtcagggtcggtgaagccgttcgtggcgcacctgcgggctgcggaggaacaggcgtcggctcagccaccgccgctggccatccggctgcagctggagcggcccgccccgtggtttagcaagggcacccttgagaggttcgtgcgcttcgtgagcacaccggaggtgctggagttggcgaacacctatgatctggagatgtcgcagctggaaggggccaggaagatttatgcgcagggaggtactggagatgctacttcaggtggagctgctgaaaatgttacagcctcagcggcagcggcggcagatattacaaagaaagaacttcttagggcaattgatgtgcgtctaagttcccttaaacaagatctggccgcagcttgttctcgagcatcctctgctgggttcaatcctatcagtgtatctgagcttattctttttgctaaccattttggtgccagtcggctgagcgaagcatgcacaaagttcatgtcactttgccagcggcgtcctgacatcagtcctcaaactgcacagccagcagtttcatcacactggaaggtctttgacgatgggaatgtccgtggttcttcgagttcagacatgtctatagatgaaccactagttgatctcagtgaatccaagaacaaatctacagtcagtggaagtggctctcaggtccacagactaagcaacatccaaggtttagaatctgctgcagcacagcaacccaagccaaccatccaacaagcagtagataaacaagaagcagaaacagatgcgtctcctgcaccttctaaaggagagctttcaaggcggctgagtgtgaaggacaggataaacatgtttgagagccagaaaaaggagcagactccaagttctggtaacagcaactctgccggtactggtagagtggttccagggaaaggtgagcaccgcagggttccttctggcgcctccatggagaagttagttagaaggtggagcagtgttagcgacatgagtattgacctcagcaacaatgagagtagtagcttaaatgacaaaaaggataatggaactcctgccgggactccaacatctactgatttggaggccgactctaaagtaagagctaatgaggactctaatggacagaaggattcaatcacgtcacactcttggccttgtcaaaaggataatgtaccaatggatctggccaccacagatttgtgcccaccctcaattttaagtaatacacttgctcctcataaagagagtatatatggtgatggtgcagaaaacgacatggttatgaactctagcattgaaagtgaagcatcctttgggaaagaaccgggggttattcaaggacacacaaggatgtcaaatcatgctacttcaaatgtttccactcaagaccgtctaaaatcttctgcaaagtcagttgaagaagccttgctgaaaaataaagttattgtaactagtgcatcgtcagaggagcatgtctgcatgatagacaaggaaatcacagctgttgctcatgaagtaccagttgcaagtgaacagattccccagaatgatattagaggtctccatacaaaagatattcacactgaagcagaagtgactggaaggaaggatcagccttcacgatcatttggaagggtatctggtggtgttaatcctaaaccaaaagcctcatccaattcccgagctaatgctaaaggctcatctgttagggatgcgattgcctctacagaaactgagttccgtgacgttagtttgcagcggaatcgtctaccacggaagtcagaagatgtagggaaaaaggttacagctggttctgattcagattgctctggtcgtcagggaaaaaatttgagcaggcaatcatccattaccgatcaggaactaaacttgcaggctagagtgacaagaccaggaaaagggaaccaagatcggcatggtgaattgcaaatgaaggccaatgagttggagaaattatttgctgaacacaagttaacatcctcccgacgaggtaaacctacagatgtgcaggttgaaagcacacctatggtgagtgaggtaaagccgacaatggttcttcatgagacaattcatacaaaacaagttgtaaaggagagtataactgtcaatgattttgatgccggtgagcttctgaagatggtgaataatcaagaatttaacattagcacaccacaaaaacttggcattctaagtttagaagagtcgagagggaagttttatgagcattatatgcagaagagggatgcaaaactgaaggaaggctggaagctgcagagagaggagaaggaagcaatgttaaaggctatgcatgacagcctagaacggagcaaggctgagttgcttacaaaattctctcggtctgcagatgtccctgactcaacttatgtttcccattgttctcagaagattcctccttcgcgatcagcaagaaaaaataaagatcagggggttggctcattcttggtggaagaggaaatgaatagtgactacctatctggtgatggttcttccaggagtgctgattccagaaagcatttttcaaataaagttgcttctacccaaaatgcatctgctggtcctatccataaacgttcatcaagaaccgcaagctctggttatgctaatcgcaggaatccaccagaaaatcctctcgcacagtctgtccccagtttttctgacttgagaaaagaaaatacaaagccttcacctggagtcagtagagtgagtgcaagagttcagcaaaagtcttttgcccgtagcaagagtattattgaagagtcaaagagcatattgaaagaagatcaatcgaggaggtcacaatctatgaggaagaaccaaattcctgatgagcttaaggacatttcgtcagggaatgatgatatttacaattgggctccctcaagaatttccaagaatcaatcagagggaccttttgcttacagtacccgtagatcgggtccaccaaagccttttcttaggaaaggcaatgggactcaccctgttattggtatagctggatttcaggctgcagctgccatgatggcgaatgccctccagcatggtgacagtggtgattttgaagatcagcaagaggattcccctgatgatgccaaagaagaggaagaatatgaaagcatggaagaaaatcttagagaaagtgactttcctgctgattctgacagtgagaacccaagagtgagtcatgaatttggaaattcagatgacccagggtcagaaaacggtgatgctgattttccaagcaaaacacctgccattggcagtactaagttcactgcttttacaggaaatgttcacaatccagctggtgatgttccagcaccctggagttctcgtcttccacagctgttcccttacacgaatgataattcagatggtgacgcctttgctgattcaccatcgggaagtccatcaccatggaattctcattcactggatgaaataacagatgctgatgtatctcggatgcggaaaaagtggggcagtgcacagatgccttttgctggtgtcaatgcacctcaacagccacgcaaagatgtttccaaaggattgaagaaattgtggaaatttggtaggaagactagaggcggtgacggtttagtaaatgattgggtatctgcctccactgcctcagaatgtgatgatgacatggaagatggacgggatctggtagtaggatcttctgatgatttcagaaagtctcgaatgggttatcttgcttcatatgacggttttgttgagaacgaggttttttctgaacaagaacaatcactacgcagctccattccaaacccacctgcaaatttcagattgagggaggatcagctgactggaagttctcttaaagcgccgcgttctttcttctccctgtcaacattccgaagcaagggaggtgatgccaggctcaggtgatcctcagaagacaccagaggtgtggtgtgtataaaatatcttgtcaagttagagttggacttttgcaatctgttctttcaactggcccaggactcctgtattttttttcattgtttttgtgatatatctgtatctccctctcaacttgtttcttcattcacatatatcacaaattcaagatatatggtaattttgccaactatagcaaaccacctgagatgctagctctgcttgtgataaaattgaaacgagtttgtgacaaaattgaaacgagagtcgagccgagttgaccaagagctgagcgagctcacaagatacaagtatttt

SEQ ID NO: 37476 - DNA, 3824 bp, Zea Mays
agatgttggagaagattttcttcaatttgtgctaccctagcatattaccaagcagcccttgtgctgaatgcatcaaggcgctttaggtacacactcgatttgaaaaaggaggaacaaaatgaggaaatcaggagaaaaattcgtgcaaaggcatatgttataacggctgcttttcgtttcaaagaggctggccgagtccatgttcggtctgaagaaacaaaagtaccgattgctgatggtgcacttggctttggaatcaaagaagacgagattacagcactgacaagggatcacaactactctggtctgcagcaatatggaggggtttctggtgtagcacatatgctaaaaaccgattcggagaagggcattagtggagatgactcagatttgatagcaaggaaaaatacatttggttcaaacacatatcctcgtaagaaaggaagaagttttttggctttcgtatgggatgcttgtaaagacctgacgctaatcatcctcatggttgctgctgctgtttcactggcattgggcataacaacagagggcataaaagaaggctggtatgatggagcgagcattgcctttgctgttcttctagttgtatttgttacagctatcagcgactacaagcaatcactacaatttcaaaatctgaatgaagaaaaacagaacattcgtttggaggttgttagaggtggaaggcgaatcacagtatcaatatatgatttggttgttggagatgttgtccctctcaaaattggtgaccaggtccctgctgatggtatccttatcaatggccactctctttccatagatgaatcaagcatgacgggagaaagtaaaattgtacacaaagatcaaaagtcgccatttctaatgtcaggttgcaaagttgccgatggctatggcacaatgctggtaactgctgttggagtcaacactgaatgggggttgctaatggcaagcatatctgaagattcgggtgaagagacaccactccaggttcgtttgaatggtgtcgctactttcattggaatggttggactttctgttgcccttgcagttctggttgtacttttggccaggtacttcactgggcatacttataatcctgacggatctgtgcaatatgtgaaagggaagatgggtgtaggccagacgatacgtggagtagttagaatattcacagtggctgtcactattgtggtcgtggctgttccagaaggactaccattagctgtcacactgacgcttgctttctcaatgcgcaaaatgatgaaggacaaggctctggtcaggaggctttctgcatgtgaaacgatgggttctgccacaacaatctgcagtgacaagactggcaccttaactttaaatcagatgactgttgttgaggcatattttggtggaaagaagatggactcaccagataatgcacaaatgttatctgctgatgtcacatcactgattgttgaaggaattgcacagaacacttctggaagcatatttgagcccgagggtggtcaagaaccggaggtgactggatcacctacagaaaaggctatattgtcttgggggctaaagctgggtatgaaattcaatgaaacaagattgaagtcatctattcttcatgtatttcctttcaactcagagaaaaagcgaggtggggttgcagtgcacctggatggccctgaagtccatatacactggaaaggagcagctgaaatcattttggattcatgcacaagctggcttgacactgatggttcgaagcactcaatgactcctgaaaaaattgctgaattcaagaaattcattgaagatatggctgtggctagcctccgctgtgttgcctttgcctatataactcatgagatggatgatgttccaaacgaagatcagagggcagagtggaaactgcctgaagataacctcattatgcttggaattgtgggaataaaggatccctgccgtccaggagttcgagattctgttcgtttatgtcaggcagctggcattaaggtgcgcatggttactggtgataatcttcaaactgcgagagccattgccctggaatgcgggatacttgatgatcccaatgtgttggagcctgtcatcattgaaggaaaagcattccgggtgctgtcagacttagaaagggaggaagctgctgaaaaaatatctgtgatggggaggtcttcaccaaatgataaacttttacttgttaaggcactgagggcaagaggtcatgttgttgctgttactggagatggcacaaatgatgccccagcactgcatgaggcagatattggtctatcaatgggcattcagggaactgaagttgccaaggagagttctgatattattatcttggatgacaatttcgcatcagtcgtgagggttgtcagatggggtcgttcggtgtatgcaaacatacagaagtttatacaattccaactaacggtcaacgtcgcagctctgataatcaatgtagttgctgccgtcagttctggaaatgtgccgttgaatgctgttcagttgctgtgggttaacctaattatggatactttgggtgcccttgcattggcgacagaaccacctacaaaccatcttatggagagacccccagtagggagaagggagccattgattacaaatatcatgtggagaaacttaattatcatggctttgtttcaagtttcagttctcctcactctcaacttcaagggaataagcctcctgcagttgaaaaatgatgatccagcacatgcagataaagtgaaaaataccttcattttcaacacatttgttctctgccaggtgttcaacgaattcaattcgcgtaaaccagatgagctgaatatattcaagggcatttcagggaaccatctgtttattggcatcatagctataacagttgtactccaggcgcttatcgttgagttccttggcaagtttgcctcaacggtaaggctaagttggcagttgtggttggtatcgataggtcttgctttcttcggctggccgctggcattcgtggggaagcttattcctgttcctaaacgtccattgggagaattctttgcatgctgctgtatctgcaaggggagcaaacaagcccctgatgacgcaacctctaatgataaggaagacaacaagcccgagccttgagatgtcagcaagattgatggttgctaacaatgaccttgtgctgtttcttaccgggttttgacgtgttggatttgtgattaccactgattgctattgtacttcaaacaggaaggctggaaatgcaactcggcttctcatgagaccttgtcatttgctgtagttcgttcgcaactgtatattgtagcttggaagactctgtgccgtggtgcgtgtatttgagaaatttctatgcaaagtgagctggcgataacattggatggcgcagcaaagcatcgcgcgcagtgtttcctaggcatcatccagtgcggctcgtggatgcttttcgtgggtggagctgcctgtgttcgtgccatagcatttgacgagtgggcgcccgctgtcggctttgtgccttgaagcctccgatgcagagaaaacaaggtgagttggaacccgagacgtgtctgaccagcatggcccgtagaaaagtttgccccggccggctaaaatttcccgtgctcgtactttagccgtgcacttgtgcgtccatgtccgtacgtaccgttacgtgaagccgttgccttctctatatttcttgtcagctgtccagtgtattacacgcatgcgcgtttcattgttgagccccacggggccgaggcgacagttgacagcag

SEQ ID NO: 37477 - DNA, 3195 bp, Zea Mays
ctcaaacatcactccagtacactccacagtagcgcacgcgcattccacactccagtgcttcggttcagcatggagcctaaaccctcgccgccgccggccgccccttcgcgccgccgcggcgcagcgaccaagcgcaaggagaaggccgcatctgcggtgccctccgggtccccgtcgccgaaacgccaggcccgggagcgcgggcccgtctaccagccgtcccttccgccgcctcaaccgcgcagccgccaacccgcacgcaagccgcagcgcaagcccgcacgcaataaatcgccgcggcgctccgtggagccgccgcgcgcgcaggaggaggaggagggcccgccgccactgccgccaccacggccgtcgctggagaaggagatcgaggccgttctgtcccgcggcgctggcgtccacgttgtacccaccttcgccggatggttttcatggaaggaaattcaccccatcgagaagcaaatgttggctacattttttgatgggaaatcagagagacggacacccgagatatatttgggaatcagaaatttaatcatgaacaagtttcactgtaatcccgaagtgcatctggagtccaaagatttgtgtgagttgtcagttggggagatggatgctcgtctagtaatcttggagttcttggcctactggggtttagttaatttccaccctttcccatcagttgtacaggaacacaagctggttgagagtaaaagtagtgctgagacagcagaaggaatttctcaggctgagaagttatttcagtttgaaacagttcattcttacttggtacctgtttcaaaggaagctgaagcaatatctccagttcagttcactagcttgctccctgagcctaccctagctgaagatgcaataggtgcagctgagtcttctgttgagtaccattgcaattcctgctcagttgattgttcaagaaagcgttatcattgtaggactcaggtagactttgatttttgttcagattgctacaacgaagaaaaatttgatgaaggcatgtcaaaatctgatttcatccttatggaatctgcagatgttccagggtctggtggttctaactggactgaccatgagacattgcttcttttggaagcgttagaaattttcaaaggaaaagaatggcatgagattgctgagcatgttgctacaaaaacaaaagaacagtgcatgttacacttccttcaaatgccaatttctgaaccgtttcttgatggcgatgatttcaatgaaacaccccagaagatcacaaaacaggattcagcagaaactggtccttctgatgtacctgacaagatggatgtagatggtaatgcggaaggaaaagagagcactgatgaaaaagcttacaagaaagcagattccagttccgcagaaacaagaacaaaattagctgaccaaaatatttctgctaaagaggatactatgaaattaggtgatgatgacctagttgcttccattgttgatgaaccaaataaatcttcattggtggatcctgcacataagaagaattctgctaatgctgatgtctctggggaacacccatccaactttattactaatatcctgagatccacttttgaagcagttgaccactttctgggtaaagaagacatgggttcgtttgctgaagcaggaaatcctgtgatggcactggctgcgtttcttgcttctcttgtggaacgtgatgatgctgtttcttcatgttgtagttcgttgagagctatatcagagatgtctcctgctctccaactggcaactgaacactgttttattcttccagatccaccaagtgacctcaaagatccggcttccactttcaggcggtgagagccaagaaggtgctgatactactcaaaatgtgaatgataccgataaaaacaacagcgaaagggaagatagtgatttagctctggagaaggagagtgctacattcacctcacagaagcagcacctggaagaattatctgacgcaaaggaaacatttattggaggtcctgaggcagaggccaaatccaacagcacaaaggattctgacaatccaattgctaaggtggggagcagtgtagcatctgacaagatgagagatgggtgcaatgctaatgccattccgtgtcctgctacttcaaatcatacaactgaacccagctccgtagcttcccaggaagccagtccagcaagtacaaaagacacagctatccctgaacaagttgaaagaccaagttctgaggaattactagctgatgtttcacttccacaagggaaggtagagccgaagaagactgaacctgcacctgctgcctcgtctagtatccaacagcatgggtgcaaacaagctggaaatggcaacactgaacctaaaagcaaggaaaacgctgcggccgatgatgaccccataacaaggctacagcgagcggccggtactgccatttcggcagctgcagtgaaggccaagttccttgtggagcaggaggagggttacattcggcagctagctgcacttgtgatcgaaaagcagtttcagaagatggaaacaaaaatgtcgtttctcaccgaagttggaaacctggtgttacgatcgagagatttgacagagaggatgcggaagaagcttttgttggagcggagcatgataatcgcttctcgaatgggtgcagcagcggcttccagaacaatccagcacggggctccggtgaccaccagactcccagtagggcatgtgcatgccttgaatccgcagctgaggcgcccttgaagctttttatagtatgtatatgatcagtaagactggcctatgtaggaggtgtgctaatccgcctctgtataaaatgcagtgtactgtagacgcgtctagggttctggagtcagtaggctttgatgctcaccacaccacacgacttggcttttcttttccttttcgtttaaccaagagttttcttctttgatgtcttacctcgccaccgccatacaatgacatgtgtttgaactcgttaactcgtggtcagtcaagctcaaacaatggataggaggtcagttaagcttaaacaatggacatacataaaaaggtttgatgctaagttacacaaaatattagggtaacattgtttttttcgtctcctgcaatggtgttgtacggtggtatttatagctaaccgagggtta

SEQ ID NO: 37478 - DNA, 2211 bp, Zea Mays
ccagacggagccgagccagacggagccgatatccaaccctccatctaaccagtggtaatggtggttttggtcagagtgttggtcgcctgtgccaaattccgctgcccggcggcgaatttactcctctcagcctctacttctcgggttcgagctcaacccggcgggccactgctgcgacaaaggactagcaaggtttcattgcgctcaattgctatgtctaccacacaagcctcagaagcagctgctgacaaaggattgcctctggcagtggacgctaccatgattgatgagtatgcctcccagtcaaagttgctgcaagaatttgttaaaatcccaactattggcaaggcttggatcttcaattccaaggatgagatttggggcccatgtcagttagagaatgagatacatattgcaaaatctgttcatggatcactctatactgatgaatggtttgaagggatatcatggaaccaggaagagactttcatagcttatgttgccgaggagcctcctcaaccaaagccagtgtttaatgattatggattcaagaaggaaggtttatcagaaaaggactgcaagagctggaagggacaaggggattgggaggagacctggggagaaacctattccaagaaaaggattcctgcactgttcgtcatcaacatctccagtggtgaagttcgacctgtcaagcaaatacctagatcattaagtgttggccaagtgatttgggctccatcatcttcatatagcttggtttttgttgcatggtcatctgacaatgggttccaagggacaccaaggaagcttggtattaaatactgctacaacagaccatgtgctctgtatgctgctcctgatcctttcggacaagaagctgagaaatcattaactgagggcaataagggtgaaactacaactatgatcaaattaacagcaaacctgagcagtgcctttttcccacggttcagtccggatgggaagtatcttgtcttcatctcagcgaagagtgctgtagatagtggggcacacaatgctacaaattcattgcatagaatcgaatggtgtacagatggaaaactggatgggagccttggagttgctgacgtggtgcccattgtgctgtgccccaaagataactgttttcctgggctatactgctttggcttgcttagggatccatggcttaccgatggacaaactatgattatatcttctgtctggggaagtagggaagtaatactttctgtaaatgttgtgagctgtgaactttcaagagtgagtccccaggactcagattattcatggaatgttcttgcagttgataagaacaacattcttgcagtttccagcagccttattacactccctcagatgtactatgggattaaggtttctcagactgaaagcaattgggagtggcagggagtttcaactcctttcccaaagccatctgataagatcagctccgtactagcagagcataagttcagcatactcaaaatcccaattagcaacccttctgacgaacttgccaatggggctaagcttccttttgaggctatttttgtgtcgcataaggattctgcaagtaatccaacaatcgttgttcttcatggtggaccacactcagtttatccatcaagttattccaaatccttggcttttcttttttcgcagggatataatcttcttgttgtgaactacaggggttcattaggctttggggaagaagcactgcaatcccttcctggcaatattggttctcaggatgtcaatgatgtattgacggcattggaccttgttataaagagaggactaatagatccatccagagttgccgtagttggaggttcacatggaggtttcctgacaacacatttgattggccaggctccagacacatttgttgcagcagctgctcgaaacccagtatgtaacttatcattgatggtgggtacctctgacatccctgattggtgctttgtcgagatttatggaaaagaagggaaaaagtacttctcagagtctccttcagtagacgatctttgtcaattccaccagaagtcaccaatttcacatattgcaaaggtcaagacaccaacactctttcttcttggagcgcaagatctcagagttcctgtttctaatggcctgcaggcctgatgcagtgatgagagctgtctcagttgagtcactaggttagag

SEQ ID NO: 37479 - DNA, 238 bp, Zea Mays
ataagggaagatgtgactgttgaatcgaataggtactacacgcacgccgacgtgcactcagttaaagaaaaaacggggatctggggatcaataatagtccaagctagctagtatatactggcatgaatgaatagaatgaagcaacatgaaccgcttcgccgatcagatccacacctgcagatcgcaggggaaaaattaaataaatccaagttctatagcctaatataacagaggcaag

SEQ ID NO: 37480 - DNA, 2444 bp, Zea Mays
actatttacctaccgtcagttcattttgacaagatgatgctccatcctactggccggttaattgcatttgcaattcttcatcagagttattcgccgcagacagcaaatccatatattcctatattgttaaatgcagcctgtgatgaaacgtcagagaaatcagaacgggcgtttgtccaactattattgacttcatctagtggaaatagtaataacgaggtcctgaatcagtctgcccttgattacataaatggatctgtttcagcatctcaggtctttttgcctcgggaacaacttgagaagcaatactgcagtactggtgtacattcctcgcctcagactagtagtttcacagctcctgcagttagaagtgctataccagatccagacgtccgtcaaagttgtgcaaattcatcagaaaatctgcgtctgatgatagagatactactatttctgttttactcgaagacataccaggggggaggttgggtccgcaatggattcggcccacacccccaagacttcctttatttgatggggagctacaatggctgaaccctgacaataaccacgagctattatgggattatagcatgtgtgctgacacgaatcgaggggctgctatccgagatttgattgcaagagccttaaaagcaagtcgtagtagaactggcaaaggatcctaaactggtttattattgtgggatgactccacagaagcttcctgatcttgttgaacacaacccactcattgctgttgaggttctttcaaagctaattcactctcctgacatttctggttactttgatgttcttgtgcacatggaaatgagcttgcattctatggaagttgtgaacagactcactactgccgttgaccttccaacagaatttgtccatgagtacatcacaaattgtatccaatcatgtcaaaacataaaggataaatacatgcaaaacagacttgtgagactagtttgtgtttttctgcagagtcttatccgaaacaagattataaacgttcaagaccttttcatcgaggtacaagcgttctgtattgaattttcacggataagggaagcagctgccagcgagcattctcctttcacaaatgctgagctgctctgcattggttccatggtcgctcagagttgcaccggtgcgaccgacgtggccgtggccgtggcgtctggtttcgatagacaattcaaacacttgaacaccaaataccgcaaactactcaacagctagcatcatgaattggtctcatgttcacagatcaggaaaaagaaaggattcctagacacatgatgagggctcctttgaattgcaagattttttccacttcctgggttgcgttttttctgtgaaaataaactgttctgtaaaaaatcttatatgatttttccgaaattcctacaaaccaacccacccagggcaacaagatcaccgcaaataacttgctcaaagtccgcgaaataaacaaaaattaaaggacgaggaaaaatagctaatcgccggctccgactcgatcgatgcacaagtgtatatatagccagctaaatcagcaaggcagtcctaataatcaccgccggctgaaggctgcgtcatgagtcacgacgaggccgccgcctcggcatcatagccgcggcagcgcgggctctcggcgaagtcgtcgatcgggaacgacgtggcgacggggccgatgtagaagctgagcgtctccccggcgcggtccacctcgccgacgccgagccacaggaacagcaccttcacgctgatcccccgcagcgccgtgagcgagccggcggcgacggacccggacacgcgcgcctcgtagcggaccagccacgtcctcgccagcaggaactcgcaggcccgcgggaagtacacctcgaaggcgccgtccgcgccgagctcgtaccctgtcacgcccgccggcaggatgccccgcgggaagccgtaccgctccagcatctcgtacgccgtcggcgacgtctcggtcgcgttgccgccgcctccggacgcctcggcggctgcttcttctgctacggccgtggccgccagcagcaggagcagcatgagggagtagtagctgctggccatggaggagcagagcagagcaaagtaggtggggggactggctcctccgattattccgagctggctgctagtgtttgcgcttcgcttacttgtcctttggaatctggaatggcttggtgagttgctattggatggatctatgtcgtgctgttcgggtagtgatgatttttttttcttctacgtactatttaatctgttcgtattttgacggggcgtatattccctaattaattagttgaggttgatgtaattgaccaatcatacaagaggttgtacttgtcacgttgtggcagttggctggccactcggggggtgtcgattatcttctcataaactaacgc

SEQ ID NO: 37481 - DNA, 1258 bp, Zea Mays
ctccctctttccccccgggcctcgtctgctctgttcgactgttgttgcagtgccttcgcctctccagcaagcaaagccgacccccacaccagccagtcaggaatcgccgccggcggaagccaagcatcatccccagacaccccgtccgtcatggatccggcggcgtggccgccgtggacgtcgctcctgctgcgggcgctgagccggcggcggacctgggtggcgctcttcctcgcagtgtacgccgcgctgctctcctcctcctggtccctgctggcctccgtccgcgcctggtactacgccgcctcctccgcctccgcctcggcggccgcctcggcagcgcccgcctggcccgcggcgctctacgcctccgtcacgtacggcgccgtgttcggcctactctccatggccgccgcgctcgccgtcgccgcccccgccatgctggtcacctggaccaccgtccttgtgctcctcgccttcgcggggcgccggcccaggtcgctcgtcgccgagggccgacgcgccaccagggacatcgcgggcctcgcgctccgcgtcctcctccgcgagggcaacgccgtcgccgcgctctgcgctgccgccagcttcgccgcgctcctcctcggccggcgcgacgacgatgccgcacgccgcgcttcctagttcgagctggttgtagcctgttgtagcatcgcccccctccccttttacacctcttcctcctcttctctcaagctagatctccagccctgttgttcctctccgggcgtaaccgcctgcgcaagagattatgatttgtttgttgcagctagtaggtgtaaattatcacaccagtttgtttcagttactccacaaattggacactgatggcatctgtaatgaatgtagcttgtcttacagctcttgacgatgaaaatgattccgggggctaactaaccttacatacagcgtacatttgttactgttagcacagctttctttcagatgacgtgatctttttgttaggaacaatattggtcgctgtggtggaacactggaagccatccttaatgggcatgcatctgcgaaagtccagttggagccaactattacagatgaaatcttatgatgcatgcccattactactttatttagcttgggcacaagattaggaggagccaacacaatgacaatggcgaccaatctgaagattaatcaatacaatgacataaacattactacttcactatgaagttgcacaaatagggtaatttattct

SEQ ID NO: 37482 - DNA, 2655 bp, Zea Mays
tcgatggccctattgcgtaaaacaataaacccgccttccccaccactggtcatcagtctccactccacgcccgacagagcaggaggactcagaaatggcaatcccagtgcgatcggctgccgcgccccgccgcctcgttccgtcgatacctccggcgagctctggacatgttcgaggactggcgtgcttcggtacccgaaccgggcctcgcggtgcaagagggttgtcaatggtggtcgccgactccaccagccgtcgggccaagcaagcggacggcggggacggcgtccttggggcgcctgttctcggagggctcgggatggagggattgggggatcagctcagcgtggtgatgaagttcggggggtcctcggtgtcgtcggccgcgaggatggctgaggtggccggcctcatcctgacgttccccgaggagcgccccgtcgtcgttctctctgccatggggaaaaccaccaacaaccttctccttgctggagagaaggcagtagggtgtggagttatccatgtttctgaaatcgaagagtggaatatggtcaaaagcctacatatcaagacggtggatgaacttggacttccaagatctgtaatacaagacatgctagatgaactggagcaactattgaaaggtatcgctatgatgaaagagctgacgcctaggaccagtgactaccttgtttcatttggagaatgcatgtccaccaggattttttctgcttatttgaacaaaattcgtgtcaaggcacggcaggtacttcttgatattttcttgatttgcacagtgattcagtgagcttttcaggttatgaatgcagcagcctacaagaatttgctatagtatccctgccctatggtgggggtgtcttgaaactttgattagtcattgatatttttactacatatgcacttcgtgatctcaagtttcagctcattatgttagttgattgccactagtattctgcggaaatttcacatttcgataatgattcgttcattgtccttttatgtgtgcgtggaaaatattcttagtattttttagattttgtgattaatttggtattgccataaaattgtaaccttttagatgatggagataatctccgtccacttcaccaaccaggttacacaaaccattttatcctttaaaatgtggacaacaggatttgaacccttatagtagtggagtcacacacccacaactcaattgagtgtttgactatgatctggatttccctttatttaatatctcaatttgatacaggggccatgtaaccagcctagctgcaaatccccagtacatccatatacatcccccattcttctacattatgcaatgatgtgaactcacgttcattattaattttatttgaaattttttgcagtatgacgcatttgatattggtttcattacaactgatgaatttggtaatgcggatatcttagaagcaacctatcctgctgttgcgaagagacttcatggggactggatacaggatccagcgatacctgttgttactgggttccttgggaagggctggaaatctggtgctgtaactactttaggccgaggtggtagtgacttgactgctacaaccattggtaaagccttgggactgagagaaattcaggtatggaaagatgttgatggtgtacttacttgtgatccaaatatctacccacatgcaaagactgttccatacttaacatttgaagaggccacagaacttgcttattttggtgctcaggttttgcatccacaatcgatgagacctgctagagaaggtgatattccagttagggttaagaattcatacaaccctaaagctccaggcacccttattaccagacaaagagacatggataaggttgtactaactagcatagtgctcaagtcaaatgtcactatgttggacattgtgagcactcggatgcttggtatttgctatatttgaagatctatgtatatctgtggattgtgttgctaccagtgaagttagtgtttctgtgtcacttgatccatcaaagatctggagtagggaactgatacagcaggaacttgaccatgtagttgaagagcttgagaaaatagcaattgttcgtctacttcagcagagggcgataatttcacttatcggaaatgtggagcaatcgtctctcatactagaaaagacgggacgtgtgctgaggaaaagtggggttaatgttcagatgatctcgcaaggagcgtcaaaggttaacatgtcgctgatagtccatgatagcgatgcaaaggcactcgtagaagcccttcatcaggcgttctttgaagacgatgtcctatcacaagtcgaagcggagaacctactcgtgggctgatcaacgtaggctttgctgggtccaggcgtgttatctgttatagattcccactcgcctccatgaacggcatgggcattggatcattgatcatgttttgcttgaaacaagtatgtcttccaggttctcagccaatgactgcaaaactgtgtttctgttttagaactgtttgcagacaccacagtctgagctgcgagcaccgattgtcaacaagatggcaagcctgtgatataattccaactgtctctaatcaatatatataataaacattatcaatatctattaatt

SEQ ID NO: 37483 - DNA, 3496 bp, Zea Mays
gtttcaggtgctagcataccttctgatatcgtcatcagcaactgctcgagcaagtgatttgactgagaactgggggagcgattccttcccgaacatggcgaactgctcgagcatgacatcacaatggtcatcagttggtgtgcaatcagccaatcaccacatacatatactacggatcaaggttcataaaccataatgcagctccaacaacaccgtttacaagttgcaacagctggaactggcaagaattgcaaagatacgcaggctactacagcctaactatctggattttgtgtatgctgttaactgagagttcttaaaaattaatgaattaacgaatccccaaggcccagccggatgaactgcatgcattgtcatctgcttgcagctgcctctgcaacggcttggagctccacgtgagctcctgcacggcggccgggaagatgaccgtaggtttcctcctgctctcctccaggtacgggaagtcctcggtgaagtgcaggccgcggctctcgcgcctggccagcgcgctcctgacgacgagcttggcgcagcagaagaggttgcgcatctcgcagacctcgacgcccttcagccgccccgttgagcgcacgatgccgacatactcccacatcacctactgcagctccatcctggcctgcctcgtctgccccacgatgtccgacagcgcgccgtcgcccagcgccgaccgtggcagcgtcagccgtgcccacctcgccgccagcgacggtcgtggagaactctcgcgctctggagagattttgcgcccgtggatccgtcgtaagaaacagactgccgtaacaacaaggattactgggctaaaactgactcggatactaaaattccgaatttcaatggattataatactacaattccaattgctctgttcgggataccaatttttagaagcccgaatgttcgggatatcacggttccaaaaagctcctcctcgagcgcgtgcgcagcggctctcctccccacaggcagtcgcgcggcggcctcatccccgccggcgagcctccactcccctccgccggtacgcctctatcgccggtggcctcccctcggcagacagcctcgcctcgcttgcttctattgctgtgctccaccacagagccctaggtggagctacgaaccccgtgatccccgacggtgtggcaccggagctcggcggcgacagcgggcacatccccctcatgccctaggtggagcaacgaaccccctgacttcccgacgccaccctcgcacaagatcccgatgtggcaatggcgaccagcgacgggcgctcaacgccaccgcgccgcctgcgaacccatggtgagaagtgtggtatcgatctagagccgaaggacttccccaacaccccttcctccatcggcgtgacatcggccagctcatctgcgacgacgaggcatcttcgaccgacttctcgacaccccatcctccatcaatgcggctccagtaccccttcctccatcggcgcagcagcatccaattcatctacgatgacaaggcatcttcgaccaaccacgccctactacaagtggtgtcagtccatctcagataagtggagtaatttgtttgtatctgtatcttctattttatttcttccctaatcctgattaatagcctaatcacgcgacaactaatacatgttgatttctttccttagtcggtgtcgtgcgcatgtgagatctagggagaggaagaggaggaagggttgtggggaccgggggtgcaagatggcggattcacctgcaactacaagaaaagaaagagcgagagatttacagaaaccttcagagccgcggaggaggagaaggagattaggaggatctctacggcgctgacggattagttaaggaacgaaatatcacatcgtgtccggtaaccagattcagatgtgggcaccatgcgtgggtgcagggccaggccgaggtgaaagagattcgacgattgagaatacatcaaagaataaaaatgtggaactcggattttcagatgaagagcgtgaccaagaatttcccgattttccatcatttattccattcttacctcctctgagtgcagctaacctaaaggtctactatgccacacgtttcaccatcatagttgggataatggtgttcggtggttttcttgcaccaatcttaaacttggtctaggggcacatcttatgaagactccatctgcagcgttcatctgtcgacgtagttgagaagtgcactcaggttatacatccagtaaagagcaagacatttgaaagcttatgggccaactgtgttgctattgatgcaagcgaaagttggctgatgaattctctatgcctacttctagagtgatgttcaaagaggttgacgctccttcaccatccccagctttgtggaatgggccacaggtagccatttaggatgacaaagccacaagggtgtccttcatcaaggctatgctagaagcctcagacttgtgtctgaggaaaattcataaaaatggtacacagaagctgggaagaaagtggaagaggaatttagcacttgccctctgtcagtcctaatgatgagcgttaagaacaacaccaagatactgaaagcaaacatggcttgttcagtcgggcagcggcagcagaggggatggggccaatgacggaggcggagaggagaacccatcgatttggtggcgtaagtgggagctcatcgaggccgccaccggccggtccacctcttcaataatcgtccttcatcgcccttcagttgacctgagatctagaaggacacaacaggcaagaggggcgagggttgttcagtgctttgacatgtgtgcaactattcaagcacaatggttagatgatatccccattcattttagattattacattgtggtgttcggcttcttcagtcaagcagcaatcatgcaacatgccttactgtagttttttatcactgcacatgttgctggacaaatttatggactggaggattatagaggactaacaagtgctactgggagattctcgagcaccattgaactaagagattccaaatagttctttggagtctattgttgatgttggcggggataatctagcagagatttgtcagattttttgtgcaacacggaggctacatgaggcagcaacgatcccattcttctcgcatgccactttacacaagctaaggatagcttctggtctcactcatggttgtggcagggaaagccgagtcagtagggtttgtcatgtagctggagttatctcagaccacatattagatgcagtgatgatgttaatggaggatgtttacatttaccgtgcaagcaagatgacttatattatgccttaggacaataagtattgttttcactctaatgaaatacttggtaaaaagttgtctctgtagttgtatatttgactgtgaatatttgaacccactgttacaattgttgctaattgaggtcagatttcagaggccaaataa

SEQ ID NO: 37484 - DNA, 4067 bp, Zea Mays
ataaaaaattcatgttcagtttggcgaagaacttgcagccatatgcataaactttgctgggtcgctgcgtgttcatggtgttgcaatgcccacgatggaagggattgctaatgtgctaaatcatatcggagcacacaagaaaggaaagcaaacccggattctatggcatagtcttcgggaggaaccagttatctacatcaatggtcgaccctttgttttgcgggatgttgaaaagcccttctcgaatcttgaatacacgggaattaaccgggagagagtggaacaaatggagtttcgccttaaggaagatattcttcaggaagcttcaaggtatggtaataagatactggtcactgatgagctgccaagtggtcagatggtggatcagtgggaatcagttgtgtatgatacagttaagactccacttgaggtatatgaggagttgcaacatcaaggctacctagttgactacgaacgtgttccaattactgatgagaaagcaccaaaggaaggagattttgacaacctggtacgtcgaatctctcaagttgatatagaaacagaaattgtgtttaactgccaaatggggagggggcggacaactactggtatggttatagctacattggtttacctaaaccgaattggagcttcaggtatccctagaacgggctctattgggaaggtcttctatgctggaaatgatgtagacgattatatgcctagctcagaagaagcaatactcagaggcgaatatgctgtcattaggagtttagtccgagttctcgaaggtggtgttgaaggcaaaaggcaagtggacaaagttattgacaaatgcgactccatgcagaacctaagagaagctattgctacttaccgcaataacattcttcggcaacctgatgagatgaaacgagaggcatcactttccttctttgtggagtacttggaacgttattacttccttatatgctttgctgtctatgtgcattcggtgagctctgctcaccaaacaacattatcagtagaagttagtttttctgattggatgagagcaaggcctgaactgtacagcattcttcgaaggctattgagaagagatccaatgggtgctcttggttactcaagttcaaaaccccctcttacaaaaattgttgagtctgctaatgggcgtccacaagatatggacgttgttgctgccatgaggaatggagaagttcttgggcgtctaactgttttaaaaagcgaccactgcccaggcagccacagccttaatttacccgagagggtggagggtgcaccaaattttcgggaaatccctgggtttccagtctatggtgttgcaaatcctacagttgatggtattcgagctgttatccagtgcatcagtacaagcaagggagggcgacctgtgctatggcataatatgagagaagaaccagttatctacataaatggaaaaccatatgtgctacgcgaagtggaaagaccttgcaagaatatgctggagtacacagggattgatcgtgatagggtcgaacgcatggaagctcggctgaaggaggacattttacgcgaggcagaaagatatggtggagcgataatggttattcatgaaactgacgatggagagatctttgacacatgggaaaatgtagataatgaagctgttctgactccgttggaggtatacaaaaacttggtgagtgaaggccttccgatcaaatatgcacgggtgcccattactgatggtaaagctcccaaaagttcagactttgacacgatagccttcaatgttactgctgctagcaagggcactgctttcgtattcaattgccagatgggcaggggcagaacaactacaggaactgtgattgcttgcttgctgaaacttcgaattgatcatggcagacctattagaatcccagtttgtcaatatgaccatgaagatgatgctatttactcaactggaggagatgcaacagatcacaatggtcacttgaattcagaatcatggaaacctcgtactttgacgaagttaaattctggatttggaatcaatgacattcttctgctgcgaaaaattacaagattatttgataatggaattgagtgtaggcagactttggatactgttattgatagatgttcagctttgcagaatattcggcaagctgttttgaactacacaagagtaattaatcaacaacatgttgagcctagagttaggagggttgcattaaatcgtggcgctgaatatttggagagatacctcaaattaattgccttttctgcataccttggtagtgaagcatttgatggtttctgtggacaaggacaaacaaagatctcatttaaaggatggctgcaacagcggccagagatccaaaccatgaaatggagcataagactgcgacctggccgttttttcactgtgccgcatgagcagaaagcaacatatccacctccacaagaaaaggtcaagcagtgtgaatttccggggtgcacctcatgttattaaggtggatggataccctgtgtatagcatggcaacacccactattgatggagcgagtgatgttttgtcgtatctgggctctaaagacacaaccggaagaaacattgcacagaaggtggtcgtcacagatcttagagaggaagtggttgtttacatcaagggatcgccatttgttttgagagaactagatcaacctgttgatactttgaagcatgttggcattagtggtccaatggtagagaacatagagacaaggctaaaggaggatatactctctgaagttaaacagctaggtggtcggttactgcttcatcaagaagaatttaatgcagccacaaatcaatgtagtgtggtaggttactgggaacacatagatctggaggacgtgatgacaccagctgaagtgtacagcacattgagagacaagggctattgtatcgagtacaaaagaatacctctaaccagggaaagagaagcattagctgccgatgtagatgctatacaatcatcaattgatgaatctgctaggtactatctctttatttcacacactggatatggaggtgttgcttatgcgatggccattacctgcctgggactgagtgcagatgcaaagtttgtaatggaagaaacagcagaaacacactttgtatcaacatctcttgcgaaaaatgtgtccatcaaaactaaaactgacatagcacttaagcagggtgactaccgtgacatattaaaccttactagagtgttggtacatgggcccaagagcaaagaagaggttgacacagttattgacaggtgttctggtgctggtcatctgcgcgaagatattatgcattacaggaaagcactgcaagattgttcacatgacgacgacgacgactgtgatgaggaacactcttatctcactgatatgggcacaaaagctttgaggcgttacttttttctgatcaccttcagatcctacctatacagcacgacatcatgcaaaacaacatttacatcatggatgaaggcaaggcctgaacttggccacctttgcgacaatctaaagctggacaaataggccatcttcatgtgacgtgattatgtagttgtgtcacttccttggacacattcacccagagtttcaaaaaggaaggagactaaaagaacgggtagagaggaagcagtggttatgggagttgtggacaatgaaagagcagcttaggctgtccgaaagtagggcattgtactatacttgtcggtgttaattgacaccagcaagcatgtatatattgtcaggcgtattatagatgaacatattagatatttctattgtagtattttctcaaattttaaaagaatcatttcatgcagttcattctcatgtatgtatctgatatgcttgctttttcagcagcgtttttttagacaaagctcttcggcagctttgatttttgacttctctgccttctgggcgtcaatatggccgcagccttttctaggagttgtattgagctaggatgaagcttgaaagaaatacgatgtcttgtttctaaagccccct

SEQ ID NO: 37485 - DNA, 2693 bp, Zea Mays
cagactactgcgccaagctgagcgctgcgggtgaggggtcgcgcgcgccgccggctaccagggccggccggccgccccaccctgctatagctgtggatcagtggatgcgcgtccgcccctgtgtgtgtgtacccgccgaacgccatggataggagcgggaagatgagaaagaggaagaagcgcggtgacgaaagggccgccgccgctgctcttctgtcgccgcgctaagctgcgaggtgcttggcgcggcagcgctgcggtccattgaggctggcgagacgcttgcgtcccacagtggcatcgctagcggcctggcaaggacgctgggaagtagaaaccagcgagtcattgaggctgcttgtaattctatattggatctctcggcgtcttcagtcggtagggagcgacttgcaggctcacctgttctgccgaggacattgcatctattttgtcaggtggaatctgtttatggatttgcccatagccgaagcaccgagtgcccagaaagatctacagaagcaaataaaatcatgtgtttaatcattgacacattggttctcttggtgaattcttgtaagattggcaatttgcagaatgtacagcaggagctggcaaggaatgttctgtctttgttgtacaaaatctggaagaaaactcaacccttaagatcatcgactgattgcaacaagtggaagaataaacttcagagtaaagaatatgatatatccaaatctattttcaggctttcaactggtcttgcctttccagcctggccagagcctgatgtggtcaggaaaagtgtttttggcgaaacagtgtccgactttgaaacttttgtcctagcctactgggaaaagttgcccaatttgtacaggaggaaacaagccactaaaatggatagtcttgtgttcgtcgcactgcataatgcttttaatcttgggacaacacctgattctatcattgaatcattattacagggtcttgtttcttgccccgctatcgcttctgatgagcttgacataaattcatttctccatgaggttcatgattcactgggtgattctgtaaagtacaggcaagacattagagtcatgagaacacgagatccaaatgaccaaacctcaaggggatgtgtgacagaggagcattttttcgatgatggaacggtcttcacggatgaagatgcattcatcgaaaaatgtaagcacgccttcaagaacggttattcgatcgccttgcgtggcatggagtttcggtctgagaaggttgctgctatagcttctgcactggctgatctatttgggcagccttctgtaggagccaacatatacttctcgcccgcaggatctcaaggcctggcccgacactacgacgatcactgtgtacttgtttggcagctactcggtagcaagaaatggacggtttggcctaatccgaagccactgttgcctagactgtatgaacctttcgaccctttagatggcaatttagatgagagcagtgggagagtggaggtcttacatgaaggggacatgatgtacatccccagaggttatgttcatgaggctcgcactgatgtcagtggatcagaggtgaacgattgctcactccatttgacccttgctattgaggtcgaggcaccctttgagtgggaaggttttgctcatatcgcccttcattgctgggcagagaagcagcagcttagaggttcccaatctgtcgagttcgaggggaaagcaggagcttccttatccgctattgtgcttcatgtagccatcaggttgctctccgacagtgagcctgttttcaggaaggcgtgcatggtcgcagcaaaggcagcgacgtcgtccagttcctgtacatccacaacgactcacctggaggctcttcgaagcagccagaggtcaactttcgacgagatactgaggaagatcgatcagagctgcagcatcaaggaagcgctggagcgcatcgtgtcggcggtgagagagagagacgacggagccttccagtggatgagctggctccggcacctgccgcagcaaggaacagctgcaggctacatcatcgacttctgcaatgtcttgggcgccctcgaggcgctcgtggaggcgttcgactctgaccctggccaggccctggatggcctcacggccttcaagtcagggttttgccggcgcgtcgcgtacgaggacgcgtgcgaggcctttgggactttgctcgagatgtacagaatggctaggacccagtacatgagggggatgctggcgttgcacggtgcaggtgcacacgtgagctgaggctgagccgtggagaattcgccgtgacagagaaaggttttgcttttctggtggtggttgcgtggctaggctagtcttttctcctagcgaggaaaacctgacatgtatgtgctggacacttgtacggttgtgccatgtatcgttcgatggctgcttttgactgctggtaagattatccattggcatcgatctgtgacttgttccgttgttcgacaatcagttttcaattcagcagcactctggcttggccctttccagctctggacggttcttgcgtctttcatgagcatttgccagtaaagaagtcgctggtcagtaaagaattgccagtagtggtactggcttgagatctcatccctgctgaagtctccacttgtatattgtatacagaat

SEQ ID NO: 37486 - DNA, 2864 bp, Zea Mays
catcgtcctcggcccctgcccagtctcctctggtcggtcgtactcgtccttggcctccctccctcttagtctctctcctccgcaaacaagctcaacgaaacgcaacgcctcgctgcggaaatactcggagtaggtgcgccccgctctcgctcacgagtcctagcacagtcgcttcactgccaatccattgctctcgtatacacgaccaattgatgatggccgcggaaccctaggagcggcagcgcggctcagccttcgacatgggctccctcgaaaacggagccggagccggagccgcggcggcggcggggagctacaagcgcggcccgggcccggcgctgcgggctggcggcgcacgtaaggcgcgggcgagatccaggctcgcgcgcttcctgctgctggagaaggtggactatctccagtggatagccgccgccgctgccttcttcttcgtcgccatcgtctttgtcgcgttcctcccggggtcgggcgtcatcgagcggcccaggctgacgctcccctcgagccgcgcgggagagggacgcgtcggaggcggggttgaggaccgcagcggcctcgtccggtgggaggcgggcgcggcgttcgagttcgagccggccaggctgagggagaaatgggcgagggagcggagggaggaggccaagagcttggcggagctcgggacgcccgtaaggaggctcggggtacggaagccgcggcttgccatggtgttcggagacctgtatcccagcgcaatgcagcttcagatggttagcgtcgcctcggtgctggaggccatggggtacgaaatgaaggttttctcacttgaggatggcccatgtggtaacatctggggagccattggagtaccagtgagcatactacctgaggacgcaaacctacctatttcagtagattggttagactatgatggcatacttgtcaattctattgaggcaagaccagtattctcaagtcttctgcatgagcctttcaaatctatacctatcatttggactgtgcatgaatattctcttgcacatcgtgctaaagaatataatgtgagtggaatgattcagctcataaatgcttggaaagatgtattcagcaggacaaatgttatagttttcccaaactatatattaccggtgatgtatgctgcatttgattctggtaactatttcgtgattccaggccccccatcagaagcatttcaggttgacagctttattgctaaaagttaccacgaagacgtgaagatcagcttgggcttgaatcctaaagattttttaattgctattgttggtaattcattttcatacggtgataatttgatggaagaggcacttgtcttgcaagcattgagtcctctgttacagagatatcgctctgagaatagcgcacaatctgaactgaaagtaaagatcttcactgggaacataactgagaagcataggatggcccttgaggtttatttatgtcttcatgccctgtctgatcaagtgaactgttacttacagtctgagtgctttaaattgtatctaaccgtgtattagttttctgatttctgatagtctgttgctctaagtgttggcttcccaagaggtgcagtggagcatgttgctgctgaagataaggacaacctccttggtacagctgaccttgttatatattattcttgtctcgaggagcaattattccccagtgtgctagtccaagccatgagtcttgagaagctggttatagccccagaccttgcaattattagaaaacatatcaatgatggagtaaacggacttctgtttccaagaaagaatattggcatgttagctcaagttcttcttcgagcagtgtcaaatagtaaagtgtctctttcagggcaaaaaattgcttcagctgggaaggctcatgccaagaatcttatggcttctgagaccattgaaggctatgctatgctattgaaaaatgttgtcaagctccccactgatgcactaagccctttaactgctgatgagatacctttagctctgaaacaagagtggaaatggcacctatttgacgacgtgaagcatttacaccgtgtgaatacgagtttgtctggctacaagatactccagaaactagagcaggagtggcatagcaaccaaatggaaaactcttctttgagtacaaaaaatatcaatgacgcattctctgcaattgcctgggaggaacagagagtaaatgaggttatggacatcaaaagaaaaatggaggaagacgagttgaaggacaggaatgaccaacctcatggaacatgggaggaggtgtacagaaatgtgaaaagggtagagaggttaaaaaatgaattgcatgaaagagatgacaaggagcttgagcggacaggtcagccactttgtatatacgaacctttctttggggaggggacctggccctttctgcaccagagctctctttatcgtggagttggtctgtcttcaaaaggtcgaagaccaggagcggacgatattgatgcttcttctcgtcttccacttctcaataatgtttactacagagatattcttggtgaatttggagctttctttgctcttgccaacagaattgacagaatacataaaaattcttggatagggtttcagtcctggagagctacagcaagaaaggcaaacttgtcaaccaatgccgaatctgcaatcttagaagccattcaatctcaaaagcatagagattccttttatttttgggttcggatggatcaagatccaagaaaccacgctaataaagatttttggtccttctgtgacgtgatcaatgctgggaactgcagtcgttaggggaaagatcgccccaacggttattatatt

SEQ ID NO: 37487 - DNA, 2620 bp, Zea Mays
gcagctccacaacaattcgtgcctgcctgccctgcctctcggacacctccctcgtcctccccctcctacgccgcccccgtcctcggcccccacgcgctcgcgcggcgcacgaggcgacgaacccgacctcctcctccgcgcccgtccctgccaccggtcgccgatattggaaggagctcggagggctggggcgctgacctgagttttatggagagaggatgccagagctgcgaagcagtactcgccaagcatgcctaaggtcgaagaagcttgaagatctgcagctaggagagccgcctgcgaaaccggtctcacctgctccgccgagggcaggaaagcgtgctcctacacgtgctgctaggggcagaaagggtgccactgggaaaggagtgccccctgcacctacgactagaagaaagcggggtaatattgtcgacttggaagctgatccagcttgtgaagacccccctaaagctgtcaagggactggaagttgctgctgctgctgcacccaagaaccttcctttgaaggaggtagccgaggttggtgttctgaaaatgaatggtgtgagtgcagagaagattattggggctgaagatgaatcaacagcgacacctgtgccagagagggttcaagtaggtaattctccagagtacataactgacaggaagttaggtaaaggtggttttggtcaggtctatgttggtcgaagggtttctggtggagctgcccgcactggtcctgatgcatatgaggtcgcattgaaattagagcatcgaaacagtaaaggatgcaattatggccctccatatgagtggcaggtttataacactctcaatggttgctatggcataccatcggtccactacaagggtcgtcagggcgactactatatacttgtaatggatatgcttggtcccagcctttgggacgtgtggaattcaatggggcaggcgatgactccaaatatggctgcttgcattgctgtagagagcatatcgattcttgagaagctccattctaaagggtttgtgcatggtgatgtgaaaccagagaattttctgcttggtcagcctggatcgcctgacgataagaaactttaccttatagatctcggtttagcatccaagtggaaagagaataatggtcatcatgttgattatgatcaacggcctgatatctttaggggaacaattagatatgcgagtgtccatgctcatttggggcgcactggtagtaggagggatgatttagagtcactggcatacacccttattttcctgattagaggaagattgccttggcaaggctaccagggagataccaagagtttccttgtttgcaagaagaaaatggctacttctccagagatgctttgttgtttctgtccagctccattcaaacagtttcttgagattgtcacaaatatgaaatttgatgaagagccaaattatgccaagcttatctctatttttgatggtttgattgaagcacctgcgtcgagaccagtcagaattgatggggccctcaaggtaccattacaatgtggctgactcaaggctaagtcaacatatagaaaagggtaatgatgacgggctttacgttagttgtgtggcttcctcggcaaacctttgggcactcatcatggacgctggaactggtttctgttctcaagtttacgagctctcaccagtttttctccacaaggactggataatggagcagtgggagaaaagttactacataacagcaattgctggatcaaccaatgggagttcattggttgtcatgtccaaaggaactccttacacacagcaatcatacaaggttagcgaatcgttcccttacaagtggatcaataaaaagtggaaagaagggttccatgtaacatctatggccactgctggaaatcgctggggcgtagttatgtcaaggaactcagggttttctactcaggttgtagagttggacttcctgtaccctagcgaaggcattcatcggcgatgggagagtggttacaggataacttccacagcggccaccaatgaccaagctgctttcatcttgagcatgccaaagcggaagccgatggacgagacgcaagaaaccctccggacctctgcctttcccagttcacatgtcaaggagaaatgggcgaagaatctctacatagcctcgatctgctacggacgaacagtgtgctgatagtcgaagagaggggcggccgcgctgactcaatacggtggcttgcgtcaagagattagagatgtgagatgaacattaaatcaaaaccagttctaatgatgataggatcagtagatctgatgatacggtatggtatcctaccgtagctgtaaagaaatgttgtacccagtgccggccgcgagaccgttactgccatgaagtgaagctaatgcattttggagtctcttcccgggaaaatggaacacaatataatgctcatgtgcaaatcatataggtttaatttcttgcgcactagagtttgcacgtcaaaaaaaatcataatctgaaaaataggccttcatatatatatatacatatatatctatctatatatatatattatatagctaaaataacacaccagtttgaagcaaag

SEQ ID NO: 37488 - DNA, 240 bp, Zea Mays
ccgggcatggagcatcctcgtccgcgagctcctccctgctagccgtggagctcctctgcgtcgcgcgctcctcctccctgtcccagatctcacccacgccctggccctggtcggttcctgcacatcccaaccgtggatgccgtgggcttgttcctaatcacgccagagctagcgcgcaggtcttcctcgccttcaattccctggccgtcgtgcccctcaaattgcaggccgtgcgctcgc

SEQ ID NO: 37489 - DNA, 423 bp, Zea Mays
tatacttttacttttatttattatttctaaggttcagtatttacttacactaagtaactgctaataaaattttgactaacttataaaagcaatgctcagcttcaacctttatctcattgatcagccttacacttcatgaactcccatctttggtgagttcatgccacattatttcccacgacttgttgagctatgaacgtatgtgagctcactcttgctgtctcacacccccccacacaggagaagaacaggtggtcgaagaggagccgcctaacactgaggctttcgacttaatctaggtggcgtctcccagtcaactttctggcaccaaggatagattttagttcctgtattgatcatcttttattttgtaagacttccgctatgtaataagtactctgattttattgtgacatttatctc

SEQ ID NO: 37490 - DNA, 766 bp, Zea Mays
acgccaccgcctttttactcatctgttgagcacttcgcctgcttccctccttgccgtgcgatccgcctccagagactcctttgactctggattcaatcgtggagcttggagcattcaaggttcactccctccgccatcactggaagatgggaccgcagaaggtcgagacgatgcggcggccgaggcccgagagaggagaacggcggatcgacgccgccattgaccacctcgcccagtacggcttcgcaaagccccaaatccgcaaggtcatcaacgacctccttcagctgtacgggagagatggatgggtgttcctggaggagggatcatacagtatcgtgcttaaagtcctggaagaacaggcgcagcaggatcagacacaagaagcagctgctgcagaagaggcattaccacaaaacggtatggaagtctcacgagtgaatggtgaggcaccgaatgagcctccatcaacccttgaactgcaagcttcccccagcagttcacctttactgctagtgccaccagccaagggacctccttgtgcaaggactccctgctatggatggattagtgaagagtccgagtctgagagcgaatcagaggatggagaaatgctttccgatgtaactgggcctgtaattttcgccaaaaaagatataccaaatcctgtgggaacattgccttctaggaggaagtgacctagtagatgggatgtgcacaccctagctgctggaacgattccgggtgcaatccggcacaaacaaac

SEQ ID NO: 37491 - DNA, 1977 bp, Zea Mays
aagccaattggcgtcacgtcgtcgcctctgcggaaaccggcggtccacgggaaaggaaagaggaaacagggaggcgacgccgtcacaattcgttctcgcgatttgcccttctccacctccccgtccatgtcgcgggaaatcacgcgcggcgacgctggattcacttagatccaacagggtaatcggcacggggcagcctctccacccattcccgcagccggttgggcgagtcgtcggttcagataatagactgggcgtgtggatccaagaggtttgatccctttaatttggattgaagtgccagctttcggtcaggaaggtgatgctggatgatgctgacggactttgaaagcataccggttcaaagaagtgttgcctgtcaccatgaggctcaacgttgggctcctagtgcccttgatggcacaatactccgcacccacatgggctactttagttgctgggttcttcatgctgcttgcgctttcgctctccacgtacctgatatttgagcatctctcagcatacaacaatccagaggaacaaaaatttgtactgggtgttattctcatggtcccttgctatgcaattgagtcatgtatttctttgataaatccaagtacaagcgtttactgtggcatcctacgtgatggttatgaagcatttgcaatgtactgctttggaagatatattactgcatgtttaggtgatcataaagaccctcacagccaccttatctcttcttctagaatcttttggtgtttattgtgatggagaattcaatttacgatgtgggtacccttactttgctgctgttctcaactttagtcaatattgggccctgtactgtctagtagcatggtatacagccaccaaggacgaattggctcctataaagcctctggctaagtttctttctttcaaatcgatagtgttcttgacttggtggcaaggtgtggtgattgcaataatgtatgctttgggccttcttagaagccctttagcccagagcttggagttaaaatcaagcattcaagatttcattatttgcatagaggacagatgggcattgcttcagttgttcacctctatgtgttcccagccaagccctatgcactcttaactaatcagtcacacggaaacatttctgtacttggggactatgtatcctctgagcccgtggacccttttgaaataaaggaaagcaaccggcctaccaaaatgaagcttccacagttggaaccagatgagagaagcgtgacaaacataaaagaaagtgttcgggactttgttgtcggcagtggtgaatatgtgatcaaagattttaagttcactgttaaccaagcagtgcgaccagtggagaagcgcattgataaattgatgaaaaagaatgataagagtaagaaaagccaggacgacaactgggtgagtgcagcaacaccagagaggcctgttcgtgggattgatgatccattattaagcggaagcgcaagtgacagtggtgtcacaaagggcagaaaatatcgcagagttgtgagctcagttactgctgtggacagctggggaggtggtgatcaagcttctgacggatatgagatcaggggtcgccgctgggctgtaaaaagctaacgatttacatagcgagatggtaaattcgaaccatatcgcgtggggggaaaaggacttttaggtttgcaactgtttctgcgatactggccatttaggagccttcgcaagttcagattgtctttgtataggtacttaggtagctgataatgatatgtaacctttttgcgtagattgtttaattttcttttctttttcttggtcgagtcgtactgacatttggtattgcaaaatttgaaagtacaatagtttttttcattctttggaaatggaaacagagttcagcgagtgtgtccatttggacggatttgtatagtttcgttacacgcttacatgcatctttgatctgaaaaa

SEQ ID NO: 37492 - DNA, 4906 bp, Zea Mays
gattaaggagggaacctctccaacttcgagccccgtcttcttattgccttcccggcctggcggtggcggcatggacgacgccggggagatacacgcgctggggagcctgcggcgggacggatcggtgtggtcggccgcgagcgacaccgtcttctcctcgctgtcgtcgcgcgcggacggcggcgtcgacgacgaggaggccctgcggtgggcggcgcttgagaagctgccgacctacgaccgcgcgaggacggccgtgctcgccatgcccgagggcgacctccgccacgtgaacgtgcagaagctcgacccgcaggagcgccacgcgctgctgcagcgcctcgcctgggtcggcgacgaccaccagcgcttcctctccaagttcaaggaccgcgtcgaccgggtggggattgatctgcccaagatcgaagtgcggtaccagaacctgaacgtcgaggcagaggcgtacgtcggcagtagggggctgcccaccatcctcaacacatacgccaacgtgctcgagggcatcgcaaatgctcttcacatcacaccaagtaggaaacagaaaatatcgattcttcataatgtcagcggcattatcaagccgcacagaatgacactgcttttgggtcctcctggcgccgggaaaacctcactgctgctggccttagctggaacactaccttcaagccttaaagtaacagggaatataacttacaatgggcacacaatggacgagtttgaggcccggagatcagctgcttatgtcagccaacatgatctacacatgggagaactgactgttcgtgagacagtcaatttctctgcaagatgtcaaggaagtggtcatcgctatgacttgctagttgaattgtcaaggagagaaaaggacgcaggaatcatacctgataaagaaactgatacctacatgaaggctgctgctacaggagaccaaaaggctgatgtggtcacaaatcacattctaaaggtcttggggttggatgtctgtgctgacacaatcgttggaaacaatatgttgagaggcatatctggaggccagaaaaagcgagtaactacagctgagatgcttgtcaccccaggacgagctgttttcatggatgagatatcaactggacttgacagctcaacaaccttccagattgtgaactctatccgggaaaccattcacattgttggcggaacagcagttattgctttgctacaacctgcacctgagacatatgacctgtttgatgatataatcctcctgtcagatagtcaggttgtctacagtggtcctcgtgaatatgtccttgagttctttgagtcagttggcttcaaatgccctcagcggaaaggtgtagccgacttcctgcaggaagttacatcaaagaaagatcagagacaatactggaaacatggtgatgacacctaccgatacgtccccgtgaaggagtttgcagaagcatttcaatcgttccatgttggtgaggctatacgaaatgagttggctgtcccattcgacaagagtacgagccatcctgctgctctgaaaacatcaagatatggcgccagcgtgaaagagctacttaaagcaaatatcgacagagagatattactaataaaaagaaattcctttgtatacatattcaaggcagttcagctaacactcatggcactcattacgatgaccgtctttctccggaccaatatgcatcgtgactcaatatcagatggaaggatatacatgggtgccctgttctttggggtcctgatggtcatgttcaatggactggcagaagttggcctaactattgcaaagctcccagttttcttcaagcaaagggatcttctcttctaccctgcatggacatactccttaccatcatggatcattaagactcccctctccttgctcaatgtaacaatttgggttttcataacatactatgttattggatttgatcccaacgtagaaagactttttagacagttcctgctcctcttactaatgaacgaggcatcatcaggattgttccgtttcattgctgggcttgcaaggcatcaggttgttgcaagcacccttggttcattcggcattctgatatgtatgcttttgggtggattcctcctggcaagagagaatgtgaagaaatggtggatttgggggtactggatatcacccctgatgtatgcacaaaacgccatatcagtaaatgaattcctgggtagcagctggaataagcaagtaatccccggttcagcagaaccgcttggaaaactagttctagaatctcgtggactttttcctgaggcaaagtggtactggattggtgttggtgccttgcttggatatgtgctgctattcaatatactctacacaatctgcctcacattcctcaaaccatttgacagcaatcaaccgacaatttctgaggaggcattaaagataaaacacgcaaatctaactggtgaagttttagaagcatcatcgagaggacgggttgccagcactacaacaacaggtagaagtactttggacgagagcaatgatgaagcagcttccaaccatgcaacagtaaattctagtccagtcaacaaaggaatggtcctcccttttgtacctctctccatcacttttgatgatataagatacagtgtggacatgccagaggcaatcagagcacaaggtgtcacagagacccggttggaactactgaagggtataagtggttcgtttaggccaggagtccttactgctcttatgggtgtcagtggtgctggcaagacaacactgatggatgtgttggctgggaggaagaccagtggatacattgtgggcaacattaccatatcaggttacccgaagaaacaagaaacttttgctcgtgtgtcaggatactgtgagcaaaatgatatccactcaccaaatgttaccgtctatgaatcccttgcattctccgcatggctcagattacctgctgatgttgattcctcaacaagaaagatgtttattgatgaggttatggagcttgtggagcttttacccttaaaagatgcattggtaggattgcctggtgtcagtggactatcaacagaacaaaggaaaaggctaaccatagctgttgagcttgttgctaatccttctataattttcatggatgaaccgacatctggacttgatgctcgagcagcagctattgtcatgagggcaataaggaatactgtggacacaggaagaacggttgtttgtaccattcaccaaccaagtatagatatatttgaatcttttgatgagctcttccttatgaaacgtggaggtgaagagatttatgtaggcccactagggatgcattcatgtgaactggtcaaatattttgagggcatcgaaggtgtcaacaagataaaagatggctacaacccctcgacatggatgctggaagtgactagtacaatgcaagagcagataactggtattaacttcagtgaagtatacaagaattcagaactgcacaggaggaataaaactttgataaaggagctaagcacgcctccagaaggttcaagtgacctatcctttccaaccgaatactcacaggctttcctcacacagtgtttggcttgcctgtggaagcaaagcatgtcatattggagaaaccctccatatactggtgtcaaatacttctacacgacagtgattgccctgttgtttggaacaatgttctggggtgtgggcagaaaaagggatagtcaacaggacctgttcaatgccattggttccatgtatgcctcggttattttcatgggagtacagaattctggttcagttcagccagttgtatcggttgagcgaacagtcttttacagggaaagggcggctcatatgtactcgccattgccgtatgccttgggacaggtcgtaatcgaactcccatacatctttgttcagtccttaatatatggcgtgctggtgtatgctatgatcgggtttgaatggacagctgacaagttcttttggtacctcttcttcatgtatttcaccctagcatactacacgttctacgggatgatggtggttggcctgactccgaactacaacgtctcctccgttgcttccacggcgttctatgccatttggaacctcttctcgggattcttaataccaagaactagaattccagtctggtggagatggttctactggatttgccccatcgcatggacgctcaacgggctggtcacttcacagtttggagatgtaaccgagacgttcagtgacggtggggtgcgtatatctgacttcgttgaggactactttgggtaccatcacgacttgctgtgggtggtcgctgtggtggtggtcgcgtttcctgtgctctttgccttgctctttggcctctcgctcaagatattcaacttccaaaagaggtaaataaaatgtgagacagcttgattaatcccaaggcgaaaatagcgcaggcgttgcggaagaaagtggggctgtattgtatgtaaatagcgtattcgttgatcagagcttctcaagctccagacaaattgtgtagctgatagaggatcttgtacctgttggtgtaaaattagccgataatgcccaatttctacgatgtgatgaagttcagcttttgcaaagttttgtacatattggcacacactggctgttcgctgcaacactccaacgatgctctgaaatgatggatgtgtttcctcacagtagaaaatatggcgaccccaatagacctaagctgtgttgatcacgatgataacacatgtagtaattagatgtccatgttgaagtgtataaaaggattggataccttctctcatcaatttaaacttttggtttgaactgatcagtgtatctactctaacatgatatcaaatccag

SEQ ID NO: 37493 - DNA, 2248 bp, Zea Mays
gtagtattctagctctacctgctttccccactcgtgctctcgccattcgctcgaaccccgaagaactggcagtggcaggttactagaggatcactactttgaactcattaaagtgtctaatgatggctgctgttttaaaaacaagtggcagtttttgtagtacacaacagcagcattttcagcaatcaagaagggatcagtttttgcatggttcttattcaaatttcaaacattgcaaaagcaagaagataataaagcctgctccactgtgtgctagagtgacttcctcgaaagtggaactagatgttaaggatccatattggaagcagaagtttcaggaagactgggaaagccggtttgatttgccaagtattactgatatatatgatctgaaaccaaggccaactacattctcactcaagaaaaacagaactcttacaggtgatgaaaatgtggatatgtggaatggttatgttaacaatgatgatcgggcacttttgaaggtgataaagtattcatcgcctacttctgctggagcagagtgtgttgatcttgactgtagctgggtggagcaatgggtgcatcgagcaggaccacgcaaggagatatactatgagccagaggaagtaaaagctgctatagttacctgtggaggtctatgtcctggtttgaatgatgtcatcagacagatagtattcaccctagagacctatggtgttaagaatattgttggaattccatttggttatcgtggatttttcgaaaagggcctcaaagaaatgccgctttcacgtggtctagtggagaatataaatcttaatggtggaagttttcttggtgtttctcgcggtggagctaaaactagtgagattgttgatagtatacaggccagaaggattgacatgctttttgtacttggtggaaatggtacccatgcaggagcaaatgctatccatgaagaggttaaggaatatgtttctattattgttttcatttatcactcagtattatgttttcctgcctatatttgacgtgttaagaagttaagtgtttgtaaatgaattatccttggattttttttggaatccttttgagcctttctcattggaagccaaaataggtgcagacacgtgtgtgcataaaaaacatgttttactcttagtttactttgtcttcttgatatatcatatcgaaggttacatcaatttatattccccacaattacagtgccgtaagagaaagctgaaggtttcagttgtagcagttccaaaaacaatcgacaatgatatacttttgatggataaaacatttggttttgatacagctgttgaagaagcccaacgagccattaattccgcatatatagaggcacgtagtgcttaccatggtattggcttggtcaaattaatgggaagaagcagcgggtttattgcaatgcacgcttccctttcaagtgggcaggtcgatgtctgcttaatacctgaggtcccgttcactctagatggagaatttggtgttttgcggcaacttgagcatttgctaaagagtaagggattttgtgtggtttgtgttgcagaagctgctggacaagatctactccaagaatcaggtgcgactgatgcatcaggaaatgtgatattgagtgacattggtgttcacatgcaacagaagattaagatgcatttcaaggacattggtgttccagctgacgtgaaatacatcgatccaacttacatggttcgtgcatgccgtgccaacgcatctgatgcaattttgtgtaccgtgctcggacaaaatgctgtccatggggcatttgctggtttcagcggcatcacttcttgcatctgcaacacgcactacgtgtaccttcccatcacggaggtcatcacagcaccgaagcgcgtgaacccgaacagcaggatgtggcatcggtgtctcacgtccactggtcagcctgacttccactgatctgccatcgtcactgcataaccaaattcgcatagtttgaggtactagatgatttacaattctttcgctgatgtgctccattcacatcgtgaggttccaagattagttaataatgctaaactgagtggacttgtctggtttgttcacgaaggtggtgttgtccattgttccgaagctctggtatttgagaaatttgcatatttaacactataaagatgtgactccacagatttgccattttcaagatgggctacgcaaaattgccacctgtttcattgtc

SEQ ID NO: 37494 - DNA, 4218 bp, Zea Mays
cagccaacgcaggcgtccaagtccaagcaaagccccgctcctgtcacagacaaatttccacgggagtatctccccccctgcttttttcttcttcccttcaccccccgcgtgcgcgctcagtccctctcgcctgtggcgacgcttgagcgaccgctgctgccgctcgacgccagatcttcgccgtgccgctccggtgacgagcaccctccagcgtaaggaggggagtcggagatgttttactcgcagttcattttggccaaaaagggtcccctcgggaccatatggattgccgcgcacttggagcggaagctgcgcaagaaccaggtcgcggacacggacatcggcgtctccgtagattctatcatattccctgatgttccaattgcacttcggttatcaagtcatcttatgttaggcgtggtcagaatctattctcggaaggtcaactacctattccatgactgcagcgaagctttgctgaagataaaacaagctttcaggtccactgctgttgatcttcctcctgaagagtcaactgctccgtatcactctataactctgcctgagacattcgatcttgatgattttgaactgccagaagctgcgtttcaaggcgacactgatcatcatgtgagcacaaaagaacagatcactttgcaagacaacccagagaaaacagggtattcaacatcccagtttggcctagatgaaagatttggtgatgccagttcatcacatattggctttgacttggaggaggaattaattctgaacaaggaccactcaattcatctccaatctgatgatggcattattattcaaggtcggtcatcagtcccttctactgatatggacattgatgataacaaaagtcaagacataatagctgaaggataccacaacatggatggtgggcattctagtcatggaaagctaggttcactgaatctgaatgcaattgacctaggaggaaacagtatccctaactggactggttacaatgtacatactcctgatttgaatgatatattattgcataatgagggtattgcagggccatcagcttcgtacattcaacctagcccatatacttgtgatgaacctgcatcaccagagttcattagtgctcaggccccagctacacctggtttaatggaagagacagttccttctagagtccatgaaagtcctgttctaagtccacagagaaaaccatcaccgtcaaccaatgatgaaactgcaaagactgacactcctgctgctccagcctcagattttcttcattcggctacaggaaatgccaatgatgttggtgctgaaaggacagaacttggattggcgaagcatgtgcaagttgagtcttctgctttctgggacgctgatgcatcgggacaacagcacacaagtgagggtttaccatcccagggtcaagctgatcacttagaacccgctgctgataaattggtcaattctgatggtatagccgcatctgttgaaactgtaactgtcaatgcaaccattaaagatgtacctttggctgtaaatgattcagagccatgtgttgatggttctactgaaccatctgtggtggagaacctggtacagattaatgggccattaattgatgcacaagattttcaacatgaagcccaagcaatgcaacaagtagtggcatctaatgatagactgaatgaactagcaacttcagaatttgctgagcctgagaaaatgctgtcagttccagattctgaattcaatcatccaattgacttggggctcataactgcggaaaagggaacaactgaatctgatggaagtaacataataggcagccttgctagcagaaaaagacatctggaagatagcttaccagctttagagagtgagaccactgaaaggttgtctagccgaccacatggtatacgaaccaacgattttgttccccatgatgatgatatactggcatctattttagtcggtagaaggacccctggattcacacttgattcaacaccactaccaccgagggaatcgtctctgaaacgccggaggttgggctcgaagatgggcacactcaagaggaaagtgcaaatagacgatgccatggtcctgcatgctgatactatacggcaacagttgatcaacactgaggatatacggcgcattcgtaaaaaagctccatgcactcgttccgaaatatggatgattgagaaaggttcactggaagatgatatattccacgagcccatcttttcctgcctatctgaggagctaaacaaattacacaatcggacatatgaggctattgtacatcctgctgtacagaacatggaactgcaaggtcaattagacatgcctgaagcaattacagaagatagcaatattgctgggtttggtgctgctactattgatggcccacttcacataccagatgggattcaatcagatgccatgctgccacgtgccaatgatgcatatggcgctacagctgcttttagtttgcaagttcctcctaacaaccaggttaacggtgcatctaatgattttgttattggcactctgtttcaaggggtgactggaccttttattggtaatgagaaagaagtggcacttgctgacagagagcgtgctcaagtaaatacactgtatagtgaccattttcaagatgtcccatctgatttgcatagtactgatgcaaacatttctagtcaagatgtgactctagataactctggccaagcttgcgctcacgcaacggacggcatgacaagggagcttactcattttgttcatagtaatgctaatattttcgagagtaatgaggtccctgcttctgagattactggggtggaatataatcaaggtgcctctggtttccctcaatcaacggaggatgaaaatgcggtggggtataatcaagatgtctctggttttcctcgaccaacggaggatgaaaatgcggtagattataatcaagatgcctctggtttttctcgaccaacagaagatgttcaagatgcctctggttttcctcgaccaacggaggatgaaaatatggtagattataatcaagatgcctctggttttcctcgaccaacagaagatgtaaatgcggtgggatataatcaagatgcctctggttttgctcgaccaacggaagatgtaaatgcggtgggatgtaatcaagatgcctctggttttcctcgatcaatgaaggatgaaaatgcggtggaatataatcaagatggctctggttttcctcgaccagctgaaaatgaaaatgatgtgtctgctatgggagataattctggcttccatgaaaacaacatgggttctcttacggatctggatatggtgaatgactatgaactgaaggaaagcaatgattttgggagtgcaattaatggtgttgatacagattttctgaactacgacgatgatgacggcggggacttcgacgacgccaacgacgatgagccaaatcccaacgagtttcagtctctcgacaacagtggttggtcttctcgcaccaggggcgttgcaagatacctcaaggctttattcgacgacgagtctggtctggagaggaagagcgttgctatcgaccatctggtgcgcgggaagacgcggaaggaagcgtcgagaatgttcttcgagaccttggtgctgacgacgaaggactacatcagcgtggaccaaccgaaccccttcgacttggtgagaataaagccaggctcaaagctgctgatgtcggaattctagaccgtccaagccagcttttacccctggcgccatacatacgtgttaccaattgtatccatcacaccgacctaccgcaccccctcctttaccccctccaaatccatttttgtttgtttgtttgtttgtttgttgttgttgttgttaagttatcctcctctgtgtagcatctcccgcgcgctagggctcgagtaggatggctgctatgttgtaccgtcggctgtatatatgatttagtgacacatgtgaagcctgccatgtaatctgatagcgctggctccctccctccctcccctccgatccactaaagctattgtataatttgtatttgcttggctaaagcccgtaggaatttgcgtattggtaacaagacgatatgatggtgtacctgttgattatgtcaggatctattgacagctttaactcagctattattggactgacctttcttgtgaacca

SEQ ID NO: 37495 - DNA, 1301 bp, Zea Mays
taagcatagaaactgcacaatttgtagtatcactatttgtattcttgatgtatagcttgcagtcttgcactaatgcactctaccacagtttttaagtaaattgctgctccatgttttcagatacaataaagggtggttttaccacaaagactaccgtgtctggctaacaagagcgcctaattccgcacctcttgtgaaaactccacttcactcaaaacatctaccactaatgtgaaggccattttttgaggtaatataatagaacctaatttgtgttgtcatttttgtgcatggctttatggaggtatcgacaacaacgcccaaaggaacccgtcgcaatttttattctaggctttagtacaattttttataattttattagtatatgcttccttgataaattatttcccaatttatctgtttgtgctaatatacatgggtgctctttttcttttgtttgtaagcatttttatggcctctcttttcatgatcttatttttccagacatacaagtacaaggattaacttttcagaacattctgcaggcactttcacatggatgtttaattaatttactactttaagaagcaatcccagatccacatccaattgtgcctccctgtattctgtatgatctatggagattatgttgtatcttcatggatccacaacagctcaacatgtagctaaaaatcagctgcatcagaaatattaagcaaatcagacatgcgggcctatcaacttatttctggtataaaaaactgagatccttaaaaaagaataaaatattttacttttgctgcagcctgctggactggaccccgttgtgttcttccgatgatcaatcagtcaatcacaaattcaaaccatacaaatcaacagctcaatatctagcgtgcttttggaagtctgttcaaggggtggagtgaggagaagatatattttgctcccacatacaagtactcttgcaattcagattcttatgctggagagactgccacatcaaagaaaaagaggagaaccccagcctggtgtgaaagaatactatggcatggagatggcactacagcagtctgtgtccttaagcaaatcacaaaacactgcactagaccagtgaaccatacttgcatagctacggcccatggctaactactattattgttatgacatcaccggtgctggggcggggcccaaatcatcgattaaagcctaggtttttgtgtgacttgggaacacaatacctcggaacctttctaaaggacgctaagttatctgttcctcgaggaaatttcctgtgacca

SEQ ID NO: 37496 - DNA, 2423 bp, Zea Mays
gttgggcccgtcccatgccccccactaaaatactccaagccgctgggccgccgtggcccacccaccgccgtcgtcaccctcccgccccgccggccgccgcagatgggccagccgcggcggcgcggctacccgcacggccgccaccaccggtgcccgcgcggcattgcgctgccggcggccggagcgggcctgctcttcctctccgtctcgctcctctccgtctcactcctctccgcgccgccgctcgcggacccgcgcccgggcctcggcacctcctcctcctctcgacggttcctccgccgccatccgacaaacggctctgacggcgaactggagggctccgagagcggcgacgcgttcagtgttccggcacgcggtggatggactgggcaggatgatctttggggatcgaagcttgctagcaacttccacggatgcagcaactctagtagtagatttcttgattctggtattaccacacaaccagatcgatacttgattgttgttacaagtggaggtctcaatcagcagagaacagggatagttgatgctgtagttgctgcacgtatattgaatgctacacttgttgttcccaaactggatcaaacatctttctggaaagattcaagaaatctttgatatggactggttcatctcatttcttgcaaaggatgtcagaattatcaaagagcctccagaaaaaggaggtaaagcaatgaaaccttataaaatgcgtgtcccccgaaaatgtactccacggtgttacttgaaccgtgtcttaccagcacttctgaagaaacatgttattcgaatgactaaatatgattatagactctcaaataagttggacactgacctgcaaaaactacgttgcagagtcaattatcattctttgagatttactgacccaatacaagaattggctgaaaagctaatacaacgaatgcgagaaaagaacagatattttattgctcttcacctgagatttgaacctgacatgcttgccttttctgggtgctattatggtggtggagaaaaggagaggagagaattagctgcaattcgcagacgatggagaaccttgcatgtacaagctgtgtgatgtgtaatcattactcgcttactgagatagaattaccttttgctaaaagttttcatattctagatacgtgacccggagaaaggaagacggcaaggcaggtgtccactaactcctgaggaggtagggttgatgctgagggcattaggctacagaagtgatgtgcacatttatgttgcttctggtgagatatatggaggggaagatacattagcatccctgaaagcgctctttcctaatttccatacaaaagaaacactatcaagccaagaggagcttgctcctttcctgaagttctcatctcgcatggctgcaatcgatttcattgtctgtgaggaaagtgatgcttttgtggctaacaacattgggaacatggccaaaattctggctgggcaaaggagatattttggacacaagagaacaatccggccaaatgctaaacagctctatcccttattcatgaagaggggaaatatgtcatgggatgcatttgcctcacaggtgcgaacaatccagaaaggatatatgggagaacccatggaaatcacaccaggaagaggcgaatttcatgcaaaccctgccgcctgtatatgtgaaaagaccagcagaaactcagcaatagtcaagtccatttctggaaataacctggaacctgtaactgacagtggaataaggaaaaccattggcattagtagaccaccatatcctgtttatactgatgaagaggcagatggatctgatacagaagaagatccggacagcagtgggagaggagaggtgattgacactgaacctgacgatgattctgcggtcagacaggaggaccctgagctagaggagatcctgtcagattagttcagttgtgcggctgtttcccccggttaagctatgctaatctgactgcatatacatgtgttgtatgtggcagcaattttatggtttgggcatcaccgaactagcttagatctgcagccgctggtgtacatagattttgtggtgtgcagctgtccaccctctttctcttagctgaatgagggcatgatcatgtttgtcacctgtgcaagccagatttgcttaccttttcttagtatcccgccatcgctcaaccctcaagcaaatgtgcaaataaaagagaataaaaaaacaagagaagttggttctccagtgccgttcaccatcttgggcattggacggcgcatatgatatggaccggaacctttgcccgacaaggcgacaagcagcttcaatccagttcctcggaggtcgcgttagagcgtgggagttcgcttgttttaataactttttaaaaggccgtgtgtcctct

SEQ ID NO: 37497 - DNA, 964 bp, Zea Mays
atggtgcgcaaggcaaaggttgagttcgatgagcagccaccggataacttcgacccgaagaacccatatgcggacccggtggctatgctggagtaccgggaacacctggtgcgggagaagtggatccagatcgagaccgccaagatcatccgggagcgcctccgctggtgctaccgcatcgaggggatcaaccaccaccagaagtgccgccacctcgtggaccagtacctagaggctacacgcggcgtgggttggggcaaagatgcccgaccgcccgagttacacgagcccaagaagatcatcgaggcggagtagctgctgcctcggcttctcgtgctgctgttcctggattggaggggatttcggtcatttgacgccatccgtcgcccgtcgtcgctactcccatgcccggcttgttcttttccttttcctgtcctgaactagcctcaatatactggagaccaagagccgacagggaatgtctggatcgtgcaggaaccttgagagagatggctgatgctgcagacctagacgaccgatgatgcattatgacctaccacattgctctcctcatcggagtgtgcttgcaactgtattactgatttgatgcaggttactattgttgtaacattggctgcatcctttgcgatctcctttttcccccctcatcacatatgtgtacagtggcctgttcaatgcttcatagaagcatataggctgatgtctttttcatcactgtgcaacttgccaccaatattccatctctgtcgagtccaacacagatagaattgtactgtcttttttcaaagaggtgcagagatcaggcacaccaaagcagcagcagcatcctattgaagaccaggattttgaagaatctataactaatcaagaagcagaccattatgattgttggtacgagagcaggagatcaggtggcacgacaaaaagtaggctgagagcgcaa

SEQ ID NO: 37498 - DNA, 236 bp, Zea Mays
gggcttcctttaccttcggaagtatttttgaaacaataagagcacattcggttgaactcctcgaaagagcagtgcttacaatatctcctgtccatagtgaagattgaaggactgagattatatctttcctacagggtaactgtctctcggatgatgaagtttataacaaaaaattgaaagcaagaacaagacaatatgctatgatagaaggggaattatataaacatggagtttgt

SEQ ID NO: 37499 - DNA, 245 bp, Zea Mays
tccgcagcaacatcacgtaccagccgtcgagcccctgctcgtgccatgcacagctcgtcgtcgtgaagctcgtcgccggaccgtctgcatccatacgtcgttcgccatccgtggaaccccgccggagctccgttgaacgcagcacgaggatcgcgtcgttccctgctcgacgccaaacccactgtccctcctctgcacggtcgaaaccccctcgacgacgttcatccctacacatgagcgaactc

SEQ ID NO: 37500 - DNA, 1698 bp, Zea Mays
gtcattcccttccctctaccagccgttttattttatttttccttcccccagcctccacgctcgcgctggacgacgaactcaggaggcggcgcggtcatgggatcctgcttctcgttggagggaggccgcagtgaaagcatagtgcccgcgcagaggtcgcagatcccggaggatgagcaggtcgagcctaccgttacgagcgagctggccatcccagtcccagaggtggcagaatcagtggtcatgttggaggcccttcgtactggcttcatcacagaccaacgtccagagaggcacattcgtgtcaggagtttcacctatgatgaggtgtgtgcggcgacacatggcttcgaagtagatcgtttcctgggacagggtgggttcggccaagtgtacaggggttttcttgaaagcaccaatcaggaggtggctataaagaggcttgatcttcaaggacaacaagggcacagggaattcgttactgaagttctgatcttgagcaatgtgcaccacccgaatcttgtaaagctcgttggacattgcactagtcatgatcagaggattttagtttatgagtatatgcctttgggttcgctaaacagtcacatccatgatcttccccctggccagcagcctcttgactggagtacaagaattaagatactgcttggtgctgctaaaggtcttgagcatttgcatcacaatctcaaccctcctgtcatcaatcgtgatgtgaaatgtgcaaacattttgctcggagcggggtaccacccgaagctgtctgacttcggcttggcaaagctaggtccaactggtgacaacacccatgtttcaacaagagttatgggtacacctggttattgcgcgccagagtacttgatgactggtaaattgacagtaaagacagatatttacagctttggtgtagttatgttggaggttctcaccggaagaatggctagagacgaaagacttcctgaatccgagcgaaaccttgtcgcatgggctctcaactttctccgcagacgggaactggacaatctgctagatccggcactgcggggtcagtgcccccaggcttgtttggagcatgccttttttgttgtttcacgctgtatcagtgaatcacccaatacgagaccatccatgcgagatgttgtcgcctctctcactgtgatctcagaattcagaaacagaaacacaaggcggttggagcgtggcgggcgcagcacaccaacaagaactcctgatcggaaccaccggggcgacgatcagggagaaggaagctgaggaatcagtgcatagcaaaacaatggtgatcttctgttgctgtagttttttatgatggtcggttactgcctgtctgggagcaaggaagttgtaatgcctgttcaaatgatatggttcaattgcagggaagtacatggtcatgcagaagatttttttccctgttagagctagtttgggaacttcattttccaaagtgattcttattttctcaagtaaaaataaactattttttcttaagaaaatagaaatctcttgtaaaaatggttcccaaactaggcactaaagtttgtagataacaggtgtaaactcttgttgtgtttgttggggctcagtcttctcagacgttctgtttgcatgttgtattattgacgaggctatgtttaaaccaatggagatggtttgtttccc

SEQ ID NO: 37501 - DNA, 1312 bp, Zea Mays
tcccgtctcgtcgtcactcggcggttcagcccgcaggccacagaggcggacctgacctggccctggccaccaccgaacgagcgactcttcgagcagacgcatcggcagacgagcagacgcatcgccgcagcaagcttcgagcgccaggcatgacgctggacaccccggccgccgtggtcctggagctgatgaccatggggcagcagtccgcggcgcacctcggggacctgctccgggccgcgtcccctgctgcagcgtctccgcaccaggagctcgcggccgagatcctccgctgctgcggccgcgtcatcgacgcgctcagggccgccgccgccgccagcgggcacaagaggaaggcggcggcggagtaccaggacgcagcagcagggggaggcgcctcgcctcctcctcctcctcctcctccggggccgccactaaagagaagggcgcgcggcggagaggcgaccagggaagtgaccagcggcacgacggtggacggcttcatctggaggaagtacgggcagaaggacatcaacggccacaagcacccgaggctctactaccgctgcgcgcacaaggaccaggggtgcgacgcgacccggcgggtgcagcggacgcgggagcagcccgcggcgtacgagatcgcctactacggggaccacacgtgcaggggcgcggccaccgcctggcagcagggagcgccggcgcccgccgtcgtcgacttcggctccaactcctggggatccgcggacaccaccagcggaggctcgccggcctcggtgccgctgggagggtggtggtccccgtcggcgtcgtccgaggtcgggttcgaggcgcatgcggccgcgcacgagtggcgcgacacggctgcggctgctcctgatccggtaatggagttcctggacggcgccttcggctgggaatccgtcctcgaggaccgctttgacttgggcggtctacatggcatcgctacgtttcagtagattgttagcagagcagcagtagatctggacatgtgttgtcgccatcgctgtagtacgtgagaacagttaggccgaccgtgcagttaatgagtgacaacccccgaccccgacctaggagggtctcaacaagatgccgtagatcacactagtaatagtattactatcatgtttcaggcagatgccagagggatcagaacaaaacaaaggtatcgcgttctaaaaatgaggaatgtgttttttattttttggaagaaaaaaaaaacttcagtactttcttccccattagaaaatggagcggagcaaaggaacaaggtgacgtactttcttcc

SEQ ID NO: 37502 - DNA, 2944 bp, Zea Mays
ggacagaaaaaatcgtagcatcgcaaacgcctacgcggccgcatgcatgcccccgacgcggccgattgggcatttggggcgaacggttgtttcggcaaggaagccgcgcctacgcccgcccgcgctcgcgcctctccaccgccgccggcgtgaacctcaaccaagcaccgcgcccgcgccggcgactgtccataaggccgtgtcctgccgtcgcgcacccctgcgtcgtacgatcgtccacgataccaagtcaggtatcagcacagactgcagcatcagacttatttggctggagaaatcagggatcatcagagtcaaaggcaacaagattctgctaccatatcagtgcaagcgaatggctgactgtttaaagacatgcctggatcttctattgtgaattcgcagttctttcatgggtggattgtcaggatcccaaactggtagaggtgggggatggaattctctgctcttctgacttcagcggggataaacatcgctgtctgcgtgctcttcttgtccctctattcgatcctcaggaagcagcctcacaacttcagcgtctactttgggaggcggcttgctgaagagaggttccagaggcaggacgattacttctcgtttgagaggctactgcctactgctggttggattgtaaaggcgtactggtgcaccgaagaagagattcgacaagttgctggcttggactctgttgtgttccttcgcctcttcattttcagcatccgtatcttctcaattacttctcttgtttgtgtatttgttgtgcttcctgttaattatcatgggaaagagatgaatcacaatcatattccggaagagtcactgaatgtttttactatagccaatatcgtcgaagaatctcgaaagctttgggtgcactgctctgctttatatgtcataacaatctcagcctgcattcttcttttccacgaatacaagtatatttcgaggaagagactagcacatgttactggatatcctccaaatcctgggctttttaccgtgcttgtccgttcgattccgaggtttgacaatgagctgcttgatgacacaatcagaaatttctttgttaactatcacggatcaagttatctgtcgcatcaaatgatctttcgcaagggacattttcagaagtttgtggatagagcagagagggcttacaggagatttgtaagggtaagactctccgtatctgagcggaatgggagatctagcatgtccaggtgtggtgtctgtggtgtaagagcttcctcatttcagctttaccgcaacaagttcatcgaggccaagaagtcagacctcactaatccggaagtagtggaagctcaaaagaactgtcccggtgccttagtgttcttcaagactcgctacgcagccgtcgtcgcctcacgggtattccagtcatcaaaccctatgctatgggtgacagatctggctcctgagccacgcgatgtgtattggtcaaacctctggatcccctacagacagatctggctccggaagctagcgacactcgcagctagtatcgttttcatgttcgtgttcatcgtccccgtcgcgtttgtccagagcatgatgcagctggagcagctcaaaaggatgttcccgagcttgacaggtctcctaaataagtccttcttcgccagagtgataacgggataccttcctagcgtcaccttgctgctgtccctgtacaccgttcccccgctgatgatgctcttctcctctatagaagggtccatctctcgcagcgggaggaagaggagcgggtgcttgaaaatcctcttcttcaacatctggaacgtcttctttgtgaacgtcctgtcgggatccgtgctcaaccagctcaacgtcttctccagacccaaggacatgccgacgatgctagctgaactagtgccgaagcaggcaacctttttcatcacgtacgtgctcacctcaggctgggcgagtctgtgctcggagatactgcaggttttcaacttggtctacaacttcttcagcaggttcgtctgctgctgccatcgccagaataaggaatacgtttactctttcccgtaccacaccgaagtgcccaaagtcctcctgttcaacctgctcggcttcacgttctcgatcatggcgcccctcatactcccctttctgctcgtgtacttctgcctcggctacttggtgtatcggaaccagattctgaacgtgtactacccaaagtacgaaatggggggcaagctgtggccggtcatgcacaacgccatcgtgttctcgctggtcctgacgcaggtgatcgcgctcggcgtcttcaccatcaagcgctcccccgtgacggcgggcttcaccatcctgctgctcgtcggcacggtcctcttcaacgagtactgccggcaccgcttctcccgcatcttcgaggcctactccgcccaggacgtgatcgagctggacagggacgacgagcagtccgggaggatgcaggagatccaccagcatctgctggacgcctacagccagaccccgccgggggagggatcctccaggggcggcagccaggtgcccatcgagctcatcatggaggaccccgcgcaggaggcgtcggagtccagccaggagctctgcgacaccgtgcaggaggtgtccggggccatccacgaccacgaccacgtcgtcgaggacaaggcgcattccgtgtagactagatggtctggactctctgcgggtgcgtacgcatgtagatgctgtacagcgcgcatagcagactcgaaacccggaagcaaatacttacatttataaatctacgtgtatagaaacaacagtctaatctattggcaatcgggtactttggcccggcccaacacttcactctctgtccattggattggcacatcggaccgcccatcttaattctgatcttttatatttagttatgaaaacg

SEQ ID NO: 37503 - DNA, 1726 bp, Zea Mays
gaagcctagaacagaccgctgctcgatggcgcctgctgctaggacgcgagtgtgcttggtcgcgctggtggtggctctagcgtttctcttcctcttggacggcggtgtgcatgccgcgtcgtcggcggcagagcagcggcggcgacaggttcggagcctgctcaggcgtctcaacaagcccgctgtcgcgaccatcgagagcccagatggagataccatagactgtgtggacatctcgaaacagcctgcgttcgaccatccttccctcaagaaccataccattcagatgatgccctcctgccacccacaacaaggcggcctctataacaagtcaaacgacgttgcgcacagtgctttgacgcaaacatggcatcagaatggcaagtgcccagagaacacagtgccaatccggaggaccagagaagaggacgtcctcgacatcgtccagagatatggcagaaagaagtggccatcgtcttggagcaacgaccctaaccgttatgacgacgacgtcccggacgcagcgagcgtactaagaggccaccagcatgcaatagcatctgcaccgggggatgacaactactatggtacccaagcaaccttcaacctgtgggaaccaacggttgagaggaaccaaggattcagtttggcccagctgtggattaccagtggatcctacgcaaacaacgacctcaatactatagaagcagggtggcaggtttacccaggtctgtacaaggatagccatacaagactcttcgtctactggactcgggatgcgtacaacaaaacaggatgttacaacctaatatgctcagggtttgtacagacaagcaaccagatcgccatcggcgctagcaactcctatttttcccctgtctccatctatggtggctcacagtatgacatcactattttagtttggaaggtaataaacacgacccaaagcaaggcaattggtggttgcaagtaggaggccaggatttgggctactggccatcatcgatcttctctaagttgtcaggcagcgcagcctctgtcgactggggaggtgaagtggcatcgtcgccggatgccggccaaacatccacacagatgggtagcggacacttccctgatgaaggtttcagcaaggccagctacatcaagaacatccaattggtagattcgaccaacagtctcaaatcggctagtggtgtgaagttgacagctaagtggcccatgtgctacaatgttcaaaacggtactagtgctgattggggcacttacatcttctatggaggacccgggaagaaccctaactgcccatagtaaaaattcaactggttgccgcgcccaaacgtctcattgatacaggaatagatctacgtacttgtgaaatgcattatgtcctagtcggtgccgaataattataattaggatcatgtcaatggatgtcgtagtatagtatgcattttcactcgtgttgcaaaggtaaattgatacatatacgtctacattgtagctgtaaacaaaaatggatgtttgaaggatataaccaccaccagagaatgggacatcaataccatctggaaccgattacagtatcggattccaaacgttgctaggcaaccggaactaaaggtgtcaatctttaatcccatttgcattgcctagtacaaaggagtgacctttggtaccggttcttggctcaaaccggtattaaaaggtctcaccttagtatcgg

SEQ ID NO: 37504 - DNA, 2191 bp, Zea Mays
cacagcatggcagctagcaatctatccacctcttggccttttgtgtgtgtacgtctgcatgggctaataaacacacatgcatatacgcaatcattgttgttagctaggggtcatccatggactttgtttattcattgtttttgggagtgggtgccgagaaagatagatggtgagcagataatatcagactgagccatgattttagcctgcactatcagatatgattgtgtgtgtacctatactcccaaagagagaaaaggcatgggaaacaggagcacaaaaagtgatcggcatgcagggtgttaggaaagtgagaaaccatcagcaggcagcaacagcaacgagcgtctgataaaagtcatacactggaccagcagcagcagcagcttgttgatgcagctagctgcttaaagtagtgacaaactgacaacaacaaaagtagggctagaaaagctactacctggtgagtgtcccggggaatagcatgctcaacatcgtgacagttcggtgtggacactgcgcaaatctactgtcagtgaacctgagagcactgatgcactcactcccagaacaagatcatcagctccaggagaacatcaaggtccatggcatcaacggcactttgcacgatgatcatcagtactgcggccatttggatcagctcggttcttcttcgtcgtcaaggttccggcggcttccagtgatgtgttcgccacagaacgagcagcacctgctgcaggagcaaacacttaacaacaatgctcgtcctccagagaagaggcagcgggttccgtcggcgtataacagattcatcaaggaagagatacgcaggatcaaagcgaacaaccccgacattaaccacagggaagccttcagcacggcagccaagaattgggcacattatccaaacatccatttcggtttagacgactccgggcgagagggcaagaagaagctcgtggatcatgaggcggcggcgtctgtcgtcgcagtcgcagcagcaccgactgctgctaaaaagatccagggtttctactgatggtagcagatagatgtgtagattgattgatacatcatcgaccgggtggaagaattgataccacaaaaactgctttatatatatgtactgtgagtaaacagttaaaattaaacttgtgagatgtaccgtacatatgaagagctagctagtagtgagtcataaagtgggaaagtgaagcatatatagtcgtaaaaacaatcacatgaattgctattaggcaccatatatatgcacttaattatattggttgaggagacctaataaatcatttgacctaccatgcatattattgcagtgcgaagcaccatatatatatatgcagtggcagcatgcagaaaccaaaaaagtgtataggtacagtaagtaccagcagctaggctcagggctgaccggccaggcacaaggcgacatggcattattattaacgtatgtacgccgggcgtctctggacccctgcaggaatgcgcgcttgcttcagcccgggcgggggtggggggcgacgtacactgcattctggtctcatgaattctcgacaagataccatatctatgcagacgcggaattaaaacccggcaggccctctcacatgcagcagccaagcgccttcgcagtgaattggtattgcagttgtttgcggggagtggacgagcgccccttaacactgaagcaatgctgtgaccctgcttttcaagctgccaattttcgaagacattcaaaatattgtcgggttgatcaagatcagcttccctatatgatataaatttttatgaactttaacagtgttttgttaaaggatctaaaaattttatcagggttggctgactccaataataaaccccctaaatccgtccctgcattcgactcagtgcactagctaggactagctccttaacataatcaaacggatgatgattttctgttatgaaacttgtattgcatatttacttgcttgtatctgtatatgtatattgttgttaggctgttcgcaccggatcacgtaaaatagagaatttgtaatttagattatattctttacatagtaaagtttgaaatagtgaatgagcgagataggatagctgcttataataatacaagtcttattaataacacgtacggtaccaaagctaggttatagggttagttttggctttc

SEQ ID NO: 37505 - DNA, 3183 bp, Zea Mays
tccgccgcgggcctcctccagtcctcttcctcaccccgacgactccgcctcaaatccaatcccactcccacctagcggtccggctggcctcgcctcctcctcctcgcttctctcagcctcaggacgacgcctgcctaggcttccaccgctgatctgaccccgaaacctcgttcccttgtccgcttcctgccgtctcagtcgtcgatacttgtcccccaaaaccccgggctccggccgatctctgcgcgttgaccggggcgccgctgatggtggcgaggatgatgcggtggccgcggccgccggcggcgcgcaagttccgcgtgcggctgttggtgcggcgtgcggaggggctcccgcctccttcaccttcgccttcgccgtcgccctcgcccgcgacagcggcctcgccggagcgcgagccgccgggcgccgcgcagcccagggccgccgtcgccgcggaggtgaggtggaaggggcccagggcctccgcgctcggctcgctgcggcgtgccgcggtcaggcgcaaccgcacacgggaggacgccggcgcggcgtgggaggaggagttcgagagcgtcgtcaccctcgcggccgcgtcgcagcgggagggcgccgcgttccacccatgggagctcgccttctgcgtcttcagcgatattaacaaaggcccaaagaacaaaccatcaattctgggaactgcttctctcaatctagcagattatgcattgacggctggagagacaattgagataattcttccgttgtctatacctggtggtgcacctgaacgagcctcatcccttcatctcactctgagtatggttgaattaagagcttttcaagaaacatctgatgcatcacagcgatctgctgcaaccttgccattgtccccatcatctggcgattcttttcctggaggaaaagatgaggtttcggttattaaagcagggttgaggaaggtaaaaattctcacagatctggtgtcgacacgaaggcctaagaagacttgccaggcaggtggcgaagataagttttgtgttaacagtgatggtgctgaatatccatgtgatactgagtctcttgatgacgatctagatgacagagtagaggaagatgaatttggagattcaactatcaggaagtctttcagttatgggtctctgcaatctgtcaactatgttggtggcctagtttatgcccatgcaaagattgatggggagcatgaggactggatatattatagtaaccgaaaaactgatgtcggtttccaagtagagaaagtattgccatcaaccacagagaatgggttgctaactgctaagcgcagtatacttccttggagaaagaggaaactgagtttacggtcgctgaaggctaaaggtgaacctctgttgaaaaaggcatatggggaagagggaggtgatgatattgacaatgatcgacgcttgctaacatcatctgatgaatctgtttcagagggatcaagaggagatggatcagcaaatactatggtgtcagaatttggtgatgacaattttgtcattggaaattgggagttgaaggagataattagccgcgatggccgtatgaagctttcatcccagatgttctttgcatcaatagaccagagaagtgagcgagcagctggggagagtgcatgtacagcacttgtggctgttattgcagactggttccaagcaaatcagaatatcatgcctatccagtcacagtttgacagccttatccgtgaaggatcactagagtggagaaacctttgtgagaatgagacgtatagagagcgttttcctgacaagcactttgatcttgaaactgtccttcatgccaagattcgcccgctgacagtttcccccagcaaatcttttatcggattcttccagcccgaaggcgatgatgacatgagtggttttgacttccttaatggtgccatgtcatttgacaacatctgggatgagattgcccaggcggcagagttctcatccagtgatagccctaacttatacatagtaagttggaatgaccacttttttctactcaaggttgagcatgatgcatattacattatcgatacccttggagaaaggctccatgaagggtgcagccaggcatacattttgaagttcgacaagaatacgacaattcacaaggtacctggggaaaagaaatcttgtagccccgactcaagtggaccaatgaaggattcttcaggttctgagagctctacgactgaccaggacagtgggaatgatactgaagaggaggtgcttgtgtcgaagggcaaagaatcatgtaaagagtacatcaagagtttcttggcagccataccaatccgggaactacaggcggacatcaagaaaggactgatggcatcaaccccattgcaccaccgcctccagattgagttccagtacacccagtcgtccccaaaagagactgcatcagccactcagcttcttaccatggaggccccctttgagttctcatggcctgaggcaccgccaacaatggaagtcacactaacatctgccgtctctgttgtgtagcttgtcaccctggtggcgaagaacccaaagacatgagacaacggcctgccctgatgttcggcatggagaacccttttttccttggttccctgcatggagggggagcctagatgaagattttggttcttctgtttgtactaatttgtttaatatgaactgactactacgggttattcctcctgggcgtaggagcgttctacctgcttttttttagagagaatgcgcccacgagttgctgacaatatccacttcttttcgggattgacatgtgagagagagatggggctgtgatgcgtcaagatggttctatgcatagcttccgactcctgatcagcacagcagcactcctcctttccagtttcagttcctgaatcccaaacttcggtgtaactcttttctatagcgagcagcgaaaaccactaggagttcattttatacggaaaacaaaatggtgattttttttaaaaaaaagaatgctctgtacaacatacacaggtcgttcatcatggctgctcatacaacgtctttgcttagaacatggttgtatatcttgaatgtgaagtgagcatcattgcacgcgtccccatgatgcacgcgttggaatgaaaataccatcttcgac

SEQ ID NO: 37506 - DNA, 2505 bp, Zea Mays
cagagctcaaagaagcggcagcataggaagattactgatacgaaaagaaaatgaagaaggaagtagaagaggtggagggccacggttatggcgccgccactcccatgacgccgccgccgtcgtcgctcggtcttccttccccctcggtctcgacattgacctccgccgctgccgctagggttttggcgcggccaatgcccgcctcggtcccaagcttgcgggcgccttcccccttcgtgcgggccatgcgcacccgcgttgatccgccgccgccacagccgctcacggcccctcctcttcttcgtcctcgtccggtgctaccgccgccgccgataccagagaagcagcggcgggggcgcccgcgcaactgcgaccgactcctcccgccgccgccgggcttccaccttgctccgtccgcacgggcaccgctgcctgcccgcggccaaccttcatctagggggcatccctttcgcggtcaattcggtgggctccagttgcacgtgctcaaaatacatgtgggagaggatatcgtatcaaagattgtgcaggtctcgaaaataactgggaaggctgtctgtgttctctcagtgtttggggccgttcaggattgctatctgctccactctgctgtcatcttaaatcacaagaaatcattcatgtgtttggatccattttgacatctgatagtcctggatttgggtgcttatctgcgactcttgcttgtggtgattgttctcttgtcggtggcattgcagttggacctctcatagctgcaacaccggtgcaggcaattgttgggagcttccacaatgatgctttccaggcaaacaagaaacctaagctcgttgcatgttaccccagttctcatgttaccgctggcactgggggcatgtgttgcgtcaattctaagattaccattggcagtttgagaaaacatgataccagttcttggtttcccattggcaatggaagcacaactcattccaattctcaagttactgttgatgatggaagcacaaatcaccccaattctcaggttactgttggcagtggaaacacacatcatcctaattcacaggtgaccattgacagtaggagcatgtgttgcctcagttttgaggctggcattggtagttggagtaaagatgatccaagttcttggtttcccattggcactgggagtacagatcactccaattttcaagttactgttggcactgggagcacacaataccccagctcccaggttcccactggcattgggagtgcatatcaatctgattttcatgtcacattgggtgacagaagcgcaagtatccccgattctcaggctactgttcactatgggattaaacatcaacccaattcctgtgtcagtgttggcaacgggagcacaggtagcgtcaattctcaggatattgttggacacggaagcacatataaccctgaatctctgcctgccattggcgacgggagcatgcataacaccaattttgaggtcgtggtaggagttgggagcacagacaagggcaattcacaggacacccttgttgatgggaacctgaatcgccccagttctatggtttctgttgacaacggaagctcctgttaccccaattgtaaggatgctgttggcgatacgtgtgctccatcctctgaaggctctaatccagaatatgcatcctgcactgtagtagtggaacagagtagattgagcagagacagatgtgaatctctcgcaagtgatggcttcttaacgtagcaacactttaggtgattgtttatgttttttctctgaagacagtagccaagtacatgtccttggacagcgagggtgactccagcagttcatccaaagtttatccataagcactgttatgcactgaagactgcactgttcgcagagtggagtttgaatatagctatgtgtatgggtaagctgttggagatagtgttatgcttttgtggatgaccgccaaagtatccttttgggatggtaggaagttttgaagtccagcagtagttgcgttctttgcagggacatggcagtgttgagaattgtggtgcagtctgttgtagctttagttgctaacagtgttggatttgtgctgaggtctgtcagatgagaaatcctaacatagcagaagggttcgttgagctttcaatatatatgatactgatgagattttatgaggcaagttgtcgggtatatctcgtgcagtaaagcagaatcaaggctccactgcaacagaaactgatcatgtgagtgtatgatagatgtcatggcgttagaccaacgatttgaaattgaaatgttgctaccatgtagaaagatgtgatatgtttagctagatggtctccagcagctcttctattacattatctattctacctcctatttcaaacttcaatctatctgcagttgcacgaccataaatacgatctgtcaaacttcgctctatctacagttgcacgaccataaacacgatctgctggactggatac

SEQ ID NO: 37507 - DNA, 1895 bp, Zea Mays
tttccacacttggtcgccgtcttctccccctttcgctttcgctcttcctctccagcccacaagactccgcggcgccgcagacatgcgcccgcttatccgaaccgctcgctgctggctcctccgcgcgcgtgttcgcgccatggccacgcttcctatggcgtcccccgccgccgccatcccctcctccgccacccgccccgtcgcctccccttcttcgcgttctcaccgccccctcacccgcttcttctccgtcgcgccggcgccggtcggggcgaaagggctccgagcggcggcctccgccgttgaggtgggcggcgtaaagatcgcgcgcgaggatgttgtgaaagaagatgacccaacaaacaacgtgccagacactatctttgcgaagattggcctgcagctgcacaggagggagaaccatccccttgggattctgaagaacacaatttatgattactttgacaagaacttcactggacagtttgacaagtttgatgacctttgcccccttgtttctgtcaagcagaattttgatgatgtcttggtcccttctgaccatgtaagccggagttacaatgacacatattatgttgatgatcaaacagtcttaaggtgtcataccagtgctcatcaagctgagctgctaagggatggacgtacacactttcttgtaactggagatgtttaccgtagggattccattgattcaactcactatcctgtcttccatcagggttccgtgtgttctctcctgatgaatggtcaggttctggcttggatgggacagcatatgcagctgcagaactcaagaaaacactggaaggattggcaagacatctatttggtgctgtagagatgcgatgggttgacacatacttcccatttaccaacccatcctttgagctcgaaatatattttcaggatgattggttagaggttttgggctgtggagttaccgagcaggaaattttgaaaagaaatggcaggagagatcatgtggcatgggcctttggattgggattggagcgtcttgcgatggtccttttcgacattccagatattcgactattctggtcgaatgataaacggttcacgtcccagttctcagaaggcaagcttggtgtcaagttcaagccattttcaaagtttcctccttgttacaaagatatgagtttctggatcaatggtgcatttacagaaaacaacttatgtgaggttgtcagaggaatagccggggatcttgttgaggaggtaaaacttattgataatttcaccaacaagaaaggcatgacaagtcattgctacagaatagcatataggtcaatggaacgttcgctcacagacgaggagattaacaatcttcagttgaatgtcagggaagctgtgaaagataaattgaaagtagagttgagatagcagcagctaattatgctgtcatagcatggactaaattttgcctgtctttatgtaaatcaattaaaaaggattttttatctatcgagaaaatgcgccatttgttcctggcattgatcacgttctcttctgtttagggaagagaaaaggtccctgttccatttgggaatcatatcttgtaattcataaggctttgtttggttgcacagggatcaaaggagattgaggaggattaaatccctctctattcaattttgactaggtagagatttaatcccctctaacctccttttaatccccttgtaaccgaacaagccctaagatgatgagctgtacacttctcactattttggaggacatgtggtttgggaattcatgtttggcctttcaattcaattttggccgttgtacattatttgtaacgaacaagtaaaagcactctgtatataaagtctaggatggttcaaatctgaaattaa

SEQ ID NO: 37508 - DNA, 3568 bp, Zea Mays
ttcctcgcctcgcctcgcatctgcaagatattagaatcccgcctgcgtcctccgcctgaacgcagagccttctattgcggcgccggcgccggcgccacgacccttctccgccagtccccactagagggcttagaactgcgtggaccacccggcgcctcttggcctctctcgctccgtccttgcgggcgcgacgacggcctccgacagctccgcaaagtcatccaagcctggaacagttgcttgtaggaggtggatgggatattctacacagtctggtggggagtaatgaatggttcatggcacagcctgctatctcagtttctgatagtagggccattctgctgctatgtctacatgttttttttatgtgtcttcatgtgctgggaagatgaattggtaggagactgacttgttttcatgaactaggaagttggacaagtagtaggccgacatgcctttatccaaagatcttttgtctttcatttgtgttagaaactagctacatggtcgttgcttgagatgttaatattactagcatgtcacacaatgttcataatggatatctcgatcaatcgtatgtttatcttttacagtttgtgtgcctcgatcagggactgacgacagttgtttgaagccataattgtctgtttatagtttctagcaaggtccaaaaatttacccctgttctatgattcagacttcagaggctggcgtagccatggcacacttaaattcctggactaccgtgtatacatgtttttttctcacttcctcctgtgctggttcgtagcatttttacttggaaacgttttctaggatccagattatcgtagctagttagctttagttgtttcaattattttcagttcaattgttcgactgcaactggaatggtctagtagtatgcgcatgttgattcaatagcaggaaaataaacgccttgcatcttgggccagattggagttttcagcatttgtttaagaaactgttggagtactgtatacactataatttacctctaaatttttttagccttcctctaataattatttttgggggatatttttagctttctcttagagttgctctaaatggactaaatgcagaaaagtatccaaaaaccaccttattcacatatattgaattgcaagaacaacctatccctataattatttgtaaactgaaaactcacctttctcactatcaaacgtcttaacctcacgtgcaggatgcgcgtcagctactggttgctgtgtcgaagataacaaattttcaaagctgtcgacctccagggatccaaaaatctccctcccaggtggtgctgcctgctgcgtgcaggggagtgagcgtggctgcgtgggcaccctcggggtcggatctgaagaggaagaaggctgtcgcgctgacctcgactcgatgacggccagaagataaccgacgacatcggaccgcatccgcgcctcctcgagaagggcgccaacgtcatccttgctagccacctgaattacagatgcgattgtgacttgcatcattgcatgccgccgccatggtctcgccctcccatcccagcgtgggcggctgccaactccctcttccgccgccaccgccgcctgcagcccctcctcttcccggccgtctctcactgcgaccacctccgcgttctgtcccactgcctcgtgtccggcctcgcccgcaaccccttcgttgcctcccgccttctcctcgcatcctccagcctctccctccccttctccctcaccctcctcgcctatctcccggcctcctcgctctcatcgttctccttcaactcgctcatccgcgcctccccaccgcgcctcgcgctccgcctgtttgacgaaatgcgcagccgaggagtccccacggacccctacaccttaccgctcctgatcagcgcctgttcctgcagcggttttacactgtgccagtctctgcacgggcagggcttccgtcttggctacaattgccacgtattcacccagacggcgctgttgaacgcgtacctcaagtgcgggtcggtggccaccgcttgcagggtgttcgaggaaatgccggtgaaggatgtggttgcgtggaccagcatggtgtctggttatgtagactccaggatgtacttaaaagccgtcgaggtatttaacgagatgagaggtgctgatgatcttgtgtggcctaatgaggccacagtggtgtcacttgccactgcctgtgctggtctgggctcgctggagcatgcaaagggtctgcattcgtatgtggagaaggctgggttggaggacgagttaattgtcaggaatgcattggttgacatgtatgggaagtgtggctgcattgagtcggcacatagattgttttgtttgatgcgtgagaaggacttgcattcatggacaacaatgatttcagggctgtcttctcatggacgcggcgaagaagcggttggtttgttcttcagcatgtgcgaggagggagtattaccagattcgaccacttttattgtggttctgtctgcctgtagccatgctggactagtagatgaggggatacatatcttcaattccatggagagtgagcacaatgtcccccgggacaccaagcactatggttgcatggtggatcttttcagcagagcagggcttgttcgccgtgcttatgaattcattagcatgatgcctttcgaaccaaacttggagattcttggggccctgctgagtgcatgcagtatcaataatgaactggagattggggagctcgtgctcaataagattgacatggtctgctcctacaaaggaggtgctggtgtgcttctgtcaaatatatatgctaaccaaaatctgtggcatgaagtggataccattagaaggaagataaggactgaagcaattgtcaggaagccacctggtcatagtttgattgcagcagaagtttcttccatgactttctgattggtaattgcatagatttgcttttaatgaagctgtggtcctgattttgcgaaggaggcttggggtgtttgctttcaacaatccctgtaggccagtcgaaatggaaggtgttatgaggagggtgatcacttcggacaacatctgctttgtaaatgctgcggtgcgattgccaagaagctggctgagcttacaacgctaacggatgtcacaaccatcgtcggctaggctggctgacaagatgagccacatttggaccggtggtggcgcgagcgagcttggagctcttggaaggcaaggcgctaccaggtgtccttgtccttttgtttcggaccatggtgtaacactgcaaagcttatggtttgtattggacttgggataggcttgccgtcgagttttggtagatgagtggtgaataagcttgatctataccactgttaccccctcacctaaaagaactatacaactgctgtcgttacctctcgttggctaccatggtgcactgccatcacttggatgacaaaatcgtcgccatgcactgattcaatgcaatttattccatgcccattaatcccatgccctcgtttaaattgttataattttgattattccgg

SEQ ID NO: 37509 - DNA, 1734 bp, Zea Mays
cggcgcacgtcacgaccgggaaagggattcccaaatccctaccgcgtctcgctcgcctacgccaaccagaatggcagaatccaacaagcggcagagcgccccaaacaaaacccaactcatttttttttcccagctcgcggaacgggcggcctcgttgcaacttgcagagacccagtcctctcgctttctcaccgcgattcgcctcgcttccatccgattcgattcgggagctagaggagagagaggagaggagaggcagtgatgccgctggctgagtcgcccccgtggcgccgcaaggccacagatttcttctccacgtccagtgtcaagctgaagcaggcaggccaatcggccggggataatatagttgatgttgctgggaaggttgggtccgtggtgaagagtcggtgggctgtcttccaagaggctaggcagcagcagcagcagcagcaacgtccgccgcatgagacagtgcaagagcgtatcatcactgctgctgcctccactggtttgcttttcaggaaaggcatttcagagacaaaggagaaggttgcagtgggaaaggtcaaagttgaagaggctgctaaaaaaactgcagataaaagcaagagtatcttgaacaatattgaacgctggcagaagggagtcgcaagcactgatgtgtttggtgttcctattgaagctactgtacaacgagagcaatctgatagagcggtgcccctggtgcttgtgagatgtgcggactacctggttatatcaggtttgaataatgagtacttattcaaatctgaaggtgacaaaaaagttcttcagcagttagtttctctttacaatgaagactcgggtgcatctttacttgaaggtgtaaatcctattgatgtaggtgcactggtgaagtgctaccttgccagtatcccggagccacttactacattttcgctttatgatgagcttcgagctgcgagggttagcattcctgatcttaggaacatattgaagaagcttccaaatgtgaactacatgacgctagagtttgttacagcgttgctgctgcgagtcagccgtaaatcatcacttaacaagatggactcccgcagccttgctgtggaatttgcgcctttgatcatgtggcggcaaggtgacactggcacagatttgcgtaaccacctcaagtttaccctgaaaccgcctccaaaaattgtggatacaacatcaaatgctgccacatgggacctgttagatgaggatgacgaggatgcttcatcccagatccccttagacgatgcttcaccaccagactacagctccattgaggttatccagtgtctgatcgagcatcacaatgccatcttcaccgacgcaaatgaaaccgtgtggagatgatcggcatctcctctagatctctctggtgttagatcgtgctattgtacaagttccaggtaggaaggtgggaaggtggattagcgctcgctattgttagggataagcattttggccggaatatttttgaagtaggtttgtatatacactagtgttaactgttaattctccacgggactagaaccgggtcatgccatatcaataaaaatatatttggatggatgtaaacgaaatgtgttgtttccatcattgattgtattcagatcatataataataacaaagcctttgtccccagttgggctagactaaagttgaaatccaataaaagccacaaattatggtttagtcatata

SEQ ID NO: 37510 - DNA, 2441 bp, Zea Mays
cctcgacctcacccccgcccgcggaaatctcgcccgcgagatccctctgcccacacaccgccccctctgctctccgtcgatggaagggcgccattaacacaccgcgatcctcgctaccgcccccacgaggccataccatgccctcgccccctcccagatcttcgaagaggccgccaccccgcccctgttcttggcccctcgtcggcgtcggcctcatcgcggcacgggctgcactccttcgccccgctcacggccgcggtgcttggccacctctgggcctccggggtggcggtgctcccgggcctgacagagctagagttggtgcgcaccaaggctgagatgtggtttgcgttcccgcccgacctccgtgccgtcctcgccgcgggcctgccgtcggggcccgggttcccggactggcagtcgcgcgtggggctgcggtccgcattcgacctgcccatcgcggcggcgtcgctacagatcgcgcggggcgagctgtggccgcgctgctagggcgtgcgccccgccgaccccaaccacgcgctatggtctgcttcatctatggcgtggttcctgttttgcctgcctcttgctcctatttgaccaccatgcgcgccgcgaggaccaccactaggtggagcgtgtctccgtggtcttcttcaccgaccacgaggctgctgagaccctaggggggctcgacctggacatcatcgcagtgctccccaccgtcaggtgccatcgtcggtcgaggtccgtgactaagtgtgacgtgtacctgggcgagttcgcgcacagggagcggctcaagcagttgtctctcttccagatcccctacctcctctttgttccctcggcttagccaccaccttggccggtgctccttgcacgtcgggataggaggatgccgaccaagttctagatgaagagcaactgatttgcttcccttggatggattccactgttgagccattcaaaatttgagatgcggattaatttttacaattcatgttttcagatttaccttccaattttcttagtaataataataatgtataggtagtgcaccatgttttgattctaatctatcttgggtcacctgttttataccgaggtaacacctgttttataccgagataattagtatgtattctgagcttcaatcattgttctttatggtgagattcaatgtctccagttaattcattttgtaaattttaggttacagaatgtctctcgagtgtgctagagatgctttgctgcaaaagaccatggacaacaaagaaaatacaagtgaattattttcccgatctcgtgataagctcagagttgatctcatgaatatttctatgactactcttagttgaaaaatactttcccaagacaaggagtactttactaaacttgtgattgatgttgtcttgaggcttaaggtgtacaaatggtttaatgaaagttggttatcatttacattgaactatgatatcttcatctataaaattttactcttcaaaaaggtagcacccacttggaatctattgaaattctgaagatacatggagaatctcttaaggactgggatgtgccaactgccgagacttgcacacgtcacaaattaaagctgtttgcattgccggctaaccaagctccagggtataaacttcataattagacattctagatcttagttggccgacttgatcataagccactacccaaagcaaaaaaaagtatattattgaagatgcaactctcccctatatttgagagaagatgaaggatatatcagtgtgtttggtaccctgtagctcctcgtcgacctggtgcaacagcttaagctcaggaagaatgctttacaaatccgaatataagttcagtacgatagtgcaaatagagagcatcagcactaaagaagatagggagagttcaatgcatgatgtttgttttgttgacactggaagaggcgactaattgaggcggttgtcattgccaccggtgtgcacacattctttgtcaaggccgcatatcttgtcgattcaacaaaccaagttggtcattttcagaagctgttcatgctatcggtttggaaagaacatgtggaaagccaatctcggatcttgcttccttcagggattgtctccatcctcttgatagcgatctatattggttatttccgaagaagaatcaagaagcaattcaacattcatgcaagtgtggtaccagattgagatatgtctgttagtttgtaacaatataaacttgttagttatgtgtcagagaaaacatagtaacaatgatttgtgctctatttctacccgtcattgtgtcctatctcaatggtgacttctttgtacacaactgtgtggtctctctatgtcctaataaatacatgcatcatcaatgaacttaatggatattgtcaatacagtgttctacaattgtcgctg

SEQ ID NO: 37511 - DNA, 1523 bp, Zea Mays
tggctgtagaaaaatatcaaccaggtgcagtgtatctgctgaacctgtgaatctgagtggtatgtgtgcatgtgagccacatagataagttcatgtattgctggcactctaggaaacactctccactgcatgctgaacatgtgtagggacaccttgcccatattcaggtacttatagggcatggatatgggaagcttccttactgtccttgagctctggattccctgcataagtaaggtggtccttgtgccatcaagatggtgtaacttcctctccccagtctctagccttgatctgaactagatctgagcacgccagccctctgcgtggtaaccattgtccacatcacagtggccaggtaatctcaagagctttctcagctgtgtggtatatgttccatgctctaaatcaatcagtgaagctcacaccatttactatttgaactctaccactgtatgttgctgggaactaggtgttaaattcactcaaaaataggctgtcagtttttttggttcccagatttagtgcagaaagctgaaactatattctaatgtgttgagctccactttggtgcttcataaaaattgttctgaatgttttcaacctaggggtactataccaaagtagtagagctatatctaaggaataactttggtaatgtgagcttggtttgttgctgtgtaaaaactggagaaaaggttagctaaagttggactgtcaggctgaatacaactgaattttttttattcagttctgtgaactgaattgcagcagtatgcatagtttggaattcatttgtgactgattcatggggttttggattaaagtttacatagcaaaactggagaccatagtaaagagagtaagttttgtaaagtgtggtggacttggttccacataaatttggaaataaaagtggccaaaaggtggactgtcaggtgttaggattcagacttagaataatatttgtctgaatttgtgtgtttattcagttttgggtccttgtggtaattaatcccagaagaattagggtaagaatgctatagcaaagtaaaagaccatgtaaaggagagcaagtctcatgcaaagtgttggcttgctactttgtagaatttggagaaaaaggagtgacaaaactctctgtcagacctagtaatgtgttgtttcagattgggaaaatggaatttccgtgtgtttgctcaactttaatgcaccctaacgcttggtatgtatggttataagctaaagaccttacagaagagatttgtagctgtgttgggtgaaaaagtttcttacagagaaataagtttggagctgtataaaatttagaataaaatgtgcctaagtttcttctgtcagtctgtgtgagatgtctgtttcagaaaactgaaaacaagtttagtggaaggtggctgaattttggtcaccttaacttgtagtacatgcagtttggatccttgcttaaggcataaatgaagcacttggttggttatagaggcaaggttttctagtttggttggtga

SEQ ID NO: 37512 - DNA, 543 bp, Zea Mays
ttttcttttgcccatggataatctccaccctgcgtagctaggctctatgtgttggcgtggatttactggaggaagccacgactgcatttagagttcatagctgtccttgctgcaagttcaagcatccaacccctgtgatcttttccctgcctatataaagagcaactggggagggaaaggtagaaacccaaccagtgatccttagttcaccatcaaccatgttgagcagccatgattagtagtactacacccccaaatcataccctagacacacccaagttccatcgatcaaggcaccaaacttatttgatgaccaccccggcaacacctcggcttcacgtggccagacgactgtgaaaacgaagaagagagtgaagtgactgaagagaagacaccagcacctttggaatctcaggcagggacttggctctacttcgacatctgcgggtccgagcctgactcacctactaacgaaggcaagccccggtgcatgcaaccctttccttgtgtttttaaataattttcgcacactttaagtctaat

SEQ ID NO: 37513 - DNA, 1926 bp, Zea Mays
ggtggtttatcccgtggttcggccaagtccaacacttgcctactccatgttgtggcgtcccaatggacgagggttgcaatcaacccctttcaagcggtccaaaaacccacttgaataccacggtgttttgctttcactttactatatcccgcttgcgaggaatctccacaacttggagcctctcgcccttacactttgaagttcacaaagaagcacggagtaagggagggatgagcaacacacacaagacacgaaatcagagtaccaacacgcacacaagtcgcaacaagagctcacaacacaacttagcgagttcacaactcaaatggagctctaattgctatcgcaaagaatcaaatgcgcagaatcgaagtcttggtgcttaggaatgcttagagaatgcttggtgttctcctccatgctcctaggggtcccttttatagccctaaggcaactaggagccgttgagtgcattccaggaaggcaattcttgccttctgtcgcctggcgcaccggacagtccggtgcaccaccggacactgtccggtgcggatctccttccttatttggcgaagccgaccgttggcgctttggagccattggcgcatcggacactgtccggtgcacaccggatagtccggtgcccccttccgaccgttggctcggccacgtgtctcgcgcggatcgcgcgaccgaccgttggcccggccgaccgttggctcaccggacagtccggtgcacaccggacagtccagtgaattatagtcgtacgccgttaatcacttcccgagagcagcaagttcgcctgagccagcctggcgcaccggacactgtccggtgcacccagacagagctgactttggcataacaaagccatctttaatttcaacttgatttttcctgtttccagcacttagacacaatacattagtctctaaaacaatgtactaagtctgagaaacatacctttattcttgatttgtactttgtccaccatttacacttacgcacttgtgttggacactaaatcaccaaaatacttagaaatggcccaagggcacatttccctttcaatctccccctttttggtgatttatgccaacacaacataaagcaactaatagaagtgcaacatcaattcaaatgtgaacacaaatttgttttgaatcaaatttggcatatatggatcattctttgccaccacttggtttgtttttgcaaatcaaactcaatttcctatctctaagtcaaccacacttgttgaaacataaagagagatatttcaagagaaattgatcaaagagttcaaaaaaactccccctttttcccataattaagccttctccccacaagagaccaacttttgacaataagaggcaaacaagagtattttgacaaacaaaaactctaactctactattttcaaaattcacaagtggtagctgatccatttggtagctgatccatttattgctttggccttattttctccccctttggcatcaagcaccaaaacgggatcaattttggccctttaaccccattgcctcaccaaaatcttcaactaagagtagaaaggcaataagagtacaaaagatgaacttggaataagttactctttcatcggagtgcagtggaagtctttgcatggtccaagtccaccttttccctttcaaacctcctttgagactagattaagcaaactcaagcacacagttagtctcaaagggtcaagttgtagcacatctccccctaaatttgtgcatcactcgcaaatggacttgtaaggtccggggagtgcttgtacaacttgagcaccataaataaacaacaaaatgcttaaggaacatgatcaaggcataaaacacatgtatgctataaatcaatccaagttccgcgaattaagacatttagctcactacgcag

SEQ ID NO: 37514 - DNA, 1323 bp, Zea Mays
ccgggtaatataccatggccaccaccaccactacccacgccctcgccgccgcccccgctcgcgctacacttcgcttccccagtctcccctcccccgctcactatggcgtccacaccgcggctcgctcgcctcgccgcagccgtcgcggcgtggatgctagccgctgctgcttctgctggtgtggaggccggggatccgccgctttcgcccaaggggctcaactacgaagtggcggcgctcatggcggttaagagccggctgcgggacgagaggggggtcatggccctctgggacatcaactccgtcgacccctgcacctggtccatggtcgcctgctccccggacaagttcgtcgtctcgctccagatggccaacaacggcctgtccgggacgctgtcgccgagcatcgggagcctcagccacctccagacaatgtcactacagaataacagaatatcaggtgaaattcctccagagatagggaagctgatcaatctgaatgctcttgacctttccagtaatgagttcattggtgatatcccaagttcattggggcacctgactcgactaaattatctacgccttgataggaataacttgtctgggccgatcccaacagatgttgctaggcttccagtgacttgtcattcaacaatttaagtggcccagttccaaaaatctatgcacatgattacagtcttgcgggaaatcgattcctttgcaattcctcagttatacatggttgttcagatgtgacagcaatgactaatgggacaatgtcgagacaggtccaaaaggccaagaaccaccatcaattagctttggcaatttctctaagtgtcacctgttccacaatattagttttgttgttcgtgtattggctaagttattgcagatggcgcttgccttttgcttcagctgatcaagatctagaattcgaattgggccatgtgaagcattttgcttttcacgatctgcaaagtgcaacggacaattttaattccaagaatatattaggtcaaggaggttttggtattgtgtataaaggctgtttgagaaatggaactttagtggcagtgaagagattaaaagatcctgatgttaccggtgaagtccagtttcagacagaagttgagttgattggccttgctgtgcacaggaatctcttgcgtttgtatggattttgcatgacctctaaagaacggttgcttgtatatccatatatgccaaatggcagtgttgctgaccgtttgagagattatcgcaatggaaaaccatctcttgattggagtaaacgcatgcggattgctcttggtgctgcca

SEQ ID NO: 37515 - DNA, 2103 bp, Zea Mays
atgacggggacgaacggtggcatggccaaggagggcggggacaacgacagcgctaggctctgcggctggactggaggtgtcattgttgccatcctgaaccgtgttgccatcctttcggtatgcggcagcacaaaaatctaaagagaccacgccttgaccatgtcctcaattccgtccatcttctcctctgtcttccccttttccttctaacgacaccaggagagaaatttcctcctgtgcgcgtgaaacaattttcctcctcgccacgagatcatctccaactcaatggaagacctaaaagttacggcttcatagtcccatcccaccacgaggggcacggtggtcggtgggttgagggttctcagctggctggagactggagcatatgttttctttcaagtccagagtcagggtttcatgggggaatcagacgtgaaggaacagcagccgaacaggctgcaggaggagctgaggaaggagaaagagaaggcacgcgccctagacgagatacaagacctgcaaggcgaactggaggcagcaagagattcagagaagaagatgctgctgtcattgcaggctcaaacaaagcagcttgagcagaccaaagtatccctggaagaggccaagattgagatagcttcgctacgagacagtaggcagccgttcaagaatttcaggagaaggggtttgatgtcattctcctttgccgaccctggcgaggcggagacatggtcgctacagcgtgagctcaggttagctgtggaatccgaggagaagtgcaacaaggccatggatgacttggccattgccttgactgaacaaaccacagaggccagagaagcaaatgtgaagctttcattggcgcaagccgagttgaataatgcaaggacccaagtggagaccttgaaggcctcgctagaaagcacagagggcaagctccagttggcactggaagaggcagaccggctaaaagtcgagtcagatgaattggcagctgcctcaaaagaaaaagagagagggctcgttgattgcatcaagatgtttgaggaggacctaagtaaaggaaaggaagagaacgataagctgattgaatcacagagggtgaccagagatgagaattctcggctgagagagatgctgaagcatgcggtgggcgaagctaatgtagcaagagaatcgctggagattgccagagtggagaattctcgccttaacgaagagatgtttaagaaagagagtaccttgcagagtatcaaccaagaatatgaatccctcaagatcagcgaggcagccgcacagagtagcattaaagaattgaaggatatgattgatgctatgttcagttctgagtcgaccaaaacgtcagcagaagcatcacctcgtgaggccaagggaagcaagatgaaggaaacttctgtggcagcagattatgtgtattctgatgtcgaaagatctactcgtctggacgacataaaaaaccctggaaagcagaaaaagaagacaattctcagaaaatttggtgaaataatgaagaaaagaaactcctaaattgtaatctagtattacgaaagcagtatatcttccattttgtttgttcagatcccttgagcacacaggacagctagaatgccaagatttacaatgatgaaaagatgtgtggggtaacattttttttctttttttacttcatgccatggatttagactacaaagaatggagcatactgtacatacatgtcaaaatacagagaatgaaataagaaagtgtcatagcctttttttatggttttataagtttctgcattttagaatctctataaatccttggcctgctatatgcaactaagtagcccatgttcccagagtacagtatgcccaaattaccccatcgttctgggaaatatgttgataatgaggatatttaacttgtgtcaaggttctgcaaagagcatatttacaagttaattatgtgtgatttatggagcactggaatccgccaccaactggataggcctaagtaaaactgcataaaagtatttcattacgaggtttaaggaaaactaaaatgtctgtggaggacacactgtctgaagtaccatatcac

SEQ ID NO: 37516 - DNA, 299 bp, Zea Mays
tttaaatcatctttcctctctcatccctcactcccgcctccaccctctcctccccctcactcgcaccaccaccatcgtcgatggccccaccccttctctctccgagatcgtagcgttgccatagatattagactattttagaaatagaactagagttgcgctattttgacgagacattaagttcctttatacacttaaaaaatacgaatgcgaaatggagaggagggcttggtaagcaatgaagagagggttaagactgtgttcaacgcatcccgccggaagcccccctcccctacggt

SEQ ID NO: 37517 - DNA, 4302 bp, Zea Mays
atgccgtcagccttcttcgcgtggcggtcgcagcacgggacgtcgctggtgggcatcctcttctctgcgttgggcgtctttggcgtaggcagggaagtagctcggcacgacttccgcccgacgtccttgggccaccgcgaggcccgtgtgccttgggactgcctcacatggagctcggccaggttatgcaaggacaagcacagcgtgtggttcaacgcacacgtcgaggtggagcgtcttagcctccacgactaccacgccgttcccgccaaggagggcctcgctgtcgaatgggaattggtatcggctgcacaggggaagggatttgattcactggtcatcctggtgtttggtgcatttggcagacacggaatcgctgacaagcggcagggactggactgcggactgccgctggcaactccgacctcgcgacgctgtactcggcttgctttgaggacagaacgatgcaatgcagcctatgctctagtcgtccagatgattagtcatggttgtacactacggggtgttataatcttgctagtcttagcgttgcgtgttcggcgacctactactgacaacgctactcgcgttgccggacgactccaaagagcaaaagtgaggaggaagatgaatggcaatggatatgataagcgctcgtggaagaagaagcggcgaaggcagacggaggggttcgaggctgtggccatgtactgggcgagggcgaagaaggacggcaagtttggtctcagctaccttgacaaccaggtcttctcttggtctgtcagcgacatcttcgacagggatctcctcaggaaaaaggtcaagcggataccggatactttcacgtcatttgagagttacttggattcgtttacttggccgctgattgaagaagtacatgctgatgtattctcatcgctagatggttattctgaggcaaactttatagaagtaacacaggtgggaaatcttgatgctagtaaaccaatactcggttttcgagttgcagaaccagtgaaggatgagaagtcaagggagacatatgtaccagtggagaatgatataattgtcctgtcctcacataagccaagcccgcggaagcggaaagttcccaatgctcccaaccatctcaatgttttgatggtaggttgattgaatggcttggccttgagaaattcggtctaaatgattcacagttgaatgcagtgtcagattgtgtatcattaatggatagcaactcttcatctataaagctattatggggtccccctgggacaggtaaaactaaaactatcagctctatattatgggccatgctcatcaagggcaggaggacacttgcctgtgcacctacgaatactgctgtgttagagattgcggctcggatcgtcagtctaactgtgaagtcttcggatggcaccgtcttcctgaatgacattgttctgtttggaaacaaaaagaagatgaagatagataatgactattatctttcaaaggtgtatcttaactttcgtgctgagcgcctgttgccatgcttcaagtcaaatacaggctggaggcattgtttatgcgtgctgatagatcttcttgtcaattctgtgaccaagtaccagttgaacaatgaggataaaacattcaaacaacatttgaaagatgattacaataaactttctcggaatttacatagttacataactatactatacaatgatcatccaagaaacctggaaacaggacagagctttcaatgtatgctggaggtccgtgagttgctcaaaattcttcacactttgataaatgctggtaatggtggtgatatatggagcgatgaactgctcagaagcactatagaagaggaggtcaaccctgagctttggccttcacagctagcctgcatacggaccaactcatgcaataaatccaagtttgtggctgcaagatctttgtgtctgcaagaattaatatatctttgtaagaacatggagctcccaaattgttacagtgcacaagatgttcgactatacctgctgtcaagaactagattgattatctgtacagtttgtagctcattcaagttgtacaatatacctatgagaaattcttctccaagtttacatcagctgctaaacaaacccaaaatattgattcctctggagttgctgataattgatgaggctgctcagctcaaagagtgtgaaaccttaattcctctgcagttgcctggcataaggcatgctgttctcatcggcgatgagtatcaattaccttcccttgtgaagagcaaaatatctgatagtgctaactttggacgaagtgtttttgagaggttgagttccctaggctatagtaagcaccttctcaatatccagtacaggatgcatccagacattagcaggtttccagttggtacattttatgatggcaagctatctgatggccccaatgtcagtcacaaggactataataagatgtttttagcaggaaaactgtttaggccatattcatttataaatattgatggcagccatgaaacaaatgaaatgcatggtcggagccttaaaaactcattagaagtcgatgcagttgtgatgatagtgcagagtttgttaaaagagacgctttctacacgaagcaagctttctattggtgttgtgtgtccatacaatgctcaagttagagctatacaggaaaaggttgggaagccctgcaggaagtatgattatttctcagtgaaagtaaaatctgtggatggtttccaaggcgcggaggaagatataattatcatatcaacagtcaggagtaatggagctggtacagttgggtttctatcaaacttacagaggactaacgtggctctaacaagggccaagcattgcttatggattgtggggaatggaaccactctgttcaacagcaattccgtttggcagaagatcgtcaaggacacaagagatagaggttgtttttttaatgccactgatgagaaagagttgctgaatgcaattttcaagcctgctgttgagtatcctcatgctgacaatttagctaaacatgagcaacacggacagaatatatccgacttatcagctactgacacaattcagcaacttgcatgtcagtttacccctggaagtgatctcccaccaaagttctctatcacactcaatgttggttatactacaagaaaattcagttcatcaagcaccctgcttaacagctctcctttgcaactcacagcaacagcggtaccaaacgcagaaccagcttctcatggctcttcagctactggagcagttgaattgcctgtaaccgaagatgggcgcttggttgatgggaaaatctcctttcagaatactgtgaggagcactttgatcagaatcgaccacgaccctagacttgcatttgactttctggcagtagcaactacacgggagcaagcagcacctcttacccgggagcagtttaagaagcatgacagaatggtcgaatctcctgctccagttaccgctgagggttcggaatgctgcatcagactcaatgaacaggagcaagtagcacctcctaccaagctgcaatcgaagaagcgtggtagaaatgttaaagatcctgctgcagctactacaggggctttgaaatgcagcatcggactcgatgaaatagctacccgccagcaagcagcacctcctactcctgagcaatctaagaagcgtggtagaaagagcgaacctcttcctcaagttatcacagagggtttgagacgcagcagccgacttagtgaaaaaggcaagcaccatcaagtagcgccgtctcaggagcaagccaagaagcatggtagaaagggagcgacactttctccagttaccacagaggccctgagacgcagcagcagactgaatgaaaagggcacgcatcagcagatagcgctttctatcccagagcaagctaagaagtgtggtagaaaggccaaaaggcttcctcgagtaaccatagagggtttgaaacgcagcaaaagaatgagtagaaacaacagcgaagaattggctgatgtggattgcaatccataaatggcaaggaagcgacgcctacctgccgagtgccgactacatcaaaggaggttacaacagaattgtataggttgggacatgtctgcagcaagcaacatgatcgacccttctcgcactacaggaaactggttaaagaacgtgggtgaaaaaccgtcaaacttaatgtaataggccgtcgaacttaccgtaagaacgtgggtttaccgacgaatatagccgacggcgatttttggacgaa

SEQ ID NO: 37518 - DNA, 2947 bp, Zea Mays
aaggagacgttaccgtctcggtcttctcctcctcccccacccggccacccgctctttcctcgcgccttcctccttgacgccgccgccgcggccgctcactcacattaaagcgcgccttcgcccaaaccctacctcggaaaccctttcacgccacggggccccaactgcgcctgtcgcaatgtcgctcgagatccacgaggaggatggtggggcgtctggtgcacgttcggcgacgaaggtgatgtctgtttccgggagcgggaagcgggggcggtacgtgcggcaggtgacggggcggcacaacgacaccgacctccacgtggccgcgcggggcggggacgccgcggcgctgcggcgcgcgctgttggacgccgcggcggccgtggctgccacgggggaggcgccagaggacctcgaggcggcgcggcgtgcggtggccgcggagcccaacgaggccggggagaccccgctcgtcgccgcggcggagaggggccacctcggggtggttgtggagctgctccggcacctcgacgcggagggactggccgccaagaacaggtcgggctacgacgcactgcacgtcgccgccagagaagggcgtcatgctgttgtgcaggaaatgttaaatcatgataggatgcttgccaaaacatctggccctgcaaatactactccacttatatcagcagctatgagaggccatattgaagttgttgaacttttgctggaacaagatgactttggattggtggaaatggccagagataatggaaagaatgccttacattttgctgctcgacagggacatactggaatcgtcaaagcgctacttgagaaggatcctcagttagcaagaagaaatgacaagaaaggtcaaacagctcttcatatggccgtaaagggaacaagctgtgatgttcttagagccctagtggatgctgatccagcaattgtaatgctgccagataaaaatggcaacacggctttgcatgttgcaacaagaaaaaagagagcagaggtatttacgatagataatgaaaatttgacgctcatctgcagaaaacttatgtgcatgtttttgttgatagttgctcattcctattaatgatcattgctttctccctttttttattttatcagacaatcctatgcattattccacaaacatccacactcttcttccagttttaaagaaatctcctgaataaaatagctactcagactaggccagctgtgcccctaggtttatttcatatctggaaattaaaataatttgacatacactttatacctcactggctcactgccaaatcatctacaatcagttagggttcacttctcttgggaacagtggcattgaaatttgaaccatatcatgtccaagtgccagtggtcagcggccacttcccacctcttaagtaacctgaaaagtcagtattgtactttcaggtggatttatcactcaattaaacacatcaggaccaaaatattcttcagactgataaaaaaattgcagcacaaaatgtgcaattttttccttaggctgcatcaagtagcatcttgtgcaaatttgtgctcgagtaaagtcttactagtttgttaatcatattgttgaagtttcaaacttcaaagcagctatattcccatagcatacataagattatttgatacttcgatatgataaatgattacttactcctaacttaactattatatttcaacttctgttggacttaatggtctctttgtcttatcttctacagatagttagtgttcttttgcggctaccagatactcatgtcaatgcactaaccagagaccacaagactgcctttgatatagctgaagggttaccagtatgtgaggagtcttgcgaaattaaggatattttatctcaacatggtgcgctcagatccagggagctcaatcagccacgagatgagctacggaagacagtgacagagataaagaaagatgtccacacacagctggaacaaacaagaaaaaccaacaaaaatgttcatggcattgctaaagaactcaggaagttgcacagagaaggcatcaacaacgctacaaactctgtaactgttgttgctgtgctgttcgcaacagttgcttttgcagctatattcaccgtacctggtggaaatgacaataatggacttgcagttgttgtccagactacgtcctttaagatattcttcatcttcaatgctgtggctctatttacatcattggcagtggtcgtagttcaaataacagttgtcaggggagaaaccaagtctgagcgaagggttgttgaggtgatcaacaagcttatgtggatagcatcggtttgtactacaatatctttcattgcctcgtgctatattgtgctaggccgccatttccagtgggcagcaatattggtatctttgataggtggtgtcacaatggccggtgtacttggtactatgacatactatgtggtgaaatcaaagcgccaaaggaagattagaaaaaaggagaagatgtcaagaagaagtggctcaagttcttggtatgacaataccgagctctcagatactgaacttaatccagtatatgccttgtaaagagtgtttgtctcaggaatcgagtatgtactaacagatacaatagcttacattatttgttgattgttcaatttctccagttccagtaacaacaaaaccacacagaactttcccattgtgcaaggctcttgcagttgatgaatttgatggcagccaatgtgctcaatctgttgtacatgtgagttacaatttttttttctttctgagagtcacttctgtgctttatcttcaggattgctcgtattgtaaagctcaagccaagggctgattttagatacttaatccttaaagtacttcaagttatgtgcaactccttttttactgattgcgtgagaagcaatgccatggtc

SEQ ID NO: 37519 - DNA, 6046 bp, Zea Mays
ctgcctctcaaattcgctctgcgacccattccattccgccttcgccgcaccggcactaaacctaaaacccgaccgtgtttcctgtcgctgcttgtcgtcgcctgatcatagatcgaattgaagcggggatatatgtacaggaaccagtttaggtcggatcgattgaacgaccacgccaccactgcgcggaggcccggccgcgggagcggcagtagctcgcattgggtcgtctccggcggccgtggaagcaccgctccggctacgcggctgcgatcgccgccctaccggagcgggaggcccgggagcgtgcagcagcagtacaggccgagatcgccggcgagtgtcccgatccaggggaatgccattggctgcgctcctccttgtgggagtggtgcctctgctgagcacacgggaccagtgaaccaagagactttcggatcactggataatgtgaaaccttccaattttcctgctcagagtgatggtttgagttgtgtctctgctgaagaaacctggccagcagattccccaaccccaacactacagacaaaaggatattcatccccttcatttactcttcagtttggaacttttaactcaggagttattaacaaacaggaaactacttcctgcacatcctcagcccctcctgatctgaatgggagcaaacatgaaaaggcctgccatggattacattattgcaagcccaatacagcttcctcacctcctatacaagagctgcaaaagcaggaagcaagagatgatttagttattggtggagaagcagacttaattggtaaatatgaggttcatgttcctgaattgcatgaaacacacacaatgctgaattctgtttctccatctagcaaagtgtgcacagattcacgcaaggtgttgctcagaactatgtcttccccaactcaacaaaagtgtgaaaatcaagaagaaacaaaaaacactatcagtgttaaccagactgacaccgcatacaaatatcctacaaccaagcccaagatcagtgttcaaattccagcttcctatactcccaacatggcaccaccccaatttatgcttccagtaccagggagatcaatgcctgtggcatttcaacagaaacaacctcaagtgcccattgaattcaggggcccaggttttcaaatgcactctattggctctgtatctagttccttgcccgtgaagatggctgtccctctgggtaatgcacctcacatacaaccgatgtttgttcatggtgctcagcctcatgcattccatcagcaatcctttattcaccatggacaaggctttggatgtgctcctccatctaattgttaccttcctcagtttggcaacatgagaaatgtgcaagaattatctcagcagtatcctagaagcggtgatgaacataagagaactatcaagataacacatccagagacacacgaagaactgatgctagatagacatgggcattcctttataaatgttcctgcttctgggcagatgcctttaaacaatataaaccagctacctcactctgttcaaacattttctccacttcagaaagtgtattatcctagaccaggaacgtacaattcagcacatgtctatcttcccaactccactgatgtccctcttgcaagtaggcaattttcctccaaaattcaaccttcgatgcatggttttgattccactaatagcaaccagccatttacttccatcagacctcctatgccgatatctcggcttgatgctacttccgggccattaacaaatttgcatactgcttccgaaatctcaaatttcaaagggatgtttccatcaagcctacctgctccagttcatgttgagctaaagccgcctattacactccctgctgaaatgaatagtgaatctaccatatcaaatcaacaaaattattgcaaaattgggctagaaatgtcccttgaacctgtaaatttagtttatgaaggaaataacaaagattctgttgcaacttgtgacataagttgtaatttaatacctcaaccagtttcaaccccgcagacacagactcggccaacttcagttgatcatgccacaccagttgtagaccctcaaactatcttaaccagtagcctgcctctggaatctactacatgttgtaaatcttcagttaaagcaaaacctattgaggtggaacaatcattagtggttccaacaactttatcatcccatacaaaactcgagtcatcgcatgcaactactagtgtcattttgactgcaacttcattagtttccaagattgatgggacgccaccgactaacaggaactatagatattatggcaatagcattttggggaaacctccgttaatttatgcacaagaaatattgccatcaaagtttgtggggtctaatacatcaccagaaggtcttggaaaggcaaaggtgaatccagttctcttccaagaaaagtttccttctgaacttaatggttcagttccattgcgaaagcatgacttcatgatagaagaacatgttccaaacgaaaaagggatgtgctcagagtcaaagaccgaacaagtagatgtgaccatgccaagtactgcctttggattggaggatgacactagtgttgctaaatctggaagatttcatgcatatcaccagccagttgatttgcatccttccatatacattggtgatatccagacatcagatgacagtcagcaaccttcaccagatttagaaatcataacatctcaatcagagaacaagcagaataacagtagagtagactctgcaagggatgtcaagaatgcagcccctatttctacttcagctatctcccaggggaaaacagaacaagagaggattggtttagaaatatctaatccttgctctataactgctgctttagtggcacaaccaaaaaaagttgttttggagtcaacaaaggccaaaagtaccaatggacgaagaaagaaacgaaaagagacacttcctaagggtagtggacacaagtattatgatcttgatagtgcacacagttctctcaatgagaatgtcgagagttttgttacttcagaggatgttcagtgttccttggcaactgatttaaagctgaattttacatgcgaggctgcaaaggacaattcaactggtgggaatgattgccagaacagaagtgacttgttcagctgggaaaatacaacggaaaactctgcggacaagttgaaactttttgggggtacccattctaaaagtggagcagaagtaaacaaggataaatctgagtttgaccataaaagacaatactcaacttaattcaaaccatgcaaggataaaagatcgaggttcccgaggtagtcgtcatatgactggtaaatttgatgatgataagtggagaaaacagtttttttctactgtttctggacgtaacctgctttctgacaatttttatcaacctgccttttctaatcgggatgcagtacaacatgttgggaacggatctgtaagaagtttatcacaaagtcagccattaagtcaatatagtggcgaggtgctctccggagctatgaaagtagtatctcggcgcagcatgtcacgtggatctgttgatgagagatggcaacatagaactaatgttcagggtatttcatcgccttctcaggtatctatgccaattatgcacaaagctgagaaaaaatatgaaataggtaaggggattgatgaggaagggtcaaaacaaaggcagttgaaagctattctgaataagttaaccccccaaaatttcgaaaaactttttgcgcagttcaaggagttgaatattgataacgtggtcacacttactggtgtcatatctcagatatttgacaaagctttgatggaacccactttttgtgagatgtatgctagtttctgtttccgattagctggtgacctaccaaactttgtcaaagatgatgagaaaatcactttcaaacgactgcttttaaataaatgccaagaagaatttgaaagaggagaaagagagcaggctgaagcaaataaagcagaagaagagggtggagctaaacaatctgaaggcgagagagaggaaaaacggattcgagcacggagacgcatgctaggaaatattcggttaattggtgaattgtacaaaaagaaaatgctgaccgagagaataatgcatgaatgcataaataaactgctaggtgagtatcaaaacccagatgaggaagacctagaggctttgtgcaaattaatgagcacgatcggggagatgatagatcatcccaggacaaaggtccatatggatttttattttggccttatacataagctatcagaaaatgtgaagttatcatcgcgtataagatttatgctagaagatgtgattgaccttagaaaaaacaagtggaggcagagaaggaaagtagaagggccaaaaaagatagaggaggtccgcagggatgcagtaaaacataagtttggccaatcaacaaggtttggctcttctcctaattataattcatctgttacttgcattagctctggattgagaccagggcctccagatgctagatatcagtcttcaaatagagtcttgcatgttccactccatcaaaggcgtgctcataaatccattcgccttggtcctcaaggtgacttaggaagaggaatctcgatttgtgggaagcaacacgtttcaaatgatattttgccagaagttactttgaatagtcatcatggtcaaacatcagaaaactcaagagacagttcatttacaggagtgacaagtaatccaacaggcttcaaagccggtaatacatcttggggaatggtggatctttcttcaccagtaccgtcaactataggtcaaacacatacatcctccacagtcagaaaggagatgtgtgctgaagcgcatacattccctgaagaggttcttcaagagaaatcgatactaaccataaaagaattttacagtgctaaggatgagaaggaggtcgctctgtgcatgaaagaactgaatgctcccggcttctatccttctcttgtgtcactttggatcactgactcgtttgaaagaaaagacctggaaagggaactcttggccaagcttttggtgtacttgtgcacagctcaagagcacttgctgagccagaggcagctactccaggggttccaacatgttctatctaccttggaggatgccgtgaccgatgcgccgaaagcgaccaagttcctgggccaaatatttgccagagtcgtactggaagacgggatctcgctgacggaggtaggagggctgctgcaggagtgggatggcagggaagagccagcaggacagcatgccctggaggacagcctcgcatccgaggttctagggagcatgctagagtccatcagagtagagaggggcgacaacgccgtggacgaaatccgcgcaaaatccaacctgcagaggcgtggggtacttatcatgtttccatcgttttcacggcgagcgtcatgcaagaagcaagaagatccggattcttttgaatgggccaagaaatttctgttgtctggtgctctttctgctttcgttgagcccaacatggaaactgtccccatcaagattccctctaaatgtatgctccctcctagtcaggaattgcatgaggaacctcagtcccctttgcctgcagaagcggtcaacagaaagaaacagtcaatcttgatcgacactgaagtaaggagtgccaggctcaaggagaaggctagaggttttaagacttgctctggaataaggaagaattgctcgtgctgtgctaggacatcgccaccctctatctctcacaagattattaagaagctaggagctgaattctgcaaagttaatccctccaagttatgccctaatgcattaaacaactccaggtccttcagctctgccatccagaggccacgtgcttcatccagtagcagggccgagctacgagcaacgtccgaagatcagagggatgaatcagaagatgaagatgatgcggggtctcgcccctcggctgggatgtaa

SEQ ID NO: 37520 - DNA, 2025 bp, Zea Mays
gcgaacagcagcatcctattcctcctacctcactggctcactctcgtctcggtttacaaagcctccgccgccgcaagtccactccacccgttgtccagtaccgataaagccccgactcgccatcctccggcgacgatgccttcccgatcggattccgactccctgctggtgcgcgccgagggcatgcgcgacgcggcgctggactaccacggccgccccgccgaccgcggcgccaccggcggctggaggtcggcgctcttcatcatagcggtggagatcgcggagcggttcacgttctacggcgtgtcggcgaacctgatcaactacctgactggcccgctcgggcagggcaccgcggcggcggcggcggccatcaacgcctggaacggggtggcgcagctgctgccgctgctgggcggggccctcgcggacaagtggctcggccgctaccgcaccatcgtcatcgcctcgctcctctacatcctcggtctgggtatgttggccttttctaccttcctctcctccggcagcggccaccagtgcaccgccgcagggggccagatctgtgcgccgtctggccttaaggtgaccttcttctacgtctccctctatatcgtggccgtggcgcagggcggccacaagccgtgcgtccaggcgttcggcgccgaccagttcgaccagaccgaccccaaggagactgtctccaggagctccttctttaactggtggtacttcggcatgtgcgccggcactgccgtcacgctcgtgctcctcagctacgtgcaggacaacatcggatggggcctcgggttcggcatcccgtgcgccgtcatggcagccgcgctcgccgtattccttcttggcactcggacgtaccggtactacgtcactgccgggcagggcctgttcgctcgtgccggcgaggctttcgctgagtggcggagcaggcgcaaggcgggccagcttgttcaggattcccaagaactcgatccgcccgcagcagatgcgccaaggttcagtgctggcgtcgatgtggaggagcaggctgcagtgagaaataatggaggcctcgtcaaggaggccaaggccatcatccgtttgttcccgatatgggcggcatgcctgctctacgcggtggcgtactcgcagtcgtcgacgttcttcacgaaacaggcggcgaccctggaccggcggatcgggcggcacgtccaggtgccacctgctgcgctgcagagcttcatcagcgtcacaatcgtggtcatcatccctatctacgaccgcgtcctcgtgccggtgtcgcgccggtactccggcaaaccatcagggatcaccatgctgcagcgcatcggcacggggatgttcctctcgctcttgtccatggtgatcgcggcgctcgtcgagaagcaccggctccgcgtcgcgggggacgctggactcgtggacaagccgaaggtcccagtaccgatgagcctgtggtggatggtgcctcagtacgtgctgttcggggccgccgacgtgttcaccatggtcgggctgcaggagttcttctacgaccaggtgcccgacaagctgcgcagcctcgggctggcgctctacctcagcatcttcggcgtcggcagcttcatcagcagcgcgctcgtgtcggtcatagacagggtgacgacggacagaggcgggagctggttctccaacaacctgaaccgtggccacgtggactacttctactggctgctcgcggcgctcagcgccgtcgagctcctcgcctatgtcttcttcgcggtgacatacaagtacaagaacagaggagccgtacatgcaactgttgatggttagcgggaggagtaagtacatagtataggttatggtgcatcgtacttgtaaatctctctttttttcctcaactaggatttgtgatccaaactttaccttcgataatgattcccgttttttatgaattggtgggccatgtggtcattcaatttttaggaatgtacaactctgagactgaatcgttttttcaagcct

SEQ ID NO: 37521 - DNA, 1246 bp, Zea Mays
ccaaaaccagcagcacgccgacacgccgccgcgccgcgccgccattctcccatccgcccccgtgcccccgccgcccttccctaacctcgccgcggaagacgtcgcgccgtgcgtagctagcagttccccgtcgcacgcgcgtcggataagaattggttttggctcttcgtctccccccatccttgggtccttcccctcccactccctcttcgcctcgtccgcggcagtaggctcaagcttaggaactcgctaccgagaattagttggaggcttcgtgatggcgggcgcgaaggcggatgtagacgcagaaacaggagatggcagcggggtcggcagtggcggcggcggcctctttagcgagcagatgctgattgataagctcaacaggctcaacaactcagccactagcattgagacactttcacaatggtgcatttttcaccgcaagagggccaaaagggttgtagatacatgggaaaaacagtttactagttcaagggaggagaagaaaataccattcctctatctatcaaatgatatcctgcaaaacagtaaacgcaagggggcagactatgtggatgagttctggagggttctacctagatccctgaagcatgtttatgaaaatgggggagaggaagggaggaagcaggtggcgagattgatattaatctgggaccaacgtaaagtttttgggactcgtattggaagtatgaaaaatagcattcttggtgacaaccctcctatattggataacaatgtgaatagtttaaatcctagctctaatcccacttcaaattccaaagctgcacggaaggattctggtacagtagtaaaaaaactcactgttggcgggatgcctgaaaagattgtgtctgcataccaatcagtgtttgatcaacattttgatgaagacacagctctaaacaaatgtaagagtactgtgggccttttggagagaataaataaagatattaacgatgctagcatcaacggtaatcagccagcatcatcattgatctctgaccttcaagagcaggaaatgaccttaaaacagtgcatcgaacaacttgaaagtgcaggtagggtgaggatatccctgatcaatcaattgaaagaagctctcagcgaacaggagtcgaagtcaataattctccgtgatcaattgcaaaattctttcacctggttcttacacaagggctagtttggacaaggaatcgtgatctggaaaagttgaaatgcatca

SEQ ID NO: 37522 - DNA, 2826 bp, Zea Mays
ctccgccgttcgcccgtccccgcccttttccttctcttctcccactctcactatacccatttctcgagatctcggcgaaaccctagtgaaacccccgccgtgggggcaccaagacgccgcaatgctgcacgagctcctcctcgcgctgctcggcttcaccggcgacttcgtcctcgacgtctctctgccgcggcgccgcgccgcctcccaggacgccggcgaggatggaaacggagacggtgaggtgggcccctccttccgcctcgcgccggacctcaccttcctccagccatcagagaggactgctattgagaggctcatatctctgggattttactacagagaactgaatcgctttgcaaccgagtcccgcgacctgagctggattcagtcttctatagatgtttcatcacctcattctgataatacccagaaggggaaagtgagaaaagggagtgtgtacaggagggcaattgccaatggtatcactgagattctgtcagtatacagatcagctgttctgcaggttgagcaaaaccttttatcagatccgttgcctatcctcgcgacagtaactcacgggttgaacaagtttgaagtccttctgcctccactgtatgagcttgttatggaaatccagcataaagacatcaagggtggccagcttcttaatcttttgcacaaacggtgccattgtggggttccagaactgcaaagctgcattcagaggctactttggcatggacaccaggtcatgttcaaccagctgacatcttggatggtttatgggattcttcaagatcagtacagcgagtttttcattagaaggcaagatgacagggatgtggagaatgaatcatctcagcgtgatgtttctgataagttaaagcagaaattagctaaagacacatccctggctagttggcatacgggatttcatgtatcattggacatgttgcctgagtatatccacatgcgaattgcagagtccattctcttcgctggcaaagcaataagggtgcttcgaaatccaagtcctagtgctacattgcaggatcctgtaatcagaactgtaggatctcatggaatgcaaagctctgtaggaggttctggtgtaccaaaagaactggcaaacttctctaacatcagagcagaagaactactgccacaagcagaagctgataaaattgattctatgctcaaggagctaaagcattcttctgaatttcacaaacgaccttttgagtctgctgtcggctcaatacgtacaattgcagctaatcatctctggcagctagtggtggtacgtgctgatctcaacggtcatttgaaggcattgaaagattattttcttttagcaaaaggtgactttttccagccgccaattaatgcggttaccacctcgtcaatctacagccgaagcagatctcatgattccatttcagctggctgcactgaagactatcggtgaggaagacaagtactttaccagagtctcattaaggatgctatcatatggtatgaaaagtagcacgtctcagaaagatctccaaaagcctaatgcttcagagcttccttcacaaggaaaagctgcatcagaattgacacttgatgggtgggatagtattgctctggaatattctattgactggcctctgcagctcttcttcactcctgatgttctgtccaagtatcgcaaggtttttcagtatctcatccgattgaagaggacacaaatggaacttgagaaatcctgggcagctgtaatgcataaagaccatgctgatttttctgattattgcaaggatcggaaaaataactctgcaacacaactgcgtcgacaacggtctaagcctttgtggcgagtaagggagcatatggcattcttgatcagaaacctacaattttacatccaggttgatgtaattgagtcacagtggaatgttttacaatctcacgtgcaagattcacatgattttacagagctagtgagctttcatcaagaatatttgtcagcgctggtttcccaatccttcttggacatcggatcagtctctaggatactggatagcataatgaagctttgcttgcagttctgctggagcatagagcaatatgaaactcggccaaatatttctgagattgatcacataactgaggagttcaacaagaagtccaattcgctgtacactatcttgaggagtagtcgcctcgcgggtagtcagagagcacctttcctgaggcaatttctgatgaggctaaattttaactctttctttgagaccaccgcaaggggagtgatgaattcaggaaggctgcgaccaatcactgcaggtgctcagctgtaacggtgatggtatgtttgggggtagtgctgcagcaagagacaagggaggagtttctgtagtttatgtaaattatgatcggatggtggttgtctgtcatggaaaaatcgattgcaggtgattcatgcttgtgccgttggtattgtgtttttctgtgcttccgtttgttaatgctatccagttcctgtggcctgaactgtaccttcgcaaattatacgctcgttcaccgtggggatctggctgacagatagtgaactgctgccactctttttttttttactaaggccgctgccacttctgagctgtgagatgccatgtctatcaataataacggtaaggagtattctaaaagattttgagctgtgggcagatgaatgtttaggacatatggattggaggggattgaagattaaatcctctcctatttaattttaactagtaaaggattttatccatttaaaagcctttagattagatggat

SEQ ID NO: 37523 - DNA, 859 bp, Zea Mays
cttttctcggccatttccctaggcctcggcctaggaactgactcgcgccacaacgacgtggaacatttccacgcgaaggcgagggggagcccgggagggaggtgtgtgcgattcgtgcggcggcggcacactagggcgacacctgcgactcctctccgccccctacgtaggaggaggtgagagtttttggcggactgcaacatctacctcgttagggcagccgcttggattcgttgtacagccgcccggattcgcaggggcagtcgctcagattcgctgggagttctccgcctgcaatgtattcaagtcaagacatgttctggtgtacaatgtactcagttgtccctaaaaggctctaccaccagcttgcaacattggtattgatcattctaacaaaatatattccactgaacttgagaagatgcctacttaattttcttgtctctgtacttgcggttgccgatcgaaaatctgcatcagcaaacttatgagtattattgctagagttgctgcagatacttatgagtattagtatatgtgcttctgcatcacctatggttctacaaatgtaagagctaggatagtaaatgcacttggaggtggacaagagaaaaaaacaaagcttgactgcttgtgttgatcatttctgttgttgagccaactttgaggtcaacacaatgacaattctatgttgttgagcaaactattcagaagacaatatactaaaagatgaaagctttgaaaaatttctcttagaaataggtcatatatgcaacatgggatatgcacaatgttgtggttcactttttaagatatgctctattgtatattcaaccaagcctgaagaataattatagac

SEQ ID NO: 37524 - DNA, 1934 bp, Zea Mays
cggacgcttcgtcactcacgccccttgcgtgtgaaaaagaagggagctgtgctaaaatttcttggaggggagggggtagagatgacgtttggtagcgccgacatggaggccggcggcggcggcgagcgccgccacggacaacaggaggaacagtcatccgacgagcggcgcgcgcggttcgcggaggactggggctgctgcgcctgcgcctgcgcggggctattcctggggcccaacccgatggtggcgcgctacatgtacgcgctcatcttcctcgtcaccaacctcctcgcctggacgctccgcgactacggcgactccgcgctcgccgagctgcagcggctgaaggtctgccagggcgcgctctactgcctgggcgcggagggcgtgctgcgggtcagcctcggctgcttcgtcttcttcttcgtcatgttcctgtccaccgtgaaggccaggaaggtgcacgactgccgcaactcgtggcactccgagtggtggccggccaagctcgccctctggctcggcctcaccgccgtcaccttcctcgcgccgtcgccgctcgtccagctctacgggaaggtggcgcatttcggagcaggggctttcctggtgatccagctgatcagcgtcaccaggttcatcatgtggctcaacgactggtgccgcgcagagatgacccagaagagataccacttgcagattcaggcggtgtccatcgtcacgtacgtggggtcgctcctggggatcgtgctcatgtacgtgtggtacgcgcccagcccggcctgcaggctcaacatcctcttcatcaccgtcacgctggcgctcgtgcagctcatgaccttcgtctccatgagctccaaggtgaaggcagggtacgtggcgccggggctgatggggatctacgtcgtgttcctgtgctggtcggcgatcagaagcgagccgcacacggaggtttgcaacaggaaggcagaagtcgccacgagcgcagactgggtgaacatcgcgagctttgtgatcgccgtcgtcgtcatcgtggcggcgaccttctcgacggggatcgactccaagtgcctccagttcaagcaggcggagggggagtcggaggaggaggaggaggacgacatcccctacggcctcggcttcttccacctggtgttctccatgggcgccatgtacttcgccatgatcttcgtcggctggaacgcgaacgcgagccacaccatggagaggtggacgatcgacgtcgggtgggcgagcacgtgggtgcgcgtcggcaacgagtggctggcggcaatcgtgtacatatggatgatgatcgcgcccgtcatctggaagacgaggcaggtgggatcggcggcggagacgtgagcagtttttccgctgattctgagtttctgacagccggaatctatatatacatacaaacacaagagcaaatcaaagggacgggaaacgggaagagctcgggtagtttttgctaagctggaggtgcagcagacaagacaacaagaaagaggaggcaactaaggagtagtactatactgatgccactagtccatcgtggagctcggttcaggaagctcatcgatctcgttgtacttgtaccgaactatctcaaaaaacatagtgcctgtttgtctggattgctgctcggccacaagcacagctgtctggcccggggcaccatccaaacaatcccatatagagcgtgtttggacgcagtcatgcgcttgggttttgcttttgcctgtctgtgcccggcagattcatgggcctgtaagcaaacacgtcccaattatctgaactcggaattatttacgcctcggcaagattcatcaactcaatttttttgtgaacaatcttattgtgttactaggtgaatgcccgtgcgttgctacggagtaaacatattatgataagatatattgaaattc

SEQ ID NO: 37525 - DNA, 3558 bp, Zea Mays
cgcgccgcgagtcactttcaccagctctcactcttatccacccgcgcgcccaccgccgcgcgcagcaccgcgccgcccacccgcggccaccccagcgccccaaatgccgctccaaccctagcctctcgccatgcctttcgatctcgggcggccatgggaaactgatgccgctcgccggtcgccgtcgcgcgggaggacgtcagctcctcgcacttccccgcatccacctcgtcatggagctctgcgagggcggcgagttcttcgaccgcatcgtcgcgcgggggcactacaccgagcgcgccgccaccaatgtcactcgcaccatcgtcgaggtcgtccatttctgccatcggcacgacgtcatccaccgtgacctcaagccggagaacttccttttcgccaataagaaggagaactcgccgccgcgcagcgcccctctcgatatgccgccctgcttcctcctctcctcttgatccatctgccatcccatccccgctctgccagttgcccctcgcttcctcttcggctcttcatccccctcgatccgtcgcccgtgcttcctcctcactatgtcccgtcccctctccatcttgtcgccctgcctccccgcgtctgcgtctgcgcctgccttcggcgtccagagccatatccgcgttggcctccacctacgcacccgcctctagccataagagctcctcccgtgtctgcctttagagatctgctacctccacatcggtgtctagggctcctccattgcctagatctactagagaggcagatgaaagtatttccgtctcatcaactgtgctgaagaggaggaaaacacctcacttgttgaagggagcagtggagacccggaggaagatcatttggagtctgcagctactaatcttcagcctggcagtgacacttgcattgcaagggaagagttgccagatcagaaggatctggtgaaactgcaagctgttatccgtggacatctagaggcggcccatgcctcacggccaaagcagatcagttaggaggataaaagaagacactaccttggcacatgcctgttgtcacaatggacaaaagaagattagtgttgtgtgagatttttttcattcctttgatctattgcatgctatttgtaccctaatcgacaaaatagatgagactcaattcaggagcaaatcaccagtcctgttcacagtccaattcactatggctaaaatatcaaacttatgctccttgaggtttgttttttccttatcttcctttaatatctgatgactgatggactggtgagttcatgatctgcttcatgcttttccttttatatatggtcactacctcactggttagttcatggtgctttttgtctacttctttgcccaaaaaaaatcccggggcgaatttcagcatgcttttcctgcttccgctgtgcaaattcacaggatgcgtgggaaatgtgttcttgtttcgtcgggtggtgttcttgccattcgttttagctcaacacaaaacaaatgcttcttgttcttcaggtcgccctgtgtttctttctcgccagtttgggccatggattctggtgtgcatttgttcaatatatcttagtatcttatttaacaatcagtacttctctgatgctcaagagatcaatttactcaaagtagcaaactgtatcatagttgtatactttatcaaacgaggaacctgatgcttgtagtataagcctcattttgttccaaacaagacaggcttcggatacaatcacctggaaatcaatcagtaaacttttgctattcagttttttaaataaaaaatttaggccttacgactttcctcgcaatgtgttcacatgtagattaccttattgcattgcctacttttgtccgttgtgtaaaccaatcttttatcatttatcaaatgattttgctcttaacattaacaaattatcgtttggtcatatgcaactaatgacatcacattaccaagattctggggacccatcgctaccttgtgtcaacagtagactgaccagatcagggaaacgctcggcggcgaagctaaagcagagcttgcgctacacgcgctgcgagcagtttctgtctaaagggcaaggtctgatctcatatttgagctccccgtggcactgctcgcccggccagccaccatcccggtcttgcgctcggcggcgtgcatggtgtgctcgtccctgacagtggctagcttctgttttcttaattgatggctagcttctgttttcttaattgatgatttgttttttccttttctgatcgtcaatagggaagagacgacgataacatggacactgttttctaaatggatcagtatttttggtatatacacatgcttttactagtagaggagtatttattttcatttgtagcagccaaggaacttgtgcattccttatgaatcatgagaagaccatgaagatgcacacaaatttgcttgacttctgaccagtaataattagcgaaagaaagaaaatccagaaccatgaatcagcttgatagcagtaacaaatttgcttgacttctgacgagtaagaaattggcagcaagttcagcaggggccagactaataaatcagcttgatagcatccttgcagcggtgccttggactttggcggttagaagaggtttataattttatatgatgaaattatgtgcatcttcagttgtttttgcctcactgctctttgcggctctggataaactcgaagctgacctatccaagttcgacgacgggcccttcttcctaggccaattcagcttggcggatgtagcgtacattacgattctggaaagggttcagatatactattcccatcttaggaactacgacatcgccgaaggcaggcccaacctccaggaattcatcgaggagatgaacaagattgaagcgtatgcgcagaccaagaacgatcctctgttcttgcttgatcttgccaagaaccatcttaagattgcctgaagatgtgacaaagcagcattagtccgttgatcggtggaagaccactcgtcagtgttgagttgaatgtttgatcaataaaatacggcatgttgttgctgactttggacttgcaaagttcactactgataataacacccatgtttcaacaagagtaatgggtacttttgggtatttggcacctgagtatgcagcatctggcaagctcacagaaaaatccgatgtattttctttcggagtcatgcttcttgagcttattactgggcggcgaccaattgacacaacccaattggcactgcttgttataagcacatatgtacttccatttgcatgttgtataatactaataccaattgcaaaattatagttattttttctacccttgttagttaataagcatatttgtggtcaataggttgtattcttattcttgtaaccgtgttaattaatgttatggacttgtagtcttgtattaccttgtgaatatatctgtccctgcctgccatgtgaacgtgcttagcctggaatttgtgatatgtacatatatccatgtgtttgaaatctgtattgtatgtg

SEQ ID NO: 37526 - DNA, 1819 bp, Zea Mays
agaatcaactctcggagttagagaattatggagcggagctctaccaaacgagctctaacttgacactttatttagagtctatcggtaacccgcttcagctagcgagcattgagcagtctgcagtcgccgagccgcgtgtccgccgggccggcggttaccaagctcaccaaaaatctttccaggttcgaggccgcccatgttcgcctgcaggtctctcctcgcaagggctagtcggctcactcggcctgcgattccaagcgccgccggttcgccgcttcgttacctccaccagggatcatattgtcgaaataagttggcctcattcgtgatggaaggggcgcaaggatcaagcattgtgacaaaacacaataaaaggcagtctcctgtgcagagatggaggccagtttcaacagaagcagttccccagcatcaccaagatgacattattgagacatcaaattctggaagcaagaaaattatagaggattgcatagcttctagtgagaatttgccaccagatggaacaaccaatgttgttgaagttaccgccaatgatgcttcatcgtcaaaaaataatttaagttttgggtacagttcaactaaagtagttatagaagaccatgcggagttatctggcttcaataaggatctagctgggtccaatgtcttcgggacacattcctcctctgttgaggcggttcaaagtcgacagcttgactactctcatttcatatcacttccattggctttacacccagatcttgtcaacaaactgaactacttccagagttcgatccttggggaagaaaacagtaacaaagatgggagccaaagtgaaggttctattggtgaaatggactatgaccacaagcaagcggaagcaaaaatgggtgccaaaggctcccaatcagattttggcattgacaagtcaatatttatcaaacccgaaacgtttcacctgacggttcttatgttgaagttgtggaacaaggaacgtatagataaggcctcggatgtgctccagtcagtatctacccaagtaaatgaagctttggaaaatcgacctatttccatacagcttaggggtctgacatgcatgaaaggctttccagctaaggctcgggtggtatatgttccagtgctggaagttggtagcgaagggcgcctagctcatgcttgcaaagtcataactgacgcgtttatcaaggcaggcctagtttttgaaagggacgtgagagaactgaagttgcacgcgaccgtaatgaacgtgcggcacaggaagagaaataaacggaacacatggacggattcgtttgatgcccggggcatattcgggagatttgggaaggcggagtggggtgcatatcccatccatgagatccacctttctcagaggttcaagtttgacagaagtgggtactactattgctgctcgtcgatccccttgcctgcggagatgcacacggagtgaggtgtgtagctgtgatcatgttgtaggtttttaaggggcgtttatagcatatacatatatatattttaccgcagttcatgaggcgtttaaccttgttattagcgttggcccttaggggccaggtgttaccatgtatctatctatcggtttgaatcaccgatgggcaggtgttaccgtgcatctagtgttttgaatctgaatcgccgatttgagccgttgttggatgctgttgtatgttacaagcaatggcaggcactggtagtgggttccctgttgtaaagttgtagttggtgttgaactgttggttgttattgcctttccatatggcccattccattgtgcagtcaa

SEQ ID NO: 37527 - DNA, 3105 bp, Zea Mays
tccttcctgatacattcgtgtctcccatcgccaggtagatccctttcctcacgccacgccgagagagaaaagatagagggagaggcaagagtcgcatcgcagacccagaccacgccgccgccacctccgccgccacttccgccggtgatcgagtcgcgtcggcgctaccttcaagctagaagacaataagcatcggcagacatgttcggctccaccaacccatttgggcagtcgtccacaagcccatttggccagacctcgtttggaactccacagggatttggccagtcttccactgctgccaacaatccttttgccccaaaaccatttggcagcccgaccacagcttttggggcacagaccggaagctcgctatttggcacaacatccactggtgcctttggccagcagcaatccactcccacatttggcacaacatcctcatctcagtttgggagctctacaccagccttcggtgcatcccccactcctgcctttggtgccacatcctctggatctttgttcggacagaagccaagttttgggggttttggatcatcttctagccagtcaagtccttttggtaacacgttccagcaaacacaaccaacatttggcagcagcacttttggttcatcaactccgccggcgtttggtgccacggctcctgcatttggcacaactacaccagcctttggcaccacaactgcaccagccttcggtgccacgactagcccagcatttggttcaacttcaacatctttatttggtgcttctagcgccccaatgtttggttcttcagcctttggcacatctgctactggttttggaacttcagggactacagcatttggtgtgagtagtactactccgggttttggatcatcaagcacaccttcatttggcacatcagctagtgcgttcagttttggttcgtcaccatcttttggacaaacagcagtttcctctggtagcactccctttggaacaactccctcaccttttggtgcaccagctcctgcgtttggctcacagacagcagcaccaacttttggacaaccacaatttgctaatcaagctggaggaaccagaataaaaccttattctcaaacaccagatgttgacagtgctactagtggtactcagcctgctgcaaaacttgattccatatcagcaatgcctgagtacaaagagaagagtcatgaagaattgaggtgggaagactaccagcgtggagacaagggtggaccgaacacttctggaactcaaacattggcacctagctttccatcaccaatacaacataacacttttgcttcgacaagtaatccgttctcaacgaacccattttcaacaaacaacccgtttgctcctaagcccactacaactactagttcaccattcaacacctcatttaacaatgcatcagttgcaagttcgagtctattcacatcatcccctggtaccacaatgtttgggcaaccaggtgtttctacacttccagctccagcaacatttgctcaaccgacatcaagtacaccggctttctcctctgggagcctatttggctcaactaatcctggcagtctgtttaccagcagcggtccttcacttttttcaacaccaacatttcaaccatctgcccctgctcagagttcgaacatgttctccttccaacccccaattcaaccagcagcttctaccggtggactcccttttttccccaacacaaatcaggccttgacgggacagccaacttctagcctgtccagtatggtcatgcagtctgctcttgtttcaaatccatttgggatgcttccagcaatgcctcagatgtccatcgggaatggtggatcttcaccttcagttcaatatggaatatcaagtttgccggttgcggagaagcctcttccaagtagatcattgtccatggcggttcctaggcatttgtcacagagaaggataaaactgctgccaagaaaatataatccaatatctgatggcaaggttccattctttgctgatgatgaagaatctccagcaacaccaaaggcagatgcttttttcatccctagagagaacccaaggaacctggtaattcgtccaattgagcagtggtcttcacggagagaaactggccggcaatatactgcaaagaatgttactgattcgaacaaatatgaagatgcttccattgaaagtgagcgtggtaagtctgccatgtcaccaagcagcaggccacctgcagtggaaaatgacaaacagcatgaggccagggccatggctcaacatgcgaatggaaatggtacttcagttgagaggctgttgcctaagcttccacgtgcagattacttcacagagcctagtatagaggagcttgcggccaaagaacgtgcggagccaggctactgcggtcgagtgagggacttcgttgtgggtcgacatgactacggcagcatcaaatttttcggggagacggacgtgaggtgcctcgatctggagtcaattgtggagtttaacgaccgggaggttattgtgtacaaggacgatagcaagaagccccctgtgggcgaggggctgaacaaggctgcagaggtgactctactgaacatcaagtgcgtaaacaagaagaccggggagccgtgccagggggcaagagtggagaggtacagggagatgctggtgaagaaggcggaggagcagggcgcagagtttgtgtccttcgacgctgtcaagggagagtggaagttcagggtgaagcacttcagcgcctacgggctttggtgaaatcctggggagttaagtagtttgtttgttctgatggaacaacgctttacgctcttgtcaattaccatgcttggatctgttgtgctgcttctgtacaatgttgctgctgttaaaatgcttgcaaattgcactgctctgctgctgaaaacaggagcagcagtagaaactaccgcaacaggagggcgtgctacctgctactgttatgtattattattattatactatattctaagtataataagacttagttttttaaatacatgaatattactttatgcacttagatatatgctatgtatggagagaaaataattatat

SEQ ID NO: 37528 - DNA, 2193 bp, Zea Mays
aaagcgcataaaaaacggaaagccgttctcatcttgccctcctttttagcttttagcttgcgccttgcgttcgcggaaaaggctcatcttttcaggtggaaggagcgattcgtctgtgcctgcgcctcgccgggctcgtgccgctgtaccctccttctccaggagacctgtacggtgaaggggcgttcccgcgccaaacgggaagcaaagctcgctcgcgccctttttttcggatcatataacgccggcgcctagctcaaacaccacagctcgctgcctagatctacgcggcagcggcggcggcagaggagagggacccggagctgcgccatgggtcctaccgccggctccggcgaggacaaggctatgtcagagctccggaaaaaacatcgtgtggacctagagagactaacaattacatcgcgaccattcaagacattgtcattctttgtgttagccattgctcagaatttggaaagaacatgttcatctgttctgaaaaaaggttaccagttaaaaaccgcaatgcttttggttgttgctacttggcttctgctcatgttcactgatggcctgaatgaaaagcatctgcaggagctattttggtatgtcaggtttggattgtggtggattatactaggggttgcttcatccattggattaggttctggtttgcacactttcataatgtatttggctccccatgttgccctgttcactatcaaagcggttcagtgtggtagggttgatttgaaaagtgctccttatgacactattctccttgaaaggagaccatcctggttagagaaagactgtctgcaatttggacccccaatttatcatgaaacaattccattcagcaaaatactgcaagaagtttatcttgaagctattctttggggcattggaactgcacttggagagcttcctccatattttctctcaagaacagctagcatgtcaggccgcataattgatgaattagaagatttggatgcttccatttcagaaggctttctatcatcagctttacgtcaggccaaacgatggctcatgtctcattcacagtatttaagcttcactctaatattgctacttgcttcggttagtttcattctgttgatatttcaaatttgtttgttcaagtcatatttcagtatgttgcatttcacctagttgtcgacttgccttgtagcaccttgctaattgaggatgttaaggtgaaggctcatttaaattgttgaagaaactcacattctttctttgctgacaaaggaaacattttaaaccatagatatgacatgccttattgttaaatattttgaatttatttattggtctcaccaaagttttatacttattggcatactattcctttccttatgaatgttaagaaactgtatgacaatttcttctgtcaggtgccaaaccctctatttgatcttgccggtatcttgtgtggacaatttaacatccctttctggaagttttttctagcaactttgattggaaaggctattgttaaagtttgtatccagactacattggtgattactctctgcaataaccaacttcttgatttggtggagaaaaggcttatatgggcatttagcaatgttcctggagtggcatctgtccttccatcttttgtttccaaactgaagatggacaaaaataagtttttatcagcccatgttgctgcatcagcttctacttctgttaagggaaagaagtggaatctgtcattctctttggtctggaataccctggtgtggctcatggttgcaaacttcattatccagatagttacttctacagcacagggttatctcaggacacaacaggagcgagagatcagtaaaaagttggaaaccgagctttctgcctcttaacgttcttctgcgcaccaaaatgattcgccctgggaaagtccaatacattgtacataaccatgcatcaaccatcagctcaagactaaaggctctcctgcagtattgtggtgcactgactattggtctatttctttcgaaagagagagagaggaaagctattagctagtgctagaaatataatggtgccccacttacaattgtaagtttgtggccttgtacatagcaacaaatattattaggggacaaaaatatctaatgatacaagttaatacctgattttgtctccgcattggcaatgatc

SEQ ID NO: 37529 - DNA, 974 bp, Zea Mays
atgagttggagtcgcgggcgaggtggatccgacgagatccatggcggagggcgaggaggctccgatggatctatggctgggggcgaggtagctccgacgaggtacatggcgcgggtggaggcagctgcgattccgacgaggtccacgtcggagggcgaggaggccgtgactggatctatggcggggggcgagtgggctgctgcagggtccatggtggaggagaggaaggtccgacgggatccatggctgggggtggtggagctggctgcgacggtatctacggcggggggcgagggtgtcccgacaggatccattttcgctgtccggcgacagcaacctgttgtgaagcaggcgggtctggtgttccactgcgcgaagggcatcatttcctctcctatggttaagttgattgaaacttttgctgttttttgcaagtctcagagaactgcttatagggagaaggtgttaattgaagcagagaaacaatttctgcatgatttcacttttttcaaggaaaagttatcagttgattttggccaaatagtggatgtcgaatgcattgatagtacttgccaagttctgtgtgacaaggtcaggggttgttgttcaatttgcaagtcaaggtgtactgaagctatcatcgattctctaaaaattttggctgaagcaatgactattaagcatcagaagtttttgaattccaacaaccttctggcgaaagatatggatattaagtcagatgagaaagctaccaaaattgataccaatgtgcagccagttgatgttaagtcgaatgagaaaggggctggtgtggacattgttgaggcttctcatggaaaagctcatgtggtttttagctagatgatgctggggttatggttaatgaactactacttactactaattaccaggatttccaggagaacaggttgttgatgtcatttgttaatttccatgagcaagagaagatctct

SEQ ID NO: 37530 - DNA, 576 bp, Zea Mays
caggaagaaaaatgtgcccttgttgcttctcgtgacaatcttgacaagctatatcgagactccagcaactcgttgaccatcctggagaggagtcatcgctttaccatggaggagttagacaatcatcgttgtaagttgcaggaatccacgaacgacgtgatccgtcttaggcagttgatatcggctaaagatgccgctatcaaggaactgcgtgcttccaagaagtccatcgcccaggagctagagaccgcccagctggctgtcaaggttgctgaagaaacttccggtactctgagggcccagcgtgacagagccatggataaagccattcgcgcagggcggatcttgatgaggaggcctggtgtgactgttcctgatgacataaagggctgatgtaaacgctgctcccgattcctcaagtcgcccttcttcgtcagtcgctcctgagaagaatgttgcgaaatagaaaaacattgcgcgtttgagcgcgcggttatcgtgctcagatatttcgttagaggacacctgcttgatatttgaatgctactgttatgcccctgttgtttataattccac

SEQ ID NO: 37531 - DNA, 1316 bp, Zea Mays
ccccaatgaatccaccgcttcgtcgatgtctcttgatgatttctgtcgtcgaatcgaaaattcaaaggctgtaggtcgatgctggtggcgatctagtggctagtacccatatactacaaattctttcgcagatctagcggcctgtagtagtatggttcaaaagacttcgcctttaagtttgccatttgggcgaagttcgcgtgagccaaggtaccgcgtcgagttccatcctgttgattcgccattccatccagagaatggtcaggaatcggtaccaatggctagtcatgaggggaagcgttataagtgctttctaccagttgaagaaactaaaaccatgaagtcaatgctcccacaaaatgcaactaatattataatagaaagtgaaaggagaattaagccaaaggagccagatgagttacttgaggttctcaaggatcagtgtttctacaggcacgaaggttggtggtcgtatgaattctgttattatgggaaaatcagacaggtccatgtagaggacggtaaggttatccaagaatttgttctaggcgaattcgatgacgacgcgactgctgcataccatgaaaatagcacctctgagttagctgacgatgaccatcacgtgaaagatatatctaagaggtatcatgttcacttgtatacaaatgggactgtatgtgatctcacagatattccccgggagacagaggttagatttgtctgctcggagcctactgtgctgattagttcagtcaaggagatctcttcctgcaaatatgttgtaacaattcaaagcccgatgctttgcaaaaacccgttgttccagcaagaaaaacgaacccttcccatccattgcaatgaattacctgctaaagcagaatccggtgctgaggatggtttgcttccaaaagaagcgcagatttccatcatccccgatcaggatgagctgcatggttttccagcttatgctacttgatataatgatatgccttcaatatttatttctggtgtagaaaaagcacagttttggaggcccagtggcaactgagcaacgctatgtattactctctccgttcttttttatttgtcgtggtttagttcaaaaattacgacaaatattggagaacggacccatagatcctacagcagcggctccttgtaaagcaggttgagacgatcattctgcagtgctaattatttaggaggattacgaaggtagaaagtttctcagtattagtaaatgtaacaagtttgagacagtaacatttgcttgaaatgtctagtctataacaaggacaatactgcattcttgaaat

SEQ ID NO: 37532 - DNA, 686 bp, Zea Mays
atggatggaaggggatcgcgggggcaaccgattgaagccatggatgcggtagcggtcataaggaatgaagcactgttacttcttacttatttgactcgggatgcagaggaaattcaaaaaattgttgtatttgagggtgtgtttgagaagatatttagcattatcagagaggagggctattctgacggaggtgtagttgttcaggattgccttgaattgttaaataatttaattcgacacaacgcgtcaaatcagatgcttttgaaagagacaatgggctttgacccattgatatcaatactaaagattaggagaggcagtgcatttaattttacccaacagaagtaaatctcctcgctgctttaaatactgtggaattgcttttgatggtgggcccatccggtgaagcaggtaaagatgctaacaagaatgcaaatcaaactgcattggctcagaaaaacattctggaccatcttcttttgttgggtgttgagagtcagtgggcccctgtcgctctccgctgtatgagaaatcctaatggccaggcattattagcatcaactattgctccacatccaaaccaaggagatattcatgaacctgctagtgacatgccttttggaagtgtacttctgcaagctctggtttctagtgatgtcaatggagatatggaggtgaagacttga

SEQ ID NO: 37533 - DNA, 590 bp, Zea Mays
cagcgcgcagcctgattcggagtcaaacccggtggcggctgtgtccgaggtcgccccggcgccgcccccagagaccgtcgaaagcgcccctgatgcccccgcagccactgcggccggcggtggcccgtcgccaactgctgcgccgagggctgaggatcctgtgaagatggcggcggagccggcagcggaggatcccacgacggctgggtcttcgcaggtggcttagtgggtgtgggtagttagggaattttgtatatgttgctgaaccttggttgctgcgcaggttcaagattttgggcctgcgcacgcaaccgctactgctaattttttggcggcttcgaccgtggatggtgggaatgaatcagatgaatctgcgtctaagttttctgattttggtgactctgggagttcggttgagtggactgaagagtcgtcggatgaggacttggattactttgcggccttggatgtggcagcggcggaggctttgccgcgtgctgtggacgctgaagttgtgcctggtccaagtgctaggcgtaggcggcgaagggcggttgcgaagcgtagagtgagtgaggcggacggcggtc

SEQ ID NO: 37534 - DNA, 340 bp, Zea Mays
tttcatgcttggaatggatgttgattgctacctcgactgtttagctaggttagaagagcatgattgtcgttggtaacaatatatcgataactagtgtttctgtataaaattgtacaacgcctcgccggctaggtgtttaaatccgatatcgcgtaacactatttaggtttgtaatatttccgttgatatgcattcatgtgcataatgcattccattcaggtacgttaaataatcgcgtgatgcggaagaagacacaagtcgaccccaagcgtgggctactctgcctgatcaagtgctaggacaaggatgatcatcaagtggacgtcgcctaacaaacact

SEQ ID NO: 37535 - DNA, 3892 bp, Zea Mays
accccacccccaaaaccacacgaacccagagagtggattataaataagccctcccaaaccccttccatttcccgtgctcctctcctcctcctcacctatcatcgccgctgcgccgtctcctccgctcccgtcgtccggaaagatggcgtcccacattgttggataccctcgcatgggccccaagagggagctcaagtttgcacttgagtctttctgggatgggaagagcaccgctgaggatctggagaaggttgctaccgacctcagggccagtatctggaagcagatggctgatgctgggatcaagtacatccccagcaacactttctcgtactatgaccaggtccttgacaccactgccatgctcggcgctgtccccgaacgttactcatggactggaggagagattggatttgacacctacttctccatggccaggggcaacgccactgttcctgctatggagatgaccaagtggtttgacaccaactaccactttattgtccctgaattgggcccaaacaccaagttctcctatgcttctcacaaggctgttaacgaatataaggaggctaaggcgctcggtgttgataccgtgccagtacttgttggaccagtctcgtacctgttgctctcaaagcctgccaagggtgtggagaagggattccctcttctttcccttcttagcagcatcctcccagtctacaaggaggtcattgctgagttgaaggcagctggggcttcatggattcagtttgatgagcccactcttgtcctcgaccttgattctgacaaattggctgcattctctgctgcatacgcagaacttgaatctgtactttctggattgaatgtgcttgttgagacttactttgctgatgttcctgctgagtcctacaagaccctaacatccctgagcagtgtgactgcttatggttttgatcttgtccgtggaacccaaactcttgggcttgtcacgagtgctggtttccctgctggaaagtacctctttgctggtgttgtggatggacgcaacatctgggctgatgatcttgctacatctctcagcactctccagtctcttgaggctgttgttgggaaggacaagcttgtcgtatcaacttcctgctcgctcatgcacaccgctgtggatcttgtgaacgagactaagcttgacagcgagattaagtcttggcttgcttttgctgcccagaaggttgttgaggttgatgctcttgctaaggcattggctggtcaaaaggatgaggcttacttcgcagcaaatgctgctgctcaggcctcgaggaaatcctcaccccgtgtgaccaatgaagaagtccagaaggctgctgctgctctcaagggctctgaccaccgccgtgggaccaacgttagtgctagattggatgcccagcagaagaagcttaacctccccatccttcccaccactacaatcggttcgttcccacaaaccgttgagctcaggagggtccgccgtgagtacaaggcaaaaaagatctctgaggaggaatacgtcactgccatcaaggaggaaatcaacaaggtcgttaagcttcaagaagagcttgacattgatgtgcttgtgcatggcgagcctgagagaaacgatatggttgagtacttcggtgagcagctctccggttttgcgttcactgccaatggctgggtgcagtcttatgggtcaaggtgcgtcaagcctccgatcatctacggtgacgtgagccgccccaaccccatgaccgttttctggtcgaagacggcacagagcatgacgtctcgcccaatgaaggggatgctgactggcccagtcacaatcctcaactggtccttcgtccggaatgaccagccgaggtttgagacttgctaccagatcgctcttgcgatcaagaaggaagtcgaggatcttgaggctggtggtattcaggttatccaaatcgacgaggctgcactgagagaagggctgccgctccgcaaggctgagcatgcattctacttggactgggctgtccactccttcagaattaccaactgcgagatccaggacaccacccagatccacacccacatgtgctactccaacttcaacgacatcatccactcgatcatcgacatggacgcggacgtgatcaccattgagaactcgcggtccgacgagaagctgctctccgtgttccgcgagggcgtcaagtacggcgcgggcatcggccccggtgtctacgacatccactcccccaggatcccgtcggctgaggagatcgccgaccgcatcgacaagatgctggcggtgctggacaccaacatcctctgggtgaaccccgactgcggcctcaagacccgcaagtacacggaggtcaagcccgccctgaccaacatggtctccgccgctaagctcatccgcacccagctcgccagcgccaacggttgcggttgcttctgcctcttcttcggctgttcctctgcaccatgaggcggcgccggcgccggagaaggaggcgagacagggaccggcggctgccacgaccacgggggaggagtcttcggcccaggagcagcacccggcgtctggtgtggcggtggtgctggggccggcggggatggaggccgacgcgacggtggcttaggataagtacgtggcggctgtggcggggacggagagcgacgcggtggtggcggcggggacggaagccgacgcgacggtggcttaggataagtacgtggcggctgtggcggggacggagagcgacgcggtggtggcggcggggacggaagccgacgcgacggtggcttaggataagtacgtggcggctgtggcggggacggagagcgacgcgacggtggcggcggggacggagagcgacgcgacggtggcttaggataagtacggggcggctgtggcggggacggagaccgacgcggtggtggctgcggggacggaggccgacgcgacggtgacttaggataagtacggggcggctgtggcggggacggagaccgacgcggtggtggcggcggggacggaggccgacgcgacggtggcttatgataagtacggggcggctgtggcggggacggagagcgacgcggtggtggcggcggggacggaagccgacgcgacggtggcttagtataagtacgtggcggctgctgggacggagagcgacgcgacggtggcggctgggacggaggccgacgcgacggtggcttaggataagtacggggtggctgtggcggggacggagaccgacgcggtggggacggagaccgatgcggcggtggcttagggtaagtacgtggttgtggtggcggcggttcaggagcaggaatggaaggttctgggcgcgatgggtgccgacgtggttgaggtggtagaggaggcgcctgcgttggcgatgggttctggcgtgtcagcggcggcggttcaggagcaggaacggacggctctggcggcgatggacgccggcgtggttgttgttgtggaggaggaggaggtggcgacggcgacggagtcggcgagtgcgacagcgcggcgacgatggggagcgtgatgatgagcttctcgccctcgaacctggcgcggacgccgtcggagtcgcagttgtcggggaggcggaggtccttcttgaacctggcccaccggccgcccctggcgggtcgctcgccggtggcgcgcagcacgccgtggttgtccacctgcaccctcacctggtccttgcggaaccccggcagcgcgatctccaccacgtcctgctcctcccctgccagcttccactccacctccgggtcgaagtcctcgaacacccgcgccgccgcgcgctgccgccggtccatgcctgcctatttcctcgccgccggagaccgaagctgctcgccc

SEQ ID NO: 37536 - DNA, 1856 bp, Zea Mays
gctgcttggactcgtcagagaacttgcaagacccgacagctcgtcctgcttcgtactaccagtagtagcacgtaaaccagggcgccacgccagccggatcggatcgtcttggatgtgggcatgtggctgtggacgagacaaaagtctccgcccgtcggccgtcgcccgccaaaggtctcttcgatccggcctctccgggccacccagtcggccagtcccacacaaggatggatcgctagcgccgatgagctatactctttgctcactgtactagtcacacgattggctacacgacacgagctcagagctctcaggtttcccaacgccggctgctggccaatggcgcagcaccacggcagccactccctggaggtcggcggcgtcggcgccggcggcgtcgagctcgacgacgacggccacgccgcgcgcaccggcaacctatggacctgcttcgcgcacatcatcaccgccgtgatcggctgcggcgtgctggcgctctcgtggagcgtcgcgcagctgggctgggtgggcggccctgtcgccatgctctgcttcgccttcgtcacctacctctccgccttcctcctgtcccactgctacaggtcccctgcctccgatgatggctccctgaaacgccagaggaactacacctacatggacgccgtcaggacgcacctgggggagaagcgcacctggctctgcggcctgttccagtacctcaacatgtacgggaccgcaatcgcctacaccatcaccacggcgacctgtctcagggcgatcgtgagggccattgtcctactggagatacaggacacgctcaaatcgccgccaccagagagcgagacgatgcagaaggggaacgtgctcgcggtcctggccaccacgttcttctacctcgccgtggggtgcttcgggtacgccgccttcggcaacgctgcgccgggcaacctgctcaccggcttcggcttctacgagccgtactggctcatcgacttcgccaacgcctgcatcgtgctccacctgcttggtggctaccagatgttcagccagcagatcttcaccttcgcggaccggtccttggcggccaggttcccgaacagcgcgttcgtgaacaaatcctacgccgtgaaggtgcccggcgcgccggcgtcgtggagctacagcctcaacctgcagcggctgtgtttccggacggcgtacgtggcgagcaccacggggctggccctcctcttcccctacttcaacgaggtgctgggcgtgctgggcgccgtcgtcttctggcccctcgccatctacctccccgtcgagatgtactgcgtccagcgcggggtcctgccgtggacgcggacgtgggtcgcgcttcaggcattcagcgtcgtctgcttcgtcgtcggcaccttcgccttcgtcggctccgtcgagggagtcatccgcaagaggctcggctagttgtggtattagcgccttttctgtcgtcaaccatgtcatgaatggtggaagtgtgtaaagagagtgtactgtatctaagttttttttatttccctgtgttcgcttagccatgagcccatgaccatgatgattgatgaatatatctacccgtgcgtgtttagatccaaagtttttttgtgatgctgtgtcactgctacgtaaatgatttttgtaacacttaatttatggttgttcagggagtttttcagataatgccactcttattaaagttacagagaatacatatgcaaatgaaattatttgggtcaatcaaaaatttcatacggaatgaacaaaaaagttcaaaatttagtgatcccactgaacttgaaaatagctgatagttgattataacttgctcatggaag

SEQ ID NO: 37537 - DNA, 2674 bp, Zea Mays
gcactctcgtgcacaagactagcagagagaacataatccaaagatgggctggagaccacacgttgtctctgcgtcatcatccgcactagtgcttcagttcctcgtgctgctgctgcccctgcccctgcccctgctgtccgccgatgcatcgtcaagccaaacgacgacgacgatctacgtcgtgtacatgggcgagaagaagcacgacgatccttccgtcgtcatggcgtcgcaccatgccgcgctgacctccgttcttgggaggtagcaaggatgaagccctccgttcgatagtctacagctacaagcacggattctctggtttcgcggcgaagctcacccagccccaagcggaggagcttacaaaataccctggagtcgtgagcgtgaagccaaacgcgtaccaccacgtgcacacgacccggagctgggattttcttggcatgagctacggcgaatcgccgtcgttgtcgtcgtcgtcgcggctcctcaggaaggccaagtatggcgaagatgtcatcgtcggcgtcatagactcaggcatctggccggaatccccgagcttcgacgacagcgggtacggccccgtgccgaaacggtggaaaggcgtgtgccagaccggccaggcgttcaacgcgagcaactgcaaccggaaggtcatcggcgcgcggtggtacggcgccgacgtcagcgaggaggacctcaaggccgagtacaggtcggcgcgggacgccaacggccacggcacgcacacggcctctacgatcgccggctcgccggtgcggggcgcgagccacgctggcggcggcctagccgctggcatagcgcgcggaggggcaccgcgcgcgcggctggcgatatacaaggtctgccacgacgtcggcggcggcacgagctgcggcgacgcgtcgatcctcgcggccctcgacgccgccattggggatggcgtcgacgtgctatccttgtcgctgggaggaggcagtgacgaggtctacaggacgttgcacgtcgtggcggccgggatcaccgtggtgttctccgcagggaacgatggcccagtgccgcagtccgtcaccaacgccctgccgtggctcgtcacggtggcggccaccaccgtggatcgcaccttcccgacagtcgtcacgctcggcgacggagagacgaagctggtggggcaatcattgtattaccgcaaccgatcggcggcggcatcgacgagcaacgacgacttcgcttggcgccatttgatggctttcactggctgcgacgacgcggagaagctgcggtcggaaaacatcaccgggaaaatcatggtatgccgagcgccggagttcaagtccaactatcctcccacggcgcagtttagctgggccagccgagccgccatcgccggcggggccaagggcgtcatcttcgagcagtacagtaccgacgtcctcgacggccaggcctcctgccaaggccacctgccctgcgtcgtcgtggacaaagaaaccatatacacgatcctaaatagcgacagcaatgtggccaggatttcgccggcggcgaccatggtcgggccccaggtcgcctcaccgaggatcgcgacgttctcgtcgaggggccccagcgcagagttcccctccgtgctcaagcccgacatagctgcccctggagtgagcatcttggcagccaagcgtgactcgtacgtgctcctgtctgggacatccatggcatgccctcatgtctccgcagtcgtcgccttgctcaagtcggttcacccggactggtcacctgccatgatcaagtctgccattgttaccacagcgtcggtgaccgatcgattcggcctgccaatccaagccaactcggtgcaaaggaaaccggccgacgccttcgacatgggcggcggcctcatagcgccggacagggccatggaccccggcctagtgtacgacatccagccggaggagtacaaaagcttggacgaccgcgtcgaccgcctcaacctcccgtccatcgccgtgcccaacctcatgtacgactccgtcacggtctcgcgcaccgtcaccaacgtcgggccggtggaggcgacgtaccgggccgtggtcgaggcgccggccggcgtggcgatggacgtggcgccgccggtgatcgccttcgagagaggcggcgtcaggaacgccacgttcaaggtgacgttcgtggcgaagcagagagtgcagggcggctacgcgtttgggagcctgacgtggctggacgacgccaagcggcactcggtaaggatccccgtcgccgttcggaccgtcgtccgggacttcgtcgccgatgtgtctcgatgatgaacactgaacgatgtgtctgtcaaagaagaacaccgtctcgatgatcgtccatatatgcgacactgtgtcactgtgtgtgaacactgaacaacgtgtcaaaactgaacttatgttgccaatttatttgcaagcaacaaggcgctcccagctgatcttgtgcctttatgcagtttatacagttcaaataaactatgaggctcagcctagaattcattacaaagcataattattgagcgagagacccgatcgatgatagttttgtctgtaattcatacatgggcactctcctatttgcttgcatgcttcgttgcaaatacaaacaagttttatgtggatttgtgtgcaca

SEQ ID NO: 37538 - DNA, 1332 bp, Zea Mays
ctgcaatgcatttcttgtttaatgcgtggcctcatttagatatttgttggtgggcttgaccccaatgtcactgaagataccctaaaacaagttttttctccttacggtgaagtcgtccatgttaagatccctgttgggaagagatgtggttttgttcagttcgttaccagaccttctgctgaacaagcgctgctaatgctgcaaggggccttgattggtgcacagaatgttcgactttcatggggtagaagcctgtcgaacaagcaggctcagcctcagcaggaatccaatcaatggggtgcggctgctggtgctggtggctactatgggggctatggacaaggttatgaggcttatggcagtgggtatgcacaaccccaggatcctaacatgtatggttatggcgcttatggcggttatcccaattaccaacagcaaccagctgcacagcagcaacagcaacaacagtgatgcctgtttgctcgggtaggtcattgggttgtcgcgacggaattaattaaatattatttcaggacactctcatattgcattcttgtcaattgaggtggttttgaaaggctcctgattttgatggccccatggcacggtttcatctatttattagtatatgacatatatgcgctgtgaacaagtggcgctctactgtgattgctgtgttgagacatgctttcttagtttctttccatgtttctcggatctgttgtgttacctttattactgtgtatttgcatatctactgtgatgctatatatgcactgtgccgtttgtttcctattccatttttttctcgttactttattatagcgttggattctttcttctatcacaacgaacagccgtgggcacatgggcatgcacgatgtcatgacagaatgtgtcgatggcaacatgggctccatcttttatctgtttcgagtccttgacatcaggataatgtaatgtgggttttgttgccgctgtgactgatatggaagcatgagctgccatcgttttcatggccgtccgagtctgaaaaatacatttacagtacgatgaatccttttcattcggtctattattcggtctattaggttaattcggtttggtttatttgggtttgtgaaattttgggttttgaaaaatgagaatcgaaattttcaaaattattttagaaaccgaatctgaatagactcacaattttagtttggtctatttagtccaccgaatagacccaaatagtagagagactaatatcttttgttaaaatatataataaataattaattgaaagtactattattaaaaaaattataaaaatatcatacaaagata

SEQ ID NO: 37539 - DNA, 728 bp, Zea Mays
tcagaaaaagacataggatgacaggattgcgcaggagatccaaaagaagccagaaaaggagggaatggactcagaactggaaaagaacaaaacgatggatggggatgttggtaactcaagatcctatggtgatccagttgcctctgctttaaacagtacaaatttcaatatcgaggaagaaaaggacaatgatttcaagcgcacctcaagaccaaaaaataggttgtaaggatgccacaaaaatgatgcttgttgttaaggagatattcacatgccaaattcaggttgaacttccaataaccaatccaatatacctcatgctaggcacatcatttggttcctcagctaaaggaactgggcttaaagctcttgaatttgccctctccatctgtgacagttttgatatgtatggcttcaccgtagacccaggttacaaggaatggacaaggtacttctcagaggtaagaaagggacacactccactacatggtagagcatattatcagatgatggaatgtcttggtctggtgaaaatccattcaccgatgcgaggagatcctggcaggacagtgaggtggctgcctaccaaggctaccatcgaggctgctagagttgcttccgagaagttgttgaagagacctggtgctggaagtgatgatcctctggggacttgcaccatgataaagaagcgcaggaaagggaaggcgccaaacagatctggtctatga

SEQ ID NO: 37540 - DNA, 2753 bp, Zea Mays
cgcaaacccaaatccccgtgtgtccgggtcccgtcccaacggtcatttccgtccaacccaaacccaagtcctcaccccaagattttcaaaattcccgagccacagcggcacagcgcagagaagcgacgaatctcctacgaatccccaatcctccagtcgatctgatcccccaaacccacagctctcatcgtcgccgacggcgggcacaccatgcggagcgacgatgcaggcggcggcgggttccacgagctgttcgactccgtgcgccgctccatctccttccgcacgggcgccgccgcccttgacgagcccgccgcctccctctcctcctcctctgcctccgcgggcggtgctgggggcttcagggagcggatcagcaaccgcctccgcaggtcccgggggatggggttgctcggcatggcggccaagggcccctcgcccacgcgccgcctcctgccgcagccgcccccgcccttggccggggtcttggcctccgacggatgtggtagggtaggggggcaaggaactggcggaggcgaagagaacccgccgatccggtggcggaaaggcgacctcatcgggagtggggcgttcgggcaggtgtacctcggcatggacctcgactccggcgagctcctcgctgtcaagcaggttctgattggaagcagcaacgcgacaagagagaaggcccaggcacatgtaacggagctcgaggacgaagtgaagatgcttaagaacctctcccaccctaatattgttaggtatattgggacggcgcgggaggaaaacacgctaaatattctgctggaatttgttcctggaggctcgatccagtcactacttgggaggcttggatcgttcccagaggctgtcatcaggaaatatactaaacagcttttacatggactggaatatttgcatcgcaatggaatcatacacagggatataaagggcgcaaatatacttgttgataacaaaggttgcattaagctagcagattttggggcatctaagcaagtagaaaagttggcaactgcaactgctgccaagacgatgaaaggtaccccatattggatggcaccagaagtcattgttggaagcggtcacaattgttctgctgatatctggagtgttggttgcacggtaattgaaatggcaataggcaaacccccatggagccacgaatatcaagaggtttctctactttattatgttgggacgacaaaatcacacccacctataccagaacatctctccacagaagccaaggattttctgttaaaatgcttacagaaggaaccagaaatgagatctgttgcatcagacttgttgcagcacccatttgttacacgagtattggaagatttttgtcagcttaatcatgctggacccaaggaaacctccaaaaatgagcttccttcctatgtagtgcctactgttgactcggacttgagtcgccctggcaagctacgcaatctgaattcttacaagttatcagacaccagaccattatgggatcagcgatgtaatgatgatgatatttgtgagtttgctgacgaagataatgtcccaatggttggatctagcttcaatcctatgtctgaaccatctgatgaatgggaaaacaaacttgacataagcccagaacaacaatttagtcagtcaagggagtttggtggattagccaaacttgcagaaagtcagatgtctgaaaacgattttactttcccttgtgagggaagctgtgaagaggatgatgaatttacagaatcaaaaataaaggaatttctggatgaaaaggccacagatctaaagaaactacaaacacctttatatgagttttacaacacagtgaatgctggagtttctcaaggagttagtgatgtttgccgagcaaacaatgtaactaatccccagttaccccctcgagcaactaagatggtgggaggtgcagctttagagcccatttgtgttaatctgaaaaatgtcaatcccaagagttgcacaaggcgcttctcaagaggcagcgtggagagcaatcatgtcttgagagaaatagcttcacctgaactcaacatactcgaggacaaggtccatgatgatagtgaagatagtccaagcttgagcttttcggaaatacagaggaagtggaaggaagagttggaccaggaacttaaaagagagcgaggtcgggtggctatggtaaagcaccatcaccgtcctcaacgagccggagattgactggaaaacgagatcgcagtcctgtgtattgagtagagaatcagaatacaacacagcaggactcgtatatttgactaaccgcacagtgtcatcgattggtggccattgctagtacagtgcagtgccaaccttcgtatgacctgacagaacctacttgacgaccaaatccttttggtccttgtaaggtaaattaggttgagcgagccacttgtaagcgcactgtgcatcggaggctatcatgatctgcgatgcctgccttcgcagccctttattgccagcatgaaatcattggggtggcgatttttatgcaatgttcaagcttcatgcaattttggatgacaataggtgcatgttgtacaattgtcttctctttatttttcaaatgtttgtaagtttacctgatgaccgagaatccataattcgttgaaccaaaagtatggaagtgttcgtctcgacggataatgctgattctcgacgcacgctggctaagagaatgctcttttgttggatcc

SEQ ID NO: 37541 - DNA, 1472 bp, Zea Mays
aaacaaaaaaagggccttcacttgactccacagccacagctagctgctgtggtgaagagtagcaggttcggcggccgggagggggcagccaacacgacgatggagcggttcggcctggacggcggcggtggcggtggcgagctgccgccggggttccggttccacccgacggacgaggagctcatcacctactacctcctccgcaaggccgtggacggcagcttctgcggccgcgccatcgcggagatcgacctgaacaagtgcgagccatgggagctcccggacaaggcgaagatgggggagaaggagtggtacttctacagcctccgcgaccgcaagtacccgacgggcctgcgcaccaaccgcgccacggtggccggctactggaaggccaccggcaaggaccgcgagatccgcagcggccgcaccggcgcgctggtgggcatgaagaagacgctcgtcttctaccgcggccgcgcccccaagggacagaagacgcactgggtcatgcacgagtaccgcctcgagggcgcctacgcctaccatttcctccccagctccacaaggcaggacgagtgggtgatcgcgagggtgttccagaagcccggcgaggtcccacctgcagcccgcaagcaccgcctcggcgcccttagcagcactaccggcaccgccgcgggcgattcctgcttctcggactctacctcggcctccatcggcggcgcgtcgtcgtcatccacgcctggcccgctgttcgcgtcggcggccgccgccgtggccaatgccggcgccgccgacggcgacaccagctcctactgcggcggcgctgccaaccatggcaacctggtcaccggccgtgagctcgtgccctgcttctccactgccaccattaacggccccctagttgccgccgcgctcggcatcgggcagccgtacaacgcagccccgctgccgttcgagcagcagccgccgcctccggccttcctgccgagcctgcgttcccttcaggacaacctccagcttccaccgttcctctcagcaggcggtctgggcggcggcggggctctccactggctccccgccggcggcatggaggtcaaggtcgagggccgctcggcgccaccgcagatggctgtcggccccggccagctcgatggcgctttcggctggagcttctagttcttcgctgcactacatggttgtgcccatctatctagctagtagtggtttcttcatgcgttgtacgttaagcttggttaatcaactgctagtaagtgactgggtcgtcgttctaagtaatgtagtaactgtgttgtagtctctcatctaactgcagtagcagctttatttgttcgtggattagatgtctcatgtgtgccgtgtacgaatcgaagcgtactagtaggagtttgtactcatagttcgtgcagtggatgctagctacaggctacaggtccacacggccgtttccatgg

SEQ ID NO: 37542 - DNA, 3022 bp, Zea Mays
gcagcagccacctgcagctacagtgatcgaccccctctatatctacgcacacatctccctgatctcgtcttcagttcagcctcgcaactgccaccggatctttcagcactgactgccgtcgttgctgcatcaaatctgtcttggcaggtgtagctaccagctagctataggtggctcgctggagagatgagggccggggggtgcacggtgcagcagtcgctgacggcggaggccgcggcggtggtgaagcaggcggtgagccttgcgcggcggcgcgggaacgcgcaggtgacgccgctacacgtggcgagcgcgatgctagcggcgcccacggggttgctgcgcgcggcgtgcctccgctcgcactcccacccgctgcagtgcaaggcgctggagctgtgcttcaacgtggcgctgaaccgcctccccgcgtcggccgcggtcgcctcgtcgccgctgctcggcgggcacggccaccaccaccaccaccactactacccgccgtccctgtccaacgcgctcgtggcggcgttcaagcgcgcgcaggcgcaccagcggcgcgggtccgtggagagccagcagcagccggtgctcgccgtcaagatcgagctggagcagctcgtggtgtccatcctcgacgaccccagcgtcagccgcgtgatgcgcgaggctggcttctccagcacccaggtgaaggccaacgtggagcaggccgtgtgcagcagcaccaccacaacaagcaccgcggccgcggccaccgctcccagcaaaaaccctaatcctagcagctctgctgccaccgcaagcccacctcaggaagccgccaaaggcaacaagctgccgctccaccaagcgcgcgacgaggacgtcgccgccgtcctggactgcctggcctcgcggagcaagaggagggtggtcgtcatcgcggagagcgcggcggcggccgaggccacggcgcatgcggccatggacaagatcaagagcgccgaggcgaagcacgacgcgctgcgaggcgcgcaggtcgtcagcgtccgcgtgtcgtcgttccgcgagatggcgagggaggagaccgagcggcggcttggcgagctgcggtgcctcgtcaggggcaggagggggcaggtcgtcgtgctcgtcgtggaggacctcaagtgggcggccgagttctgggcgggtcacgtcgtccagagcgggaggagagggtactactactgctccgtcgagcacgtcgtcaccgagctgcgcgccctggcgagcggcggcggcggcagcctgtgctggctcctcgggttcgggacgtaccaggcctacacgaggtgtcgggtggggcagccgtcgctggagagcctgtgggagctccagacgctcaccgtgcccgccggcagcctcgcgctgagcctcaactgcgccttcgacgacagcgtcttgctggccgcttttggccggcagcaagctgatctccagatgctgcggcggcgactgctccgccgcgaggatcgagacgacgaaggcggcgctgcctcggacgccgttcgtctcgtcgtccagcctcccttcctggctccagcattgccgtgatcatcaggagcccgctacccatcttacggatgatctcggcaagacatggagctccatctgcagcagcagcaggccgtcacagcgaacgacgacgctgcatttctcggcgccggtgtctccggcctcctccatctcttcctacgagcacggcggcggccagtcgcagcagcctcgccactcgtggctcctcgccggcctcgacgccgcgcaccacccgtggagacccaagcgcgaggccagcatcaggtcccacgactccggcgcctccaacggctccgtggaggtggagtgccgcgccaggttcaaggagctcaacgccgagaacctcaagctgctctgcggcgcgctggagaaggaggtgccgtggcagaaggagatcgtccccgaggtcgcgagcgccgtcctgcagtgccggtcggggatcgccaagaggcgcgacaagtccaggtcggcggacgccaaggaggagacgtggatgctcttcctcggaggcgacgccgacggcaaggagagggttgcgagggagctcgccaggctcgtgttcgggttacgcagcagctttttgtccatcaggcctggcggtgtcgtctccgcctcgtcgccaccgccggcctcgtcaggctcctccgaggggcacaggagtagtaagcgcccacggatgccggaggaggagccggcggcctactacctagagcggttgcacgaggctgtctccgaaaacccacaccgggtcatattcatggaggacgtcgagcgggctgaccgggactgccagctccgcatcaaggaggcgatcgagagcggggtggtgcggaaccatgctggtcaagaggtcggcgtgggcgacgccatcgtcatcctcagctgcgagagctttggcgacagcaggtctagtagagcttgctcgccgccgagcaagaaggtgaaggtagagatggaggaggccaaggaggagcgcgcaggtgaccatgaacacaaccaagatggtgtttccaagccgtctccatcttgcatagatttgaacgtggacatggagagtgatcaggcggacgagccaagtctcggtgatcagtgtctgctcacggccgtcgacagggccctattcttcagaagacaggacaactagtgactgacagtgtacattggagttgaaggctccgtggtcgttccaacgtgctcagttctgataagaacctagattagttgcatgggcaatagggcatccagtctaattggcattttctttagttcatgttttttaggtttatctttttttttgctgtcttcgttttagagaattggatcgctggtgtatttgggcttcactaaagacaaacatacagctgctgtaaatttacctgcagattctaattcgcagtaccatatccggccaagttcactctctttctttttcacctagagataagcttgcaatttcaagatt

SEQ ID NO: 37543 - DNA, 3038 bp, Zea Mays
cacagctgttcgctgttgctctctccagtagtcccgttgagtgacctcccctgcgcgacaactagggcgaccgccgccgccccacgcctgctggccaggtcttcggcggaccctttgccgtcgacgggcatccaccacaccaggcactggttgaaaacagattttgttggcgctcctggagttcatacttatgtactttcctttctcaaatcataacatatcttaggcagttaaagcttagctgaatgccaacttgcctccacgtgcaagatcccagaaacattgctatgtctcgtccgcttgattttgctgtgcttaattacaaaaatcaaaggcttgcggaacaactggaagtccacaaatttgagttccgtgctcttgagagtagatttaatgatttaaaagagaaacagaggacacataatgagacacttatcctagtagaaaattattgggagcgactcgtagcagagctgggtatagtccctgtttgcaaaagtgaatcttcacattcaagctgcagtacaggaaacaacaatatacggaagggctttttaaatggacttttagaggctggtgccagtgccacagaaagttcaggtttttccaattgtcaactaggaaatgacgtctcttcagaagaatcaacaacaattgatattctgcagaagatgttccttccatcaagtggtccatggcatgcgaataacgaggttgtttctgctgctctcaaaaagttgccagaaaatgaacacagcaggcaattgcacagtgctaccaatgatgtgttatccaagcttcacgtggtgatgcgtgcagtagataatcttcacttgaaacacatgcagttagcagggaactatcaaaaacaaagagattcgagtgcctggaacagagctgaacagaaacgtctgaaagaggagttgactagtgttgttgccaagttggaagaaagcaaacaaaaactggcagtactgaaagcacagggagacaataagcaagcaacaccgatccttgttcctatgctgggaaagaaaactgcagaaaaggtgggagataaacaaacagaactgcaagatcttgaagctacccacaaggagttaatggaatcgatttcaaagcgtctggaggaaattagaagactgcatacagagagaattggaattttgaacaatttagcgacttttcagaatatactgacggatttcaaaagcattcactcttccaaagcttttcaacttgtcaatgaccaacttcagaagtcacaagcagaactggatggtcaccaaacattgttagagaaattacaggttgacatggatacctttgtttggagagaaaggcaatttaatcaaaaagttgatttggctgaaatctcccagaaggtttctgcatactatgtatctagaattgctgatcttgaaaaggatgtccagaaactatgtaatgaaaagaatatgcttgtgctgaaacttgaaggggctttgagagaacctggtcggaatcaggttatctcagaatttaaagctctggtgtcatcgctaccgagggaaatgggtgctgtgcaaactgaactgtccaaacacaaggatgcttccttacagttgcattctttgcgagcagaagttcattcactttctagtatccgaaccagaaaggaacaagaaattgaagaaacatcaagatctgctcatgctggatctgatataagccaacttcaatctctggtccatgagctgagggaaaatacacaggagcttaaactatttgtggagttgtataagcatgactccgctgattccagacagctgatggaatcgagagacagggaacttgctgaattggctggagtccatgttctcagatattctcttaatgaaagtaaattagagcagcgtgtaattgcagccaatgaagctgaagcaatctctcagcagagactggcaactgccgaagctgaggttgctgaattagggcagaagctagaaacttctaggagaaatctagtgaaacaatctgatatactgaagtctaaacatgaagaatgtgaagcgtacatggtggagatcgagagcattggccatgcctatgaagacataatgtcacaaaatcaacaattgctacagcagattattgaaagagatgatcataataccaaggtatggcgacatggcgttgagattttcagtgggcttttaaaacttttcatggagggtgttaaagcaaaacagtcacacgatgctttgcatttggaagtgtgctcgttgcaaagaaatttgcagcatgcaagcactttgatggatctgtgcaaccagaaacttatccacctggaggacaagctaagaggttggtcagagcggttgaggagactgtcagaggatggaatgcagcaatctatttcattgggcatttctcaaacaaagcttaccggtatgcatggggaagctccaaagctcgggcaggcattgaatgttctacaagcgaaggttgggagcaatcggctggaagttgctgagctgcttatagaactagagacggagaggtggttcatacacacatttgctttttattctggcaactggtttcttaacacttggtctaacaagttcagtttttcctccaggtttagtaaaaagagattagacgatgatttggatctaatgtcaagcaaagctagttctctaagagagaaggcggataattctcaagtccttcaaaaacttctccatgaggctaaggagtacaggggaatactgaagtgtggtatttgtcatgacaggcagaaagaggttgtgattgccaaatgctaccatctcttctgcaaccagtgcatacagaagtcgcttggtagccgtcagaagagaaggttggcgcctgtgtcgcacacaccagaactgcctggtgctctactgattcccggtatatgtgcagcatctcagaggctacgttaccaaaaggttcttaggtctactgagaagcattcacagttcagtagtagatcacagttgccagagacattttccaacaagcagagatag

SEQ ID NO: 37544 - DNA, 1098 bp, Zea Mays
caagtgtttaatcactcaactcctatcacctaatgcagcatataagtgataaaattttgtaaacacaaggaaggtggcaaatgcaccggggcttgcctgggataacactaagtcagtgttgttagatgacgatcacttggtgagcatctcccatcctggtacatgatcaaatcatccacttctctggtttattcatcagcatcactttgagattaatccaactattgtcttccacatcacgtgatcaattaacgtacctaaatgatatgcaaaatgcatatgaatgaataagagaaggaatatcacaggacaaaataacgttgtatgacggtgaattaaacattgactagcaaggcattgcaatcatttataagtaccattagatatatatgatccactaagtataacaatcatgttttataacttaataggatctcacataaacatcacgaaacaataaattatcacaagttctatgttctacttagctaaagcataacacgaaaggctaacaatatttaggataatgaatcacctataacttaggataatgaatagaaatacttcaattaaattttaggactactaatctaggctattatgcacatcatatcagctaaacaagatgtcacactaaatgttccaacaagtaggttgttatcacatacaattagattccccacgactacatggaactaaacccaatacttaatggcaagatgtcacaaacagtcttaattaagcactagataggtttatacaacccaacacaacgatcatgttctcctacttactcgacctaatccgaacattaagaaacatccatatgcaattataagacttcattaatcaggccaagaaataaccaaatctagttacctacacaaaagaaacttcaagcaaatcgttttaatacttgctgattttggacagcaaaatagcagctatttgtttagctcataactcacaagatatttatcctaaaatagtaaactaggactttttggaaagcctatgaagtcctctacaacgtttgtattaccatgacaacaagattcgacctttagaaaggtcaaacagtgctaaacttaaattctg

SEQ ID NO: 37545 - DNA, 2406 bp, Zea Mays
ccttttctgaactgcatcttcacgagacatccttgagcagagcaccttttactctctcctccagcggtccagcctatccccgcggtctggggtcaacaacagtacaccgtaccagagcttctcaagggtgccagagacggagaggagaggaggactcgaggaggaacaaggagagctagccgctagcgtccccttcttcccgctgcgcctgcgcgtgcctgcctttattcgctttcgtgccgttttgcatcctcccagaagctcgcatcggatagcagctgggtccgtgccacgcgcgcatgctttgtggatagggtagcgaacccggccggcccccagtacgtacgctggattattgcgtaggcatctatccgggcgttgcttgcatggtcgtaggagtttgggatcttgtttagcttgatgctttgatttaattccttgtgacctgtaattaagcatatcgtgagagtggtggtggacggacgcggcggcgcggtgagcaatgcccgtggaggtggcgcgggcgtcgtccggcgtgtcgcaacgtcgtcgatcgcgttggtagcgcagtagtgccgtagtggtaccgacgccggccaaacatgccgtgtgcgacgtcgtgctcctgctgcgaatcttgatcctggcgccccacatgctctcctgcttccggctgccgcggccggtcggcggcggcggcggggacgcggaccagcaggccgcggcggtgtctccccggcgggggccgtcgctgccgttcgcggcgagcctgttcgctgcgtccccgtcgacgtcgacgtcggggcgcgggaggagcgcgtggccgccggaggcggacggcatggagaagaagcggtgggacagcatggagtcgtggtccatgctgctggacacggtgatggggtccggcggcgaggggtcgtcccgggacagcgggcggcgggaggagtggatggccgacctgtcgcagctcttcatcggcaacaagttcgcgtcgggcgccaacagccgcatctaccgcggcatctacaagcagcgcgccgtggccgtgaagatggtgcgcatcccggagcgcgacgaggcccggcgcgccgagctcgaggagcagttcaactccgaggggacgctgcggatgtacctgaacaagaaggacccctactcgctgtcggcggagacgatcctgaagctggcgctggacatctcgcgcggcatggagtacctgcacgcgcagggcgtgatccaccgggacctcaagtcccagaacctgctgctcaacgacgagatgcgcgtcaaggtggccgacttcggcacctcctgcctggagaccaagtgccaggccaccaagggcaacaagggcacctaccggtggatggcgccggagatgaccaaggagaagccctacacgcgcaaggtggacgtgtacagcttcggcatcgtgctctgggagctcaccacctgcctcctcccgttccagggcatgacgccggtgcaggccgcgtacgccgcgtcggagaagaacctgcgcccgccgctgtcgagctcgtgcccgccggtgctcaacaacctgatcaagaagtgctggtcggcgaacccggcgcggcggccggagttcagctacattgtgtcggtgctggagaagtacgaccactgcgtgaaggaggggatgccggtgacggcgcaccaggagctcaggctctggcgctccttcgccaagatcttcaggacgggctgcatcaccaacaacctgtccataccggtgcatgcgtgatccatctccatccttcttccttccgtaactgaagtgctgctgctgctgctgtttgcctaggaactactgctctgctactaagtagtagtgtgtgtgtgtgtgtcaaacaaatggcataaaaagacgttgtcggccgggaactaaatgtaatgtaactcgatcaaatttgtaaattataaaccactctgatctgatcatttaaatccaaaagaatcgacgcatcgggattcggaacaggcagaacaaccatgctacatacagatacagtacatggaagacaatcgaatgctatgctatacaccgcgattgattgattagtagcaatagcaagcagcgtccagcatcacaggagctgctcgtagcacaggtccagcgtcttcttggcgaagaactggttcaccttctgggtggggtggaaggagtcccagaagaagtacttgtcggcgtcggcgcacgtgtgggggctcttgtcgttgcacaggtaagacatctccaccttccccgtcgcgcagcagccctcctccacgttctccagccctgccatacatgccatgccagtcagcccatcagcaggtcgtcgtattgcattggagatcgatctctctctctctctctctctctctctctctctctctctc

SEQ ID NO: 37546 - DNA, 1181 bp, Zea Mays
ctctgacctgcgggtccgcactccgcttgctcagccagctatgggccgctattgctgaaaagagtaaaaaaaccgacagccacagggcagggagccagggccgctccgctcctgctcctgctcctgctcctgctctctctctctctctctctctctcggcgtcgattgggcgaccgccgccgccgcccccaggtcttcgctgggcccgtcgccggcgacgagcacccaccagtagttcagtcgagtagctgtcggactcggaacacacatgccggcgatggcaactgctcctgtgaaattctctgtggctacgaactccccatgtgtccagcctagcttgcccctgaggcgtacacctgccgccatctccttcccttgtcgtccatggtcagccgcaatgaactcatgtactggattgttgaggcgctctgacgtggttgcagccgcggggcaccagaagttgatgggatctttgaccactaacgagggactcaggtttggggtggttgtggcacggttcaacgaggtcgtgacaaatttgttactacagggtgccctggaaactttcgagcgatactctgttaaagaagaaaatataacagttgttagtgttcccggaagctttgaggttcctataacagcacaaaagcttgggaaatctgggaaatttgatgcaattctgtgcattggagctgtgattagaggtgacacaacccactatgatgctgttgcaaactcagctgcatcaggtgtactcaatgctggattatctgctggtgttccttgtgtatttggtgttctaacctgtgaagacatggatcaggcgctaaaccgcgctggtggcaaggctggaaacaagggtgctgaagctgctcttactgccattgagatggcctctctgttccggcatcacttaggctgacgcttttgcgtattctggtttctatacacgaggcaagacatcatttcttcctatcaagagttttggctaatagagcttttccgccgcggctagtataattattttcaattctgttagtccggtgctgattggttgctttctttctatgagatttgaaaagctaacgagacatgtttgtaaacctggcacaatgaataattgtcaccatgaacaaaatatggtcatgaataaggttgcacacttcatgaattgtgagatc

SEQ ID NO: 37547 - DNA, 992 bp, Zea Mays
ccgcagtcattgcagatttgcaggccgaatgcgagagccgggccgagaaaccttcccctacggcagtggaccggtgcttctctcgcattcggcctccccttcccaccctcaacagcgaagagcacacatggataccgccgtcttctcccccgccgatctcttccacggagtcgacgacagcgacgacgaccgagatgagatgcaaatctgctccgatggggagaagccggtggcgttggagtatcaggagagagtccacgacttccctgacatgtgggacaggagcgcttgcgatctttcttaggaaggcatttgagacacgtggggagatccatttccagtttgcacaccaaattgggacattgtcattgcaagtgatatcctactctatgtcaaacagtatgacaacttggtcaagacagtgtcctttcttttgaatgagtacaagcagaaggatcacaaatctggctgcataaccatcactgacaaatcaggtactttctaaaccaatttgatcttgtaaatcattagaggatgctgtgcgaaatgtttctttttcacttggcagggacacaaatatctgcaaaaccaccggtgtttctaatgagctggcgcagaagaatcggcaagggtcatcaatcactcttcttcgacgggtgtgagaagacgggcctgcaagtgcagcacctgggtgatcttgtgtaccttattagcaataaacaagaggcggattttgtggaaacgaagtcagacggtggcagtagtgaggggatgattttttgagtaggttttgttaagtcatattttgttcaatttcccccaaacacttgattttttgtttctctgattctatttgggatattctgtttgattctgttgcaagattgtttatgcactgaggtggtttataatggcttaagcatgcagcccagcgaggtgatctatgcaggcttaagcgtgctgctctcagtatctgcttttggctttctgca

SEQ ID NO: 37548 - DNA, 2202 bp, Zea Mays
aggagccagctgctggctcgtgagtgtcggcgtgtcgggccacaacccgaacgctgaaccaaggctcgggaccgcgacactcgtgtgtccttctcctcagatctcgccggcggcggcatgctcccctcgtccggcagcggctggggccgcggccgcggccgccacctattgctcagcagggccctagctctcgctgcactgctcgcgctcgcctccgcctccgagtccgaccacaagtacaaaactgaagagccagttaagctttgggtgaataaagttggcccttacaataatcctcaagaaacctacaactattacagccttccattttgtcaaccgtctgagaaccccacacataaatggggtggtcttggagaggtccttggtggaaatgagctgattgatagtcagcttgaaataaagttcttaaaaaacgtggagaagggcttcatttgtacacttgagcttgatgctaaaaaggtccagcagtttgctgatgccattgaaagctcatattggttcgaattttttatagatgatctgcctctttggggttttgttggggagtctgacaagaacagtgaaaacaagcattacctttacacacacaagaacatccttgttaaatacaatgataacaggataattcatgtaaatctcacccaagagtctcctaagcttcttgaagatggcaagaaactggaaatgacatattcagtgaagtgggtagcaacagatgtgtcatttgcacgccgttttgaagtgtacctggactatcctttctttgaacaccagattcactggttctccattttcaactctttcatgatggttattttcctaactggtttggtttcgatgatattgatgcggactttgagaaatgattatgccaagtatgctcgtgaagatgatgatctagagtccctggcgaggggctatcatcacaaccttcattgtgtgctatgctcttacatcgtttatttctggatatgttagtggtggtctttactcaaggagcggtggcaaaaactggattaaagcgatggttcttacagcatccctctttccgttcttgtgtttttcaattggtttcgcactgaatacaattgctattttctaccgctcattagcagcaataccatttggcacaatggttgtcatgtttgtactttgggctttcatatcttttccgttggtgcttttgggaactgttgttggtagaaactggagtggtgctcctaacaacccctgccgagtaaagactattccacggcctattcctgagaagaagtggtaccttacaccttctgtcatctcattgatgggtggcctgcttccctttggcagtatcttcattgagatgtacttcgtgttcacatcattctggaactataaggtgtattatgtctatggtttcatgttgctggtcttcgtcatccttctaatagtcaccatctgcgtcaccattgtgggtacttatttcttgctgaacgccgagaactatcactggcaatggacgtcgttttcctctgcagcgtcaaccgctttgtatgtgtatctgtactccatctactactaccatgtgaagacaaagatgtcaggcttcttccagacaagtttctactttggttacacactgatgttctgccttggtctaggcatactttgtggtgctattgggtatctagggtcaaccctttttgtaaggagaatctacagaaatatcaaatgtgattaaatccctgctacttactagcagcagaaagaccatatgtattgtcagtggaagcaaggcctgaaaaaaatggattttgatggtagaccctgaataggtttttgaaactgctgatgacttgaccccgttgttcttatacgcacatttttgtttgcctgcttattcctgtgagatcgtcctcatagtgtatatctgtggtagttgaggattagcctgaaacacctgttttcatcattttttcttcattttaattacttcattcgttaggatgtaatcagtgaatattgatgcggcgcgagtcgaattaggactgttcggacaaatcactgcctatacgagtattgaggggtcacgattataacaccgaagctatgacgagcggccgcccgagcagaatgacaggataaggagaattgtataggatgtctctcgtgatgttaacgaaatattggttttggcatgtc

SEQ ID NO: 37549 - DNA, 4189 bp, Zea Mays
cgatcccggttgggaatggcctaaacgaacgaacaaggccactcggccccatccggcatccccgacccccgagcgtcttctttcgtctgctcgctctgcgctcgcatctaccatggagactagggtctagggtttagtgcgccgctgcctacatcgccgccatcctcaacttcctacgggatcctgacgaggcgccgtatcatcctcaacgccgcgaacctccgctcccacgttatcctcacgcccaccagtagctctcggcctctacctcgttaaggcttgatatttgactgggacactgggcaaattttaacaagtttcagcaatggggtttgataatgaatgcatcttgagtattcaatcccttcctggtgaatatttctgccctgtttgccggacacttgtatatccgaatgaggccctacaaactcaatgcacacatctctactgcaaatcctgcttggcatatgtagtggcaaccacacaagcttgtccttatgatggataccttgtaacagaagctgattccaagcctcttgtggaatcaaataaaacccttgctgagactattggcaaagtcgcggtctattgcctgtataataagagtggatgccaatggcatggagagctatctgcctgtgtcacacatggtactgcttgtgcatatgggaactctcctgttgtttgcaatcgttgtgggacacaaattgtgcatcgtcaagtgcaagaacatgctcaagtctgccatggcttacaatctcaaacacaacaagctgatggtagtcaggtgcagctggcaacggcaacaactcagccagtcatccaagattcatcacttgcctcagctggatctgctgcagctgcagctacaaccctaacaaagccatcttcaactacagccacagctgtaacagattctgcagcagcaacaggaggggcagctggtgcaaccacagcagctgtgccttcttcagcttcatctatttctgcttcccaaactccaacagctgagcagtggtaccagcagcagcagcagctccaatactcgcaatactaccagcagcagcaccctggatccaacccttacatgcagcaacatcaacaatatgaccaataccagcaggcatatcagcaatacatgcaacctccaatgcaagtaccatcccaaaatgtggtgcaaggatctgcacaacctgcttcttatgttcagcctcaagttcagtcctcccaggtgatgatgcaagcccaaagtcagccccaggtccatccattgacgagtcagccacagcttcaacagcatccagttcaaccccgaccccaaagtcaccctcatatttcccatgttcaagcaccttcaggtcagtcgcagcttcatcaaccaattcagtcagcccaagttccacaggtccaaccaagtcaagttcctctccaaccatctggtctccaagtacaatctgcagcacatccatctgctcctactcaagttggtaatcagcaatttgcgactcaagcaatggcgtatcaggtccagccacatgtacaagctcaacctccgcagcagcaacatattgttgcacatcaacaacatccacatatgcaagctttacccctacagcaaaatattcaacctaagatgcagctaaactctcaagttcagctacagcctccacatgtccagcagcaagcttacccacaatctcaggtctatcctcaacagacacatcatatgcactcccagaatactacatatgcacagcagcaaacccaaggtgctttgatgcaacctgtacatgtgtcccaccaacaaacacatgtttctcatcatcctgcaccgatgcgtcctccatcgtcaggccatcagccagctttgcagcatcctcaggcccagggaattcaacatacatcacaacatgaaaaacatattgggtttcatgctcagtggccaacaatgtattccaacattccttcccaagcaccaccacagggattgtctgtgcactcatctgtttcctcacaatcagttcaatcataccagcaaggaatgtcttcatcacaacagatgcattcccaacctggtcagccatatacacaacagcatgttactggcaatactggacaacatgttcaaacttctgctggcagacctatggcccatcttgcaccaacacagcaatttcagcagcaacatccagcaatgcttagaactgagtcacctgctgctgggcactctattgggcagggtcctttagatcttgaaaaacatacttcaaaatcagggaagttggataatgcaactattgctgctgtcggtgaaaataaaaatagtggtcctgagtcagttgtcatgagacctacaaagtcacaattgggtgatgaaaacatgaacagcgaacacaatggttttgttggtgttagaaaagatgcagtgcaaactggcattgtatcacacaatttagatggttcaattaggagggatgggaatactgaccaggcaggcaattcacatggcccacttgtgcagggaggcaaagatcacaaggcttcagatgcatctactgatcatgagaaaggacgactgtttcaacaggcatcactgcaaaatgcaggggcaccgggctcttatgtgcccccaggtgtggtaccacatccatctggaccagataaaatgcttcctcagcatatgacgaatcatggtcatatgcatggtttctctgaaaatatccgtcctccgctgcaacaaccatatggtgtgtttcattctggaacgataacaaggccatttggagagaaccagattcagatgccaatgccacagcctgggggtatcagacctggtgatggtatgattcgtccttgtttggttggcccattacctggacatcatggtgcagtgttgccttcttttgatcttgaacgtttgggtcagccacgtcctcttggaatgttgaacagcaatgactttggtggtgaggggttcaacgcttcagggggtgcagcgtatcctgaaagacatgataataccgaagacagtcggaaacattttccagcaccagcccctctagatgatcagggcttgcgaagggaccctagacattttgagagagctttaggtagacctgatggtttccttgattcagtacctggaaggcctccatttgcaaaccacagaagtgcaggtttgcatgaggattttccaagaaagcaaaatgcaactgccagtcaccctgacttcctgtcacatggagcagaatttgatcatcacagggctattggaatgcctaatttcagaaatccaggcccatttgctcaagggacaagtggcggtcctggtggccctcctaaacaccagcttggctctggtgacatgcatccaggtgaccctcatcttgtcgctgaatatgctcagcatggatttcctaaaactgcagcacactttggtttgggtggattcttgagaaacgggaattctggttggtgccgaatatgcatgtttaactgtgggagtgcagagaatctggatttgcatgtacaaacaagggaacatcagcaatgtgcaatggacattgtcctgaaaatgaagcaagatgttgcaaaaaggaattatggagggcccaagtcattcaacaacaaaaaggtttctgggaagggccattttcgtgggaacaggcgctagtgttaactgattaaaattgatgtggttttgaaggttgctactggtgcttatggatgtgtcaatggcaatcgagaattgagatcttttcagacattctgttcatgcggttcagcgtatttgaagggaaacttaaactgcaaagtgtaggataatttccagcagagggctcctgtcatacttgcatgtttccctaacgatggtaaggatgacatgctttcataatgctgatggtggatgtgcatgggtgctgactactgtttgaacgaactggccacgccttggctctcattttctgccagcatcggatgtttttgactgaccccagggcaccttatatctattgttgtgagggttaaattgtaaaatttctggcccgtggttcattccttaccaactaatgcactcaggtgtaaaagaaaattcctgtaatgtatacacaaacatttatatacaattttgcactgtaaatatactaatattagtttcaatggagtgcacccacaaattaatgtacct

SEQ ID NO: 37550 - DNA, 1927 bp, Zea Mays
aataacccagaaataaaaatcgccgtggaggcgagtcgccgccggcaccgcccggcacggccttcttctccggcgaaggcggagctcgttacggggattccacatccgttaatcggtcccaccggatccctcgccgcctcccacgggccgggccgcgccgtggcgcgcgcgcaggccgagatgcggaagaggatggagagcgacgacgatctgatcgaggaggcaaaactgcgcaccgtctgaccctggcggattccatcaatctgccctgtcgcattgtgaagggatgcaagtactgcaaagctggtgctgccacttcttgcttggtgcgctttggtcatgacagggaatgtctaattgatttaattgggaacccgggattcttatctgaacctgactccctcttgaatggactatcatccatctctgtttcttcaccattgcgcccaccaaaacatgactcagctgataattctgataatttcaagttgtttgccaagaaatatttccttgattgtcagtcgttaaatctcatgttcagtgatccagcagctggaacggttatcgacttagatgaggttatgggatcaaatctaggtctaaactcatcacatgcaacaaacagtgattgtcaagctacctttactcatcttaaggctggtactcgacgcagtagtcaagatgggagttttataatgcagaggagttcccaagaggatactcaatctggactaagtgatccctttagcgatatgtcccttgagatagaagacttgattatcccatggagtgagcttgttctgaaagagaaaattggtgcaggttcttttggtactgtgcaccgtgcggattggaatggttcggatgtcgcagtaaaaattctaatggagcaggacttccatccagagcgtctcaaagaatttttgagagaggttgcaattatgagaagtttgcgacatccgaacattgttcttcttatgggtgctgtcactcagccacctaacctttcaattgtgactgaatacctatcaagaggtagcttatacagacttttacacaggcatgctgcaagggaaaatctggaggagcgccgccgcttgagtatggctttcgacgtggcaaaagggatgaactatcttcataagcgtaatcctccaatagtccaccgggatcttaagtcaccaaacctgttggttgacaaaaagtacactgtgaaagtctgtgactttggtctctccagattgaaggcaaacacatttctgtcttccaagactgcagcagggactcctgagtggatggcaccagaagttctacgagacgagccctcaaatgagaagtctgatgtttacagcttcggtgtaatcttatgggagcttatgacattgcagcagccatggagtaatttaaatccagctcaggtcgttgcagcggttggtttcaagggacaaaggcttgagatcccaagcagcgttgatccgaaagtggcggcagtaatcgagtcctgctgggtcagggagccctggagacgaccctcttttgccagtatcatggaatccctgaaacttctcatcaagacattaccacccaatcagctcctcgaagaaaattagttaccacccaagcaacttgcaaattatgtcacctctagagttttctcgatttgtttagatccgatatgcgccaggcctctcaaaccattcgtcttcggcgccacgtattccctgatgagaaatattcaaaactacacctgtcacaaaaggggaaaaactatggttggacaataagattcatgaaaaaaatatgtgatccaaattaagtgtacatctcttttatcaaggaaccaaatgtaagttggtcaaatatatacatataagtactaatatttatggaatatatacttttacaataaaattattaaagatataaa

SEQ ID NO: 37551 - DNA, 689 bp, Zea Mays
cttaggcactcatccctcagaattacagtagagcgtgcatttggttctttgaaaaggcgattcaaaattcttgatgatgttataccatttttccctttctcaacccaagtagaaattgtggttgcatcatgcattattcacaattgggtcatagaagatggtggtgatgagcttatcctactggagtccgatgatacacttccttctatcactcatcaaacctcaacacatggtcaagcacaagatcatgcttttatggttgattttaggcaagaaatcgccaatgctatgtgggaggatcatcaacaatattatggcagcacgacttgatgttatgtttcttttatttatttgaatctatgtatcttttatttctatgaacttatgtactttaatttctatggacatggtggttgtatttctattgaactttgtaattttcatttcaatgtaccatttatgtaccttttatattgctgaaaatgcatttacttatttttcctacaaagcttgatccaatggagggagaggggaaaggtggtgctgtttggacagcaagccaatccaactttatgcaggttttccttgccaatcttgtagtggatggcatcaaaacaagcaccggtggtttcaagagggttcacctcaatgcttgtgctaaagctttgaatgagcatttcaaacttaat

SEQ ID NO: 37552 - DNA, 1974 bp, Zea Mays
cttgaagatgcagccaccgcctccgtgtcgtcttcctcgtcagcacgcagcagtcaggtcaccaccaacagcaacagcagtagtgccgtcgcgttgtctcccactcccaagtcccaactcccacctcccccgcccgccgttcaaatctccctagcctcccgaagtaggcaagtagccctccctgttccatcgaacccagcagagcagccagccgaacaacgaagcatgccgtcgaagccgaacgccgcgtcgcgcctcgtcttcctcgctttcctcctcgtcatcagcgccgccgcggccaacgatgacgccgcggcgcggcggacgatggagcagttcgccggcttccccgcctccgacgacggcgagggcccttccagcgacttccacgtcgactccgagggcctccagcgtcagatcgatgaactggcctcgttctccgactcgcccgcgccgtccgtgacccgcgttctgtacaccgacaaggatgtgcaggctcgaaggtatataaaagggataatgaatcaacttggccttgttgttcgagaagatgctgttggtaacatatttggccgctgggagggttccgagcctggactaggagcagttgcaactggatctcatgttgatgccattccattctcaggcaaatttgatggtgttgttggagttctgggtgctcttgaggcaattagtttgctgaaaaggtctgctttcctgccaaaaagatctttggaggttattatgtttacatcagaggagcctacacgatttggaattagctgcttgggaagccgcttaatggcagggattgaagaacttgctcaatccctccgaaaagtagttgacaatcagaatgtgtcatttttggatgctgcagaatctgctggctataagttgaatctagaggacctgcatagcgtatttttaaagacagacaaatactctgcttttatagaactgcacattgagcagggtcccatcttagaaaaggagggtatccctattggcattgttactgcaattgctgctcctgcaagtcttaaggtggactttgaagggaatggcggtcatgctggagcagtgctgatgcctgcaagaaggagtgttctacagaaatgatgctggactggcagcagctgaattagcattagcagtcgagaaacatgtcctggaatcaggatcaattgatacggttggcaccgttggtattctgcagttacatccaggagcaatcaatagcatcccaagcaaatcacacctagaaattgatgtaagagatattgatgagaagagaaggaatgatgtcattgagaagattcgccagtctgcagcacatatttcaaagaaccgtggagtagagctttcagaatttaagatcatcaaccaggacccacctgctctatctgacaaatcagtcgttgacgcaatggaatttgctgcaaaacagttaaacctggcatacaaaaagatgattagcagagcctaccacgattcactcttcatggccagagtatcaccaatgggtatgatcttcattccctgttacaaaggttacagccacaagccggaggagtatgcatcacccgaggacatggcgaatggggtgaaggtcctagccttgacaatggctacgctgtcgctggagtgacttgttagcgtttggaggaatcaagtcagcccgtgccaaaaaggcaaaaacaaacacctgtgttatttctaataataagctgcatagcattggcgtcatcttccctgcaccaggcctgtatacaaaccatcattcatcagggtttaggaataaagttgtcatctgtatctgtatgatctggacaatgattttctagcttgatcatattgatatatagtagtgattttctaaatctttatccatataaacaaactaatatagaaacgatgttatatcaattgtacattacctctatcgggtacacagggacaggataccctaaa

SEQ ID NO: 37553 - DNA, 5859 bp, Zea Mays
ccaagcaagcacaccgctaagcctgctgccgcctcctcgcggcccagcagcatcagctaactaacccgcccgcgcgccgtacgtgcgcgcgcctgcagctgctcacaagtcacagctagatagtagctactagctaggcagctaggaagagaagacgatcagcatggcgggggagatcgtggcaccgtcggggagccggcgcagctggctgtcggcggcgtccatctcgcggtcgctgcacgcggcaggcgacccggacgacccgttccggcggtcccaggctagccgcgacgacggggacgacgaggagaacctgcggtgggcggcgctggagaagctgccgacgtacgaccgcatgcggcggggcatcatccgcagggcgctggacgagggcggcgccaaggcgggcgcggacgaggtggacatcgcgaacctggacccgcgcgccgggcgggagctcatggagcgcgtcttcaaggccgtcgaggacgacaacgagcgcctgatgcgccgcttcagggacagactcgacctggtgggcatcgagcttccgcagatcgaggttcggtacgagcacctgtcggtggaggcggacgtgtatgtgggcgcgcgcgcgctgcccacgctgctcaactccgccatcaacgtcgtcgaggggctcgtcagcaagtttgtttcgtcgaacaagaggacgatcaatatactcaatgatgtcagcgggatcatcaagccatcgaggatgacgcttcttctgggccctccgtcatccgggaaaaccacacttatgcgagctctaaccgggaagcctgctaagaatctcaaggtgtctgggaaaatcacgtactgtggccatgagttttccgagttctatcctgagaggactagtgcatatgtcagtcagtatgatctacacaacggggagatgactgtaagagagacaatggacttctccagaagatgtctaggcattggtgccagatatgatatgttgtcagaattagctagacgggaacgaaatgctggcattaagcctgaccccgagattgatgctttcatgaaggcaactgcagttgaaggaaaggagaccaatgtcataacagatcttatactcaaggttcttgggcttgacatttgtgctgatattattgttggtgatgagatgaaaagaggcatttctggtggccaaaagaaacgtgtgactactggtgagatgctaactggacctgcaaaggctttgttcatggatgaaatatctactgggcttgatagcaacagcacatttcagattgtcaagtacatcagacagacggttcatgtgatgaattatacagtgatgatttcccttctccagcctccacctgagacctataatttgtttgacgacatcattttactgtcagaaggttacatagtctaccatgggccacgggaagacatccttgaattctttgagagtgttggtttccggtgccctgaacggaaaggagtggcggatttccttcaagaggtgacttccaggaaagatcaacagcagtactggtgccacaaccacgaagattaccattatgtgtcagtcccagagttcgtgcaacatttcaagacattccatgttggccagaaactccagaaagagttacaagttccttatgacaaatctaaaacacatcctgctgctttgactacccagaagtatgggctgtctagctgggagtctctcaaggcagtcttgtctagagaatggttgctgatgaagcgcaactccttcctctatatattcaagttttttcaattgtttgtcctggcagtcctcaccatgacagtgtttttcagaacaaagatgcccagtgggaagttttctgataacggaaaatttatgggtgctttggctacttctttgatcacaattatgttcattggaattactgagatgaacatgaccattaaaaagctacaagtattctacaaacagcgagactacttgttctttccaggatggacctttggagttgcaaccattatcttaaaaattcctttttcattcctggactcatttatgtggacaactgttacatatttatgttatgggtttcgcgcctgctgcaggaaggttcttcagccagtttctagcatactttttaacgcaccagatggctgtggccttgtttcggttgctaggtgcaattttgaagacaatggttgtagccaatacatttggcatgtttgcaatgcttcttatcttcctgttcgcagggattctcctacccagacaggacattaaacattggtggatttgggcctactggtcatctcccatgacatacagtaataatgctatatcagtcaatgaattccttgccactagatgggccatgccgaacaatgaagcaaacattgttgcaccaacaatagggaaggctattctaaaatataaaggctactttggtggtcaatggggctactggctttccatcggtgccatgataggatatactattcttttcaacattctctttctttgtgctcttacattcttgagccctggtggcagttcaaatactgtagtttctgtttctgatgatggcgacaaagagaagtctacagatcaagaaatgtttgatgttgccaatggcacaaatgaagcagcaaacaggagaacccagacaggaatggtcttgcccttccagccactttcactctctttcaaccacatgaactactatgttgacatgcctgctgcaatgaaagatcaaggtttcactgaaagtcgcctccagctgctatctgatattagtggtgcattcagaccaggcgttctgactgccctagttggtgtcagtggagctggaaagaccactctaatggatgtactagcaggaagaaagacaagtggaaccattgagggagatatcaaactttctggttatcctaagaaacaggaaacttttgctcgtgtcagtggctattgtgaacaaactgatatccattcaccaaatgttactgtgtatgaatcactcgtttattctgcttggttgcgcctttcttcagaagttgatgacaatactagaaagatgtttgtggaagaagtgatgtcactagttgagcttgatgtattacgtgatgctctggttggtctccctggtgttagtgggttatcgactgaacaaaggaagaggctgacgattgctgtagaacttgtagcaaacccttcaattatattcatggatgaaccaacttctggccttgatgctagagctgcagcaattgtcatgcgcacagtgagaaatacagttaacactgggcgaaccgtggtttgtacgatccatcagcccagcattgatatctttgaggctttcgatgagcttctgttgctgaagagaggaggtcgtgtcatatatgctggccagcttggtgttcagtctcgcgtactagttgaatatttcgaggcaattccaggtgttccaaaaatcacagaaggatacaatcccgcaacatggatgctggaagttagctctcctctagctgaggctcgcttggatgttgattttgctgaaatttatgcaaattctgccctgtaccggcacaatcaagaacttatcaaggagttgagcattccaccaccaggctaccaggatctctcgtttcctactaaatatgcccagaatttcctaaatcaatgtatggccaatacatggaagcaatttcgatcttattggaagaatccaccctacaatgccatgcgctatcttatgacaatcctctacggtctcgtgttcggttcagtcttttggcgcatgggaaagaacgtgaaatcagagcaggaactgcaaaacctacttggagccacctatgctgctgttttcttccttggatctgcaaacttgctctcatctgtacctgttttttctatcgaaaggacagtcttctaccgtgaaaaggctgctgggatgttctctccgctgtcctattcgtttgcggtgacagttgtggagcttgtctacagcatagctcagggcatcctttataccatccctctgtattcaatgattggttatgagtggaaggcagacaagttcttctacttcatgttcttcctaacctgctccttcctctacttttcactttttggtgcgatgctggttacctgcactccttccgcaatgcttgcgagtattgttgtctcattcagtctaaccggctggaacatcttcgccggattcctcgtaccccgaccggcgttgcctatctggtggcgatggttctactggtgcaacccagtgtcctggaccatctacggcgtcacggcgtcgcagttcggcgatgtaggccgcaacgtgacggctactggcaacgccggcacagtcgtggtgaaggaatttctggaacaaaacctgggcatgaagcacgacttcctcggctacgtcgtgctggcgcatttcggctacatccttctgttcgtcttcctcttcgcgtacggcaccaaggctttgaacttccagaaacgaattggagctatctttactactttatatgttagcagtgtaggcgtgcacactgccttgttctgccatcgcgcgctcgcctccctccccgcgcccgcagtccccgcatccgcgcccgcagtcccgccgcgcccgcagtccccgctgccgagcagtcctgccgcgccccctccccctgcaaaccccaccacgacgcagcaacagatccaccatcgacgtgcgcgccgcgcgccccgacgcggaacgctggatcccacgcagcaggaggtggccaaccagtcgccatcgcccccggcccccaccccgcctgctgcagcaagcggcgtccgctaccgcacgccctcgtccccggacctcctcctccctgccgacgccgccaagatgcgccgctactccgcgctgcccaacggcggccgccaggagacgctggccgaccgcgcgcaccgctaccggggcatcgtgctcgtcatcctcgccccgctcgcgctcgtctctctcgtcctcctcctcatgccacgctcacccgctggcaccatgggcagcgcccgggatagacagcgagatcgagctcttcgtccaggtacgcactcccccgcccggtgacccgttgccggacctggagtcacgctgcctagactcgccgctgggtggattcgtcgaggtggaggtcggattgtgaccacgccatccagttaggacgtcgtcgtctccagatccaggggatggggttgctcggcatggcggccaagggcccctcgcccacgcgtcgcctcctgccgcagccgcacttggccgtctcctcgctggtggcctccgtggctctgatccacccttcctcaacacccaaagatggttgacgtcaccttcgccgtctcctcgccagtggcctccaccagccccgcagtccaagacaaagccgcgacatgagtcaacccaagtccggtcgcacctacaccgatgaccgtacccaacgtgagtcaagccaagtccattcccctcccttgcttcctcaacttgttgtcttgtggtctgaagtttgtctcggagaaggtgatgccatcatcatcagttgtgattatgaattatattctaccgataggtattcaatctctctattcggcaacaccttaaaaagatttacttcaaaatattgacaagtggattgcaggcttagataatttttggaacacaacattgctccaaaaaagttttactgaagaaaaggtatcagtctgcagtttggtaagtgagtctgaatctgcagcaccaaggacttcaagaattagtctgaacctgcacttacagttccatgggtcttctcaattcttaataatattatatttttaatgaataattgaat

SEQ ID NO: 37554 - DNA, 3182 bp, Zea Mays
attaaagacaagggaggcagccaaaaggtgacggcaccactaaccaagccagcaccagcggaactgtgctgtgcaagcactcagcttcgcctccattccgctcacttcccgcggccactccgctccccaaaccctaacgccctcgagcggagcgatctctttgcttcgccagtgccgcgcccgggcatgccgccgccactgggtggcgcggtcaaggccgactgatccgtgcgcttgggagccgccaccgccgccgccgccgccgctgccattcctccctcggtgcccactggggtggagcggagactggagattctgccgtctgtcgcaagtcacacactaggtttctcgggcgctgacattgttggaagatgtggaggatcaagctcgcctgtttgcttcttatctttgtgcaagtgcaacgagtggtccttggaacacatgacgtgtacatcgtggtgatggaaggggatccggttgtgagctaccgaggtggcgttgacggatttccggcaactgctgtggatttggacgaggaaatggacgttaccagtgaagctgttacatcgtatgccctccacctccgagggcaccatgacaagctcctagactcacatttagtagaaggaacgtatgagaagctttatagctaccaccatcttatcaatggctttgcagttcacatgtcgtcactgcaggctgagttcttgaggaaagcgccaggagttaagcatgttgagagagacatgaaggtacagaaattgactacacacacccctcagtttctcggattgccaactggggtatggccaacaggaggtggacttgatagagctggtgaagatgttgtgatcggttttgtggattctggaatttacccccaacatccgagcttcgcggcgcacaagactgatcgatatggtcctgtccctcgttataaaggaaaatgcgagaaggatctagtaacacaaagaagcttttgtaatgggaagatagttggggctcagcattttgcaaaagctgcaatggctgctgccacacagctgcaattgctgctggaaacaatgggattccggtgcgaatgcatggtcacgagtttggcaaagcaagtggcatggccccacgtgctagggtagctgtctacaaggttctttacaggcttttcggtggttatgtggctgatgttgtggcagctattgatcaggctgttcaggatggtgttgacattctcaacctttctgttggacccaatagcccaccaacagctacaaggactacttttttgaatccttttgacgctgcacttctttctgctgtgaaagctggggtatttgttgcccaagctgcaggaaatggcggaccatttccaaaaacactggtgtctttcagcccatggataaccactgttgctgctggagttgatgaccgcagatacaagaatcatttaacactaggaaatggaaaacttatttctggacttggagtatctcctgcaacacatgggaatatgtcgtttagcctgatttctgcagctgatgctcttctgggctcatctgcaagcaagtacagtgcattagactgtcagaggccagaactattgaataagaggaaagttcagggaaaaattcttttgtgtggctattcattcaattacatttctgggacagcctcaataaagaaagtgtctcagacggccaggagtctcggcgcagctggctttgttgttgctgtggagaatagttacccaggaacaaaatttgaccctgtaccagtcagcatccctggaattctcatcacagatgtcagcaaaaccgaggatcttatagactactacaattcttccaccgtaagagattgggctggaagggctacagcctttaaagcaacagccggtattgcagatggtttggcaccaacactatacaattcagctccccaggttgcgctgttctcttctcgaggacctgatgtgaaagattttagctttcaagatgctgatgtccttaaaccagacatacttgctcctggcaatctcatatgggctgcatgggcgcctaatggaacagatgaatcaaattatgctggtgaaggatttgcaatggtttctggaactagcatggctgcgccgcatattgctggcattgcagcactgataaagcagaagaacccaaagtggagcccctcagcaataaaatctgccctgatgacaacggccaatacactggacaaagggagccatcctcttagagcgcagcagtacaccgcatcagaaatgatgacactttcacgggccacaccgttcgattgtggcagtggcgctgttaacccaaaaggcgccctcgatcctggccttgttctagacgcaagccatgaagactacatcacgtttctgtgctcgatccccgacgtcaaccagagcgaagtatcaaacatagccggctcggcttgcaactccaactccaagggacaacgccccttcgacctcaacatcccctcgatcgccgtctctcagcttcgaggcacggtggtagtgaagcggaccgtcacgagcgtgtccgacgaaaccgagacctacaccatcatgacaaggatgccgccagaggtcgccctggaggtgacgcctccggcggtgaccgtggtccccggagcatcacgagagataactgtgaccctgacggcgaggtccgtgaccggcacctacagtttcggtgagattgccatgaaaggtgaccgcggtcacctcgtcagaatcccagtcgtagctatgggattcaagtaggtagaagacgactgtgacatctcctagggagtagaggataggaagagcgagttgtgcctctgtaatctgaggtcttgagctgcagaggaacgttgtataattttttcataggttgtagagaataagagttggcacaatgctgtaagtgttatgcatgccccctccaggttgtaaaatatatttgggtgccctaaatcctctgacatggtgactagaggacctcttgtattgtagtccagccttgttctgattctctaatgcatgaaggtttgaatctcatctggttttcttctatgtcgtttcatccagaattttaattcgtattgtgggcttaatattaaaattccccaaatatgggagatgtgaaatttcttgtcaggatggcacaatttttgggactttg

SEQ ID NO: 37555 - DNA, 293 bp, Zea Mays
atgtccgaagtcaactaacaccaacagtgacaaggaccattatcatagaagatctcagtgcaaacaagagtaatatcaatagcccagaaaaagatgatggcgataaggaaaccgcacagaacttcgatatatgcagcttgatacaatacccactaacaaaggaaaaggaccagcagatacaattgaatcgccacctaaaaggttcaaacaagggacgatacgcatcggaaaagaaatggacatcaaatcctccgagaactaaagtttcactcagatcttcgtcgaccttttga

SEQ ID NO: 37556 - DNA, 2822 bp, Zea Mays
cttcagtctcagatcagctagtaatttcgagcaacagatccagcaaggactagcagaaagcagcctgtaaattctagccaccgggaaactgggcaaacgctgccaatcattgaagccatcactggatatgtgtgtccatctccatcatcacaaacaagagccacgcagtcggcacacacacagagacaagtcactgtctcgaagtgtcggtttcgaactcgaacagggcaggtgctcgccgtccctcttttactagccttcggaaagcgcggcctgtgtctccggcctttgccacttccacagggagtccggggccatgcagagctccgtaaagctcgcggtgcttgctcttctgctagcggcagcagctcaccacggtctgctgccgctgccgacggcgcgatgctactggctcaacccggagatctacgacgccggcgggctgagccgccgcgcgttcccggacggcttcgtcttcgggacggccgcgtcggcgtaccaggtcgaggggatggccaagcacggcgggcggggccccagcatctgggacgccttcatagaggttcccgggaccatccctaacaatgccaccgctgacgtgacggtcgacgagtatcatcggtacaaggaagatgtgaacataatgaagaacatgggctttgatgcgtaccgattttcgatctcttggtcgaggattttcccagatggaactggcaaggtaaaccaggaaggagtggattactacaacaggctcatagattacatgctccagcaaggtatcgcgccgtatgcaaatctctaccattatgacctcccattggcactccatgaacagtacctgggctggcttagcccaaagattgtggaggcgtttgcagactacgccgagttctgcttccacgcgttcggagacagggtgaagaactggtttaccttcaacgagccgagctgctgtcaggcgataccgcgacaagtatcagcttcaccagaaggggaagattggaattctcctggatttcgtgtggtacgaacctttcagcgacagcaatgcggaccaggctgcagcacagcgagccagggacttccacctaggctggttccttgaccccattgtacatggacggtacccgtactcgatgcaagagattgccaaagacaggctaccgttgttcagcgatgaagaagccaggatggtgaaaggctctatagactatgttggcatcaaccactacacttctttctacatgaaggaccctgggacatggaacctgacaccagtcagctaccaggatgattggcatgttggttttgtctacgaacgaaatggagttcctattggcgctcacgcaaactcctactggctgtacattgtgccgtggggcatcaacaaggctgtcagctatgtcaaggaaacttacaaaaatcctacaatgatccttgctgaaaacggaatggaccaacctggtgatgtcagtattactcagggtgtgcatgacacagtaagaatccgttattacagagactacataactgagctcaagaaggcaatagatgatggtgccagagtcattgggtactttgcgtggtcgctgcttgacaacttcgagtggaggcttgggtacacttcgcggtttggcttggtgtacgtggactacaagactctgaagaggtaccccaaggattcagctttctggttcaagcatatgctgtccaagaaaaggagctagagaattgcagacaagaggaccactggcttcacgtgtcatacaaaagttcactctgcaaatcctcttagtatgtcagatttagcttaaggaaccgtgcagacaattgagtctcaaggctcgacatctctagcttcgttaattgttgcaaggcaataaattggtatcttcgaaaaccttgagtctccataatagaacaagtagaagcacaatgacgggatcacagacaaatgacacacaagttcaccaacataaacggcataaaaaaaacaaaaggggcgaattaaaacttcgttacattcaacaagctgaaaattgaactcattttattcgataatccatttagccaaaccatatatatttgaccacacggtatatagctcaaatcaacaacgaaatcatggtagcttcatcgctatactttatatactgaacttatacttgagattctatctcgccgtttttctgttcaagagcttatcttcaccgtgctaacatgacaacttaacttctatcctatacttatctgtggtagggggaaaccaggtcattaagacaacagcatgtagaaattattatagatacacttcagaagataacttggcctgtccaattgccttacagtaaacatctccatcgctatttctataaacaaagcttagttaacttcatctgatctgtctgcgacctgaaaatttattcagaaatttaactatataatgcatttcaggaaaactaagatatggttaaattgcttagtcgtgcttgtggcaagttcctaaatcctaatttgcagttctaggaattcttacattttgcgctgatttgaagttcttagctgcgcagtacatgttccggaattaaaaatgcaattccaactaccatcctaattcaagtagtccgctcaagtttaacataccatataaacatacggatccagggcaccaccattgcctgcacgccgcaagccgccctcctgcttcaacagcctgcaagttttgcatgagcagaagcacacagatacgcggatacacaggtcaggcagaagtaatcaggtaaccattgcaaaaccttttcaaatggaagttggaggcagag

SEQ ID NO: 37557 - DNA, 2276 bp, Zea Mays
ctggcactgaacctgacatgcactggggctattgtgccacacatttattgagttattgttcttggttggcactaaggcgccacgccgccaccgcccgcccacgcattaattaatcttgcaaccgtaagagcatgtcaaacaggaacgagttatgaatccttaagataacttctttgatattgttatgaatcaatacgacacaaagtagatcaaacacagaaaatacacagatttaacgtggaaaacccctccaaggcgaatgggaaaaaaccacagcgccggccagcaacaatctcactattttcgggtggttacagatcgtaggagatttacaatgagataactacgccccggcccaagccttccggcgacgggcctccgctttgctcgacaacttggccgccttcttcaaaatttggatcacaaactcaacatataggatagcaccacctttccgaatccaatcctgaccgatgtttcttcgttgcacatcatttgtcgctgtcaataaatctgggtggttgtttccccacttgtgtagtagtgtgtagcatactacctgaaactactgttaatttctcatgtagtatgtgttgaagaatggtttggagctaacaatacagacaccaacttttgactagtagccaagaacaaagaggctagctagcggtgataaagttttcataggtacaacaataaaactgaaatttgtggtatgcaaataatacagttatctttcttcatatgtattgcacttagagcaaccaatcatagtgattaaacatggccaatttaacccaattctcaagcactcaaattgtgctatttcacaaaactacctgatcatcaaactgtctgcttgtttgttttaacatatccttttacactccattcaggtgtatgtttgggagccttatttggatcctgaaaaacacacaacaataatggggcacgaccatatgtctcgtataaagatgcatatggcagaaggttcttttggtgacaggaaccggtgccagcaacctgggtgcaatgaggttgtcgatggaagggtagtgtactgcaaaactcacagcggagagttgtcatgccaacagttcagtcacctccagagcggactggagagctcagtaccatgcactgagcaagagttacatgtcaagcacgaaggggatgatcgaggcatgttttgcaagaacgatagctgcagcaagcaagcacatgagaactcaatctactgtaagttgcatagcggtgttagcaagggctgcatggtccgaggctgtacaagaggtgcacatggaggcacacctctgtgcattgggcatggaggcgggaaacggtgtgtgatccctggatgcccaaatgccgcgtgtggtcaaggcctcagtgaccgctgtgtgaggcatggtggtggcaggagatgtagattcgaagggtgtgcgaagggcgcacaggggaacaccgattactgcataaggcacggtgggggaaggcggtgcaagtttgaaggttgcacgaagagtgcgcagggacggacagatttctgcattaagcatggtggtggcagccggtgcaagttccaaggatgcggcacgagcgcaaaatggggaacagatttctgctctatccacaggaaggctttgttgggaggcgacaatgccgccgtccctgaagctttgcctgccgcttcagaaaaacgacgtcgtgccaagaagcccaagaaggcggcgaaactgtctgaggcctcccaagagaatgccacagcagcagcagctattgctggtaacagcactcaacatatgggcggtcttctcatagctatccctgttgctaaccgtgacatgttaaccaaagccgtggcagcgacggggcaagctgcaatagcctccgcacagatagtggcgccgctgtccatgaaatcgccgacgccatctggagcagcggcggctaccttgactgggagggaggcgggagcaagcagggagatgctgggtctgtagaaagatggtggcagtgcataattcgggaggcttggcgacaccccttgcccagatagttctctgattattgccttctttttagactgagaaaaacctcgaaactttaggagggttgtgcattttgacagactcgggccgtcgactgactctagtgatgttctgtgcctttctcgtttgtaaattgcaatgttctcgtgtattttctcttgtgaccatttggacagtaagcaataatattggtgttctaatctcagaccattatttgtgaaatat

SEQ ID NO: 37558 - DNA, 1456 bp, Zea Mays
atgtttcttatatcttgatgattctgattttgattttaagtctaccctgcgagaataaaaaaatcattcaccagacgttaagaaaaggagaaagcgtatgaagcatgtcaatacatcaacggacagagatgtcttaaacctgcaggataatgtgtcaagtgtcatggcaagacagtgccttcatatctcaagtcatagaacgtcccagagcacatcaaagcataagggaaacttgtcacacttgcttcacaatgaagttcctatccggatgggagaaaggaacaatcttactgaaaactctgaaaatgatagtttgtctgacagcttcagtgaacctcagacttcagatactctgtgtatagaagctcaaagaaaatcaagtgcaccatcatcatcacttagacaaagtaccctagattctctatatgaatttggtgaaactagtaggcatgaaccagcaggaagaaaaaaactagacaacgttgaattaagggagacttcaagaagcttacttccatttgatttgtcaggacaggaaccagctttctgtactcaggagcaagtagataaatgtagccttggcactctagctgataaaaaacccatggaaaaatcatctaatatggaaaggcaaccagaattatcatgtgtcatatgctggacagatttttcttctacaaggggcatcttaccatgtggacatcgattctgttattcatgcattcaaggatgggtggattgtctggcttctaggggtaaagtctcaacatgtcccctttgcaaagccagtttcacatgtatcagtaaggtggacgaggcaggcacctcagatcagaagatatactcgcagaccattccctgtgaagcttctactgatgtttttgtgtcgggcaatgtaggctacgatttctctcgaccaacgtctgggcaaggagcatgctaccagtgtcacttccgtgagcccgaggagcttcttctaagctgccacgtctgcagatcacagtgggtacactcgtactgccttgatcctccgctgactccttggacatgcatgcactgcagagacctgcgtatgctgtttcaccggtatcgttagccccagttatggtactcatgtcaaaccttaattgttggaggaaattgtatcagaaggcatgaacaccatttgattactgagatgtaactgccaagttccatttgatgtctatactctaacattgattactgagggtcgatgtgagcttttttatctcagtatcttctctgcataaagaactggaaactagtgtcaaatgttgcctcccaaaaatgtgacctcccgaaaacggttcgcgcgtccgcccgagagatgggctggcagggggctcggcccagcgcggggaaaaagtgaagggaggattgggcccggtacaggggtaaggagcagttccctttattctttacttatttatgagac

SEQ ID NO: 37559 - DNA, 504 bp, Zea Mays
atatttactagaacatgaggcgcccattcgggcgccctcgccctatcagggtttggatcacatagcagcaagcgagcgtccgcaattgaggaaacctcgactcttgaaaaccagaaaagttcttcttttaacaaactgggcagtagcaggacaactcgtttccgctagaccacatagttgcaatagattcagacaaatcaaattgtaaggttcacatgaacaaaatacttgctcatatgctaggatcaagccttgaggcgtgagacaaaatatttagcctgagagcttccttgttgtgccaaaatatatggaagaacaaccaattgtaaaataaaagcatatcacactcaactttgacaaacaaatagcaaaatagtttgtaaaatctaatagagtcccagtcattatagcaacttgggcaacaacacgaccataggacctaccctttgaattagacatattgatgatcaaatcatctcccatgctaccaggaaagccagaaca

SEQ ID NO: 37560 - DNA, 2667 bp, Zea Mays
catgacaggagagcagattcaggccccttcaagtcccagggatggcgaggatgttgcaattaccattgggcgccccaaggaaagtggacctaagttcggcaccatgatgggtgtctttgttccatgcttgcagaacatcttgggaatcatttattatatccgttttacctggattgtaggtatgtcaggtgtatggcagtcacttgtgttggtttcattttgtggtgcatgcacatttttgacctcgatatcattaagtgccattgcaacgaatggagctatgaagggtggtgggccatattatcttataggccgtgcacttggtcctgaagttggagttagtataggattatgcttcttcctcgggaatgcagtggctggatccatgtatgtgcttggggctgtagaaacctttcttgacgctgttccttctgctggacttttccaaaagagtgtaacagttgtcaacaatacattagtgaatggtacagaaactgctggcacgtcaactatatctacacccagcttgcacgatcttcaagtgtatggtgttattgtgaccatactgctgtgttttattgtgttcggtggtgtcaaaattatcaacaaggttgcacctgctttcttaataccagtcctgttttctttgctgtgcatctatcttggtgtcttcattgcaccaaggcataatgctccaaagggaatcactggattgagtataaccacattgaaagacaattggggtgaaaactatcaacgtacaaataatgctggcgttcctgatccaagtggatcaatatattgggatttcaatgctttggtaggtctgtttttcccagcagtcactggaattatggctggctcaaaccgatctgcttcactgaaagatacacagcgttcgataccaatcggcacattatctgcaactctttcaacaactgctatgtacttgttctctgtgcttctgtttggagccttggccacacgggaagagcttctaactgataggcttcttactgctacggtggcttggcctgctcctgcagtgatttacattgcaaaccaagtccatcctaagaattggtaccccattcctctggtattctgccgtccatggggtaaacttccggaaaatgttccttgtcatccaaaacttgcagacttcgctaattgtatgaagaagaagggtcgtggtatgtccatttttgtctcgataattgatggtgattatcatgaactagctgaggatgcaaagactgcctgccgccaactagatgcttatattgactacaaacgctgtgagggtgttgcagagatcattgtagctcctaatatgtctgatggtttccgtagcattgtgcagacaatgggcctaggaaacttaaaaccaaatattgttgtgatgcggtaccctgagatctggcgacgtgagaatttgacacagataccgtcaacatttgtcagcataataaatgattgcattattgctaacaaggcagtagtcattgtgaagggactcgatgagtggcctaatgagtaccagcgacaatacggtactattgacctctactggattgtaagagatggaggattgatgcttcttctgtctcagctcctgctgacaaaggagagttttgagagctgtaagatccaagtattctgcatatctgaagaggatacagatgcagaggagttgaaggctgatgtcaagaagttcttgtatgatcttaggatgcaagctgaggtcattgttgtcactatgaaatcatgggaatcacacatggagagcagcagtaacggcgctcagcaggataactcccatgaggcttacacaagcgcacagcaaaggatcaggacataccttgatgagatgaaggaaactgctcaaacagaaaggcagttactaatggagaatgggaggcaagttgtgaacgaacagaaggttgataaattcctttacacaatgtttaagttgaactccacgatactcaggtactccagaatggcagctgtagttcttgtgagccttcctccaccgccattataccatccttcatatttctacatggagtacatggatttgcttgtagagaatgtcccacgcatgttaatagttaggggatatacgagagatgttgtcacatttttcacatgattatacatacgaacttctcacctggagactctagtgccgtcaggctgttgtactatctcagcagagactggatacacaagagcgtggaatctaccactgaaatgacaagccctcaccttgaaggcaaccacgatgagatgtcagatgtgcagagctgttgttcgcatattggattcgtgaactattgaactgcagtgtcttcattcttttttctggatttaaaagatccacatagcgagctttgattcttacagattttgtagctatcatatgtaaacacttaccatcttgtaattgtaagcatacttacatgctggcccaaagacaaatgcaatccttaccttctcactgaaacatttatataggtattttttttgcatcacttgtatgcgtctaaaactgatggacttgttgagatgagcagagctgcgaattttgaatggctacccccaaatgaattttggttatgctttgtcgcaaatatttggttttaatggtacaagatttctgag

SEQ ID NO: 37561 - DNA, 4134 bp, Zea Mays
ctcgcctcgcctcgcaaccggcgatcgccggcgcgcaaagggattttgttgacgccgagtgccagatgccaattgtttagccatggggaaaccacaaaccgatggtgaccagtcacctgtaaactcagatactgatgtgatggattgcctgaacttcgatggccatggagatgttgaagacccccacaaggaggttgcaaaaggggagcagcagccttctggcgaagttgatgaacagcagtctgttatggatgttgatttgacatgtataacatctgtgggagatgaagggaatgaaaagcagaatgctatggatgtggatttgaaagaaatactatctgaggaagatggaggggaaggaaaggcttcttcagatctaccctcacaagtaccagtggatttcaacgttgcaagcctcgagaagttctgtaaagaagcagcaagatcgtttttcagtgaaactggactggttagccatcagataaactcgtacgatcattttgtctcccatggactccaagagctctttgattctcttggggaaatcactgtggaacctgattatgacccttcaaataaacatggtgcttggaaacatgcaactgtcaaatttggtagggttaagcttgatgagccagtgtttatgcttgaaaattctgaccttgaagagcaagatctcaaatttaagcctagacatgctcgcctccagaagatgacatatgcgtctaggatgaatgtggaaatgactgttcaggtttatatattcgacacaagtgacaaagccaaaactggcaaggatacacatgttcataaaagagagataatgacagaaactaaacaaatcaacattggattgttacctgtaatggtgaagtcgaatttgtgctggctgcataaatctcaaaaaggtgactgcccgtttgattttggtggctactttttgatcaaaggaacagaaaaggtattcattgctgaagagcaaaggtttttatcaaggatttgggtcacagaccaccccagctgggatgcaagttacctatctcagatcagacgagaaaagatcaatataaaacttgttccgtccaaaagcaatgaaagctgcaaagtcataaacatttgcttcatgggtacgattatgccaatttgggtagcattttttgcacttggtgtatcgtcagacaaggaagcttttgatatgattgatatcctagactgtgatgctgacatagttaacataatatcattaactattaaagaatctcatgaagaatttgaaggcttccgcactccaggtagagcccgtcaatatgttgatgagctgatcagaaaatcaaagtttccgcccaaagaatcctttgatgagtatgtttgtaggtatatgtttcctggtgtcaatgggtttaggagcaaggcacttttcttgggttacatggtcaaatgtctgctaatggcatactctggcaatcgaaaatgtgataataaggatgatctccgtaacaaaaggctagatctttcctgccaattgcttcggagagaactctggactcatattaaaagagcagaaaggcgcatggttaagctcatgcagagagatttgagcaatgatggcaacttgcaagaccttaggcgttatgtggatgcatcaattattaccaatggattgaaccgggccttctccactggttcttggcggcatccttataaaaaagaaaggtgttcaggggttgtagcaacccttcggagaacaaatccacttcaaatgatgtctgatgttaggaagacgcgacagtggtttgcatatgctggaacggctggagatgcaagatacccgaatccatcctactggggaaaattgtgttttttgtccaccccggatgctgaaaaatgtggatttgtgaaaaaccttgctgttactgctgtggttagttctgtagtgaggaaaccgttgattgatacatttgtttcttgtggaatgaagaaactggatgatatttctctacaagatatttctgggaaggacaggattttcttgaatggaagcttgctaggagtatgtgcagacccacacgaattgactttgcgtttaagaagcttgaggcgtagcaagctaattgatcctcaggttgaaatcaaaagggacaagcaccataaagaagttcgtgtattttctgatccaggcagaattatgagaccacttcttgtagttgaaaatctaagaagaatcacaagaccaaaagatggactatactcttttcaggaacttatagatcaaaacatagttgagctgattggtgttgaagaagaggaggatatccaatgtgcgtacggaattagacatctattctccagcagggagaaagaagactggtcttcttctggctatactcattgtgaacttgatccttctttcttgctagggctgagctgcagtctcattccctttggcaaccatgataacgctaggagggttcagatgcaagctgaaaaaatatcacagcaggctatcggctactcccctacaaattctcagtacagactggacaccctttcacatcaaatgttctatccacaaagacccttgtttagaactgtggtgtcctacggtcttggagaggcgaagacagactgcagctccggacgaaaagacgacttcaacacaccagaatatttcaacggacaaaacgcgatagtctcagtgaacgttcatcagggattcaaccaagaagactctctggtgatgaatagggcctccttagagcgtggcatgtttcgcacgctacatttcaagagctacaaagcacaggtcgagaacaaagagatcacaaggcgtctcaagcacagggaaaacatcaatttcggtaaagtgcagagcaagagggggaaggtcgacagtctggacagtgatggcttaccatacgtcggagcaagtcttcagagtggtgacattgtcattggtaaggtcacggagtctggtgaagatcatagcgccaaactgatgcatactgagaaagggatggtggacaaggttgttctttcggcgaacgatgatggggttaactttgcaactgttactctaagacagtctcgctcgccatgcgtcggagacaagtttgccagcatgcatggacagaaaggagttgttggcctgttggattctcaggagaatttcccattcacttcccaagggattgttccagacatggtcataaacccacatggttttccaactcgtcaaactcctggacagctgcttgaggctgctctggggaagggcatcgcccttggtgggaaggtcaggtacgcaacgccgttcaccactccgaccgtggaggtgatcgccgaacagctgcacaaggccgggttttgcaggtggggtgaggagagcgtgctgaacgggcagaccggcgagcggatgaagtcgctggtgttcatggggccgaccttctaccagcggctggtccacatggcggaggacaaggtgaagttccggaacacgggtccggtgcacccgctcacgcggcagccggtggaggacaagaagcggttcggcggcgtcaagttcggggagatggagcgcgactgcatgctggcgcacggcgccgccgccaacctccacgagcggctcttcaccctcagcgacttctcgcggatgcacatctgccaggcctgcgagcgggtggccaacgtcatcgtgcgggccgccgagggcggcggcggcaagaaggtgcgcgggccctactgcttgttctgccgctccgcggagcgcgtcgtccgggtcgacgtgccgtacggctccaagctgctgtaccaggagctcttcagcatgggcatctgcctcaagtttgaaaccgaggtccgctagaacgaacgccatggcagttcaccagtgagactccctcgatgcatatgcaagtatgcaactgcactgcctaggatcttggtgctttatgggctggtgttgaaacctgcagttttggcggcacgattttctgggcatgcattcagtagcaggcactggttgatactgtgattctggacggattttctgctgatactgtgatctagggggggcatggttttttgtttgtgaattgtgatgtggcgaggcaggaattttctgttcgtgcagcgtgc

SEQ ID NO: 37562 - DNA, 1778 bp, Zea Mays
gtttatccggggtccttgggacactcgaacggatactgttaagttatctggtgcacatgcatagctgtctgaggtctttgagacaaggataggtgcatgtgggtccaataatttgggaggttatgtcatagcccgtctcgttcgggttctaggtcctccttgagtcagtgaagctcacaaagttttctttttcatctctactgttgtagatatgcgggaatgtcgcgccgacgacggtgaacaccacctggaacggtctcgccgtggtggaccttgtcggaggtcggttaagtgcgtgctctagggttgatttgctcggtggtgagtttttggtgcttcctctactgagttcaggagctctaccgcgtcgtggtgctgtgtggtggctgccgaagttggcatcgtcatcggcgcgcacgaagagagcgcaggcatgcgagtttggagctttgggctctttggcgctggttttctctagtgctaggccgactgggccgactgggccgattttggcccaagccctatgtattgtttgtctttattatttactgaagaacttgtaaattgtgctaaaaatcgtaggaaatttcaaaatttatgggacaaattttgttaagtgtcaaaaaatcaagagctttctggtaaacacattttaggggttttgtagtagctaaatattttttggtgaataaaaagtaccttaaatgagcttatgtgagttttaataataaaaatagagcactaagaattataggaaaaattgtgtaagattatcctaagcacatgaacccttgggtaaagtttggaactgtttggacaatatttgcttggcaaactaattgtttggtcaaaaaaagaagaagagttttacccctggataattagggcacccaatgtcttagtgaagaataagttgcttagcatgttttggatggttagatgagttctaggaatggttagctccctggtagctatgacttgtgatgatagcttgtaggtgtaatcttgtaatgctttatagtaccttctttgctaattgcataagcacatgcattcataatcatgtcatttcatgtagagtgccaagaagtgatttgtgaagaaggagcctgctccagtgttgttgatccagtggtggattccatctaactgcttattgtgatataagatctcctctaacaaggcaagcctcggtgcatttgcccttccttgtggtttaaatgttttatcaccttatatggtgaattaggtgataggagttacgtgataaaaatatgatactttaccattccttggaatttggctactattcattgctacttgttttataaaaagaactgaaatgcttagccctgcttagaaacataaaaattgtttgttgtaaaaagaagatgatgtggaatattggttatgggattttcctttgaaaatcataacaaacttatgatggtgagtcccttagggcccaggtgggctcatcatctgaaaagagtacccctgccgggtaccaaaaatggggaaatggtttgaataaattgagactagatgttgagctgacaaggtcacccgtctgcgtcgattaaggaccgtaccattgactagcctattgtggttgagactttgcaactaggcacataccctggtatgggacagggtcaacttgaacctggctattccatacgtgcaaagacaaccgagcattgggcgtgggagatggtgggagtggcagtatcctcctggcatagtagttggatggtgaaagtcgcctagaggggggg

SEQ ID NO: 37563 - DNA, 2518 bp, Zea Mays
ctcaagtgcagacagtcacacctctgcgttatgatatgcttatcgagtgacacgcattgctgaagcttttgcctattaccccgacgaacttgatgaactctgcaatcatggattagttgctcaagctgctagcttgatagctcttggcaactcctctggccaggaaccactgagtacatctacatatacaggcttaatccgtcttctctcaacatgtgcaagtggatccctgctggcagttaaaacactactacttcttgggatcagcggtactcttaaagatttcctttctggccctgctttgatttctggaacattagtcccccgtgctgtaacaaggcctgccgatcagatatttgagattgtgatccttgctgataatttgcttccgcatatgcctgcgataatcattgagttaccaacatactaccatgcatataaagactcttcaacaaataaatctgcttccatcaaacaagagggggctggttctacaggaaacgaaaagtctggcaatgagaggctattgcgtgaccaacctaagctcctagaacagttcggtatggatttgttacccacaatgacacaggtgtatggttctagtgtaaatgcaccaatacatcgcaagtgtttatcgatcattgggaagttaatgtactacagctccgctgagacagtccagtctctccttggcacaacaaacatatccagcttccttgcaggcattcttgcatggaacgatcttcaagtgttgattcctgctcttcagatagcagaaataatgatggaaaagcttccagagacattttccaagttgtttgtgagggaaggctccaacacaatggctcgtcaggtgccacctcaggataaagaacaattagacaaaataatatctgaaatgctctctgagcttagcaaagttaatggtgtttccacatttgagttcattaggagtggtgttaccacagcattgcttgactatttgtcctgtggaacatttgggaaggaaaagtctagtaggattggtaatggagggtcccgtctgacttcaggtcttagtgctctggctcaacccttcaagcttcgtctgtccccagctcaaggtgaaaaaccacttcgggattattcatcaaatattgtgcttatcaatccatttgccagtttagcagctgttgaaggatttctttggcccagagttcaacacagtgaggttgcgtcaaagcctataattccatctggtaataattctgaatctgtggttcctggcaccatagctggtgcatcattagcaactgcaatggatcaatctggtcggcgtccaacaacaagatcaaagtcatctgctgcatggggtggtacatcaaagaaggattctcatgatgaaagcactactactgccaaaggaaaactaggtgattccaatgagtgtaacattggctcagccagttttagccaggtgcagccatcatctggttccggtgctagaaacacttctagcagaggacccgattctactgaatttcaaagtacgagcacattcgggtcatttgttgctgcgacgatggctgggctagcttctgttggtggtcgcagtgttataggtggttgagatcggtgtggtctgtcacttggaggaagcatgaatgaccacaataaacttgtatgtattcactgctggtggggagcagcttagcaaacatttgactgtatgtcaagctatccaacgtcgtcgacttatgcttgacgaggatgatgaagaagtgtttaatggatcttgtatacaaaacgatggaaaccactactgggatgatgttttcacaataacgtaccagaaggctgataaccaagggacttgcacctcattgaacataaaatcagattcttacagattcagtcagaattgtcccctgagcagcagcatgcgtttctgccagtttgtaaccggggtttccacttggtggattggctgcccttagtcccaagcttactgtagttaggaagcacccttcaagtgctgcgaatacttcaaattcaactggggcaacagagtctgctgctgctgctgctgctgatttgcctagtgtgatgacgtgcgccaattatgtgaagctgcccccgtactccacaaaagaaatcatgcgcgagaagctgctttatgcgatcctggaaggccgaggatcgtttcatttttcataagaatatccgaactaacttacaggtggccagttttatgctgttctttaacaggctcagcaaggtcggatgcaggtgctgctgtcgatttctcctttcttttgcatttgttcagctacaagtttctgtttccattgggcaggctaggccatagaggaagagcccccccccctcttccagtacatacatgtaaataaaatggatttttagaactggtgatgttgatccagaattgttaataaatgtggcccagtgtaccatttctacccttccgatacagaaacgcaacgctacatcagaatgaaaatcatgctttaaacaagta

SEQ ID NO: 37564 - DNA, 3301 bp, Zea Mays
aatgacctgtgctgcatggtctcgctacgcaccaactagtactcagagattcagagctgagcatcgttgtgctagctgacagcgtactgtagtcttcccacccataaacctgagcgtcagaaacggtgctcacaatcacagcgcagggtgggcaccgattcgaacgctttctctcctccgccgctgatcccctctcgatttgttgtgcctccagcccccgattcctactgttgtggtccagtgatccaatcgacgtcgacgactccgcagccaccgctcctctcctctcgtcgcttctgccgtctctcggcgtcgaatctcatccggccagtgaccacactctactggccgcccggaaggagttcttccaggattcgagccgttgctgccgtcacctctgcaggcccagcgtcgagcggagatccaatcggaaattcaactgacttcgtcttttatcctccgattcgaacgctttatactccgccgttgatcccctctcgatttgttgtgcctccagcccccgattcctcctcattcgtcggcgatcgaacgcagccagccagttctcctcgacttcttccagtcccacccaccgaggttcctcttcttcttcggcgcgcccgtctcggtggacgccacaggaattggctcctgacttttttcaacgggtggtttcgctgggcccgatgcccgacgttatggccgcagccctaaccggcttctcgcctcgcggggtgattccgagcagaggcagagcatctcttcccggggtcgctagagcgtatgccgagaggcggttggttgcagaaaacacaagcctgccaaacatgcataaagaacaacttgagactataataaggaatcagctccggaagccccagttgccaccttcttcatacgacacagcgtgggtttctatggtgccagtgcggggctctcatcagactccccgcttcccacagtgtgttgagtggatactgcagaaccagcaggatgatggatcttggggtgtcagccaatctgactcatcggtcagcaaggatgttctcctatccacgttggcatgtgttcttgcgttgaagagatggaatgttggcagagagaacatttggagaggactgcatttcatcgggaggaatttctctgttgctatggacgagcagttcacttctcctataggtttcaacttcacctttcctggtttgcttagcctcggcattgatatgggtttagaatttcctgtaagacaaattgatgtctgtggcattcttcaccgccgggagatggaattgaaaaggctggctgtggatagttcttttggaagaaaagcatatatggcttttatcccagaaggattcggaaatatgctggactgggatcaagttatgaagtttcagaggaagaatggatcattgttcagcactccttccacaactgctgttgcattaatccacaaatacaacgaccaagcccttcaatacctaaatttgcttgtcaatgaatttggcagtgcagtaccagcaatgtatccttcaagggtacattgtcagctttcaatggtggacgcgcttgaaaaaatgggaatttctcagcgctttgtcagtgaaatagaaagcatcctggacatggcatacaaaatgatgaggaactcatgatggacatagcaacatttgcaatggcatttcgccttttgaggatgaatggttacgatgtttcctcagatgagctgtctcacgttgctggagcttccactttccatgattcactacaaggatatttaaatgatacaaaatccctactggaattgtacaagacctcaaaagtcaccttatcagaaaacgatctgatcttagatcgcataggatcctggtctggcaacttattgaaggataagatgtgctgtagtagggtgcaaaaagactcgatttttggagagatcgagtatgctgttaattttcccttgtattccacactggagcgtctagaacacaagagaaacatcgaacattttgatgcttggggttctctgatgctaacaacaaaatcctcatcttttcgtatcaatcaagaattcctagctttggcagtcgaagatttcagtttctctcaacgtgtttaccgggatgaacttcggcatcttgatagttgggtgaaggagaacaagctggaccagctacaatttgctcggcagaaactgacatattgctatctgtctgctgctgctaccgtattttcttctgaattgtctgacgctcgcatttcatgggccaaaaatggtgtcctcacaactgtggttgatgacttcttcgatgttggtggatcaaaagaagaattagaaaacctgatagcactagttgagaaatggcatgggcaccatgcagttgagttctattcggaacaggtgaaaatagtattttctgctatttatacaacagtgaaccatcttggagcaatggcttctgcagcacaaggccgtgatcttacaaaccacctagtagaaatatggctggatttgttaagatctatgatggtcgaggcagaatggcagagatgccaatatgtaccaacagttgaagaatacatgacaaatgctgttgtctcatttgcactgggcccaattgtgctcccagcattgtattttgtagggcaagagctattagagcatgctgtcaaagatgaagagtacgataaattatttaggctagtgagcacttgcgggaggctcctcaatgactaccaaagtttagagagggaaggcaaccaggggaagctgaatagtgtttctctacttgtgctccacagtggtggttctatgtccatagaagccgctaaaaaggcaatgcagaagtccatagacgtgtctaggagagacttgctaagattggttctcaggaaagaaagtgctgttcctaggccatgcaaggagctcttctggaagatgtgtaagatacttcacctgttttactctcagaatgatggatttagctccccaaaggaaatggtcagtgcagtgaatgctgttatcaacgagccactcaaagtccaaaacagtactacgtttttgtctagttcatcaaggtagcgaggatatcatgtaatttatcctgttcatatggatcagaagcaacagcagcaagcttaagatatttgtaagtttgtgactgggctgctgtggatctgtgaagctacaactttgctgtatgtggatcaaggtattaggaagatctggttcacatattgataacataatggataaaccataacgttaaattatgtttgcttaatttcaaccgtaatcgat

SEQ ID NO: 37565 - DNA, 662 bp, Zea Mays
cactagtttcaaattttcatctgttaaaccctacccacccggcgaatcccttgacaaatccaaccagcttgccggaggaatacaccgggaggtacgtcaaacggcggggagagggaggagtaggtcgctgagggagggttagagctgggcaaggccgtcgctgtcatggaggcgcaggcgacggcgacggtgaaggaggcgcttgcggcgctgtaccaccacccggacgacgccatccgcaccgccgcggaccgctggcttcaggagttccagcacacgctcgacgcctggcaggtagctgacagtttgcttcatgatgaaagcagtaatttggaaactctcatattctgttctcagacccttagaagcaaggtacaaagggactttgaagagttaccctcggaagcttttcgatcattacaggattctttatacgtattgctaaaaaagttcaataagggaccacaaaaagttagaacacagatttgtattgcaattgctgctctggctgtgcatgtacctgtagaggactggggagctggtggaattgtgaattggctaagtgatgaaatgaaaactcatccagaatttattccaggcttccttgaactgcttatagttttgccgcaggatgaggctaccaccactgtgtaggtccaagg

SEQ ID NO: 37566 - DNA, 2307 bp, Zea Mays
agcccagccactttcggtccatctgaaagttcctcgctttagccctcaaaagtctcctacccctttctctgtgccagaaaagggacgggaaggtgccaataaattgcgaggatgccgctttatctcttctcctctcccgccgccgccaagctcgccaccggcccacacgcgtccctgcaccggcggcgccagttcctcttccgagttccccaccgccccagccgccgcgccccactgctaacttcggcggctgagcgtccagcagggcgcaccatggctactgcggataccggagcgtccacggtgaccgattcgaggctccgaggagtgaagcaagcactgatatcattgtcagataaaacagacctggctaatcttggaaatggtcttcagcgtttggggttttctattatttccactggtggcacggcatcaagtttggaagcatctggtgttaatgttacaaaagttgaagaaattacacagtttcctgaaatgcttgatggaagagtaaaaacattgcaccccagtatacatggtggtattcttgcgcgaagagaccaggagcaccatctgaaagcactgaaagagcatggcattgggacatttgatgtggttgtagtgaatttgtatccattctatgataaggtcacctcaggtgcaatatcttttgaggatggcattgaaaatattgatattggtgggcctacattgatccgagctgctgccaagaatcataaggacgttcttgtcgttgttgatcataaagactatcctgctctactggaatatctagaagggaaacaagatgaccctgatttccgcaggacacttgcatggaaagcattccaacatgttgcttcctatgattctgctatctcggagtggttgtggaagcaatctaataaagcagattcatttcctcccagctttactgtgcccctcacaatgaagtctacacttcgctatggtgagaatcctcatcaaaaggctgccttttatggtgacaggagtctttctctagtaaatgctggcggtattgcaacagcaattcagcaccatggaaaggaaatgtcctacaacaactatctggacgcggacgctgcgtggaactgcgtctcggagtttgagagcccgacttgcgtcgtggttaagcacacaaatccgtgtggcgtagcgtctcggcacgacatcctggaagcgtacaggttggctgtgagggcagaccccgtgagcgcgttcggaggcatagtcgccttcaacacgacggtcgacgaggatctcgcgagggagatccgggagttcaggaggccgacggacggcgagacgaggatgttctacgagatcgtggtggcgcctgggtacacggcggagggcctggaggtgctgaaagggaagtcgaagacgctgaggatactggaggcgaagcggaggaggagcgggaagggcacgctgctgtcgctgcggcaggtcggcggcggctggctggcccaggagcccgacgacgtgaccccggaggacgtggccttcacgaacgtgtccgagagggctcccgacgcccgtgagctctcggacgccaagttcgcgtgcctctgcgtcaagcacgtgaagagcaacgccattgtgatcgccaagaacagttgcatgctgggcatgggcagtggccagccgaaccggctggagagcctgaggatcgctttcaggaaggcaggggaggaggccaagggagctgctttggccagcgacgccttcttcccgttcgcttggaacgacgcggtggaggaggcgtgccagcgcggcgtggcggtgatcgcagagcccggcggcagcatccgggaccaggacgccgtggagtgctgcaacaagtacggggtggccctcgtcttcaccggcgtccggcacttcaggcactgatcgacggcgacggtggcagcggagaccgtgacgacggacgatgggagggacctctatatagctgcgtcgatctggccggtggctggaaggaaggatctggcgtttcatcccagcgctgatgccggctggcgtttcttggctactagggagactctgatggtgctgatacaaccaaatgtcgcctctcgagaggatgggtcggtgggtcccggtttgtatatatgacgtcgtcagcctggcaagaggttgattgagcttaatactaactcttgcggtggatggaaatcggaaacggtcgctgaccggtgggatcgcacagtctgctgctagaagcatgcaaaggctacatgccgtgttattattgttattaatatttattgctgtcacgttaca

SEQ ID NO: 37567 - DNA, 2025 bp, Zea Mays
ccattcccattcccattcccatccggtaacggcatcccgcgtccctcggctcggatcgccgccgcccaacggagcaggagcaggagcagcgatccatcctatcctaggagccaaaccctagccagctatggagccgcccgccgcctcctcctcgtctgatccccactccccgtctccgtctccttctccctccgcctccccggccaagcgctccgcctggaagcaccccgcccccaacgacaccgccgtcatggacgccaacaactggcccgcgctctccgacgccgccaagggcaacaagctcccggactcctcggctccatcacctgcgcccgtagccgcaccatcggccgttgccaactcctccagttcgcaaaagcacggcgcccatcacggccgccacaagtccgccaggcgcattggcggtggtggcgaccactctccacgagaccatcctgaccggaacgttgccgctggttgggaccatgctgccggcggtggcgggggcaggggtgcccagaggaaccataataacggaggtggcaggaggggcaatggcgcacctgcctctgccactgggccttctcatcacggttctggtgccggtggcggcagcggcggaggctttggtgctaggcgaagaggggcatacgagccaccattctatcgtggccctccaccaccgatgggcatgggccactacatgagagacatgccatctcccatgtctcctgtatcccccatatacttttatgggccaccaccaccagaggctcttaggggactgcctcttgcgcctcctatggttggcccacctgcttatccatactttcaagcccagcctgaacctgaacctcagcctgatcctgagcctgatgcggaagaggaacgtgtcaagctgctcaagcagatagagttctacttcagcaaggagaacctatgctcagatgtgtacctgaggcagcagatggatggtcagggctgggttgatttatctcttatagctggcttcaaaaaggtccaagggctgaagaaggacctacaatatataaaagagacggtgcagtcctcatctgtactggaaatgaaggataataaaatcaggaagcacggagactgggagaaatgggtgatccctcgcgagagcaatcctgatgccccgtcaagattagcatctgtatcaagacctaatgtcaataacctgacatcacatctaggaggcatgggtctgcatgaatccgctagctctactggcgcagaggagctgaaccatcatgatgtcgtccagaacggatcgccttctggtaaggaaccggcagctgaagacagttctggtcagcaggagttgcaataagacagtggctcgccttcacaccatgactgcaggggttttgtgccagagcacaaatgatagtttcttcttttttttcgggtttttggggttggttggggggggggggtttggacgaggtgtgataatgactcatgaggggcgtgttagactgacaggcgaatgtgtttaccgggggtcaggtagataagattttgctttaccttgtggtattcaggcggaggggtagggcagctggtgaagcagcagagaaggaaggcggtggttacatctggaggcgcctcagatgacatggaagactgaaaaaacaagtctattgaagactgaaaaagaagtcaattgaagactagcgtagcggccctgggcggctttgttttcacaggatggtattctggtgttgcgatgaactagtcttcatcgggatggatgttgtaggaccttcaggttttttttttattttttttatggaggagctgaaagtttctgacttgggagagtgagggagtttgacttgttttgtttttgtggtggcgttaagttaaagtaagaagaagatgttagataatgtttgctccctgttcattctgctgtgctggccttgtatggtattatggtggctgtgaatgatggagactgagattgcgtggtcctgttctgcagcagcagcagaagac

SEQ ID NO: 37568 - DNA, 7313 bp, Zea Mays
cctgtttctaccgttctcattcccattcccggttctttctccaccccgatgcccctccccctcccccgtgtgatcccctctccagatcgatgtctgccccggccgtaacccccgcggctcaccgcacgaaaccgccgcgagatcttggagctcagcctctgacgatggctacgactacctcgccaacctccgcgagctctgtccccctccctctcctccaccggcggcgggggatccttggccatgttcctcccgaggcgccggtccacgcgcttcggcctccgcgtggtcatcaagcctttctgatggctcggaacagaggtcagctatgcgatgtggcgtggcgaggttaccgcgggcgccgcggaggtggagggggaaggggaggacgagggcacgggcaagagagcgcatcgctgtggacggtctcgtgagtgagtgctgctgcctgcccctctctctctgcctgcgttctcctggtgctgctctccctctcctcccctgcttcgacctcccgcctttccccaccgtttcttggatttctaggatccagacaaccgcccttgtgagcctgccttcctgcctactacctgcgtacgtacaggagggaccttgggtgatccgggtgcttggtttcttggttctacggctttcgctgctgttggatttgccgagccggagccgacggagatgaccgtcgacgagctgaagctgcaggcaagggccagcggcggccacgacctaaggaccagttccccgtcggcatgcgcgtgctcgccgtcgacgacgacccgacctgcctcaaggtcctcgagaacctcttgttccgctgccagtaccatgtgacaacaatgggccaggcagccactgccctgagctgctgagggagaagaaggaccagtttgaccctgtgatcagcaacgtccacatgccggacatggacggcttcaagctcctcgagcttgtgggcctcgagatggaccttccggggattaacagctgaaaacctcgcccgatttgtaaagaagttttcttgttcaatgcggcattgaatttgggaggaatgacaagtctcatgaaaacttctgtatgccctacacgtgaccactaaaagaaagagttagacaggacaaaaggctgcaggtataatgaacgccaattagtttcctacaggaacttcaattatttctggtggttcagtgtacaatgtgcacagcctctacacaaaaccccattccaattgatatggttttgttactcgattatgctttggtccgaggtgaagcggcagaagaagagcttttacatacccttacaatgctgattttgatggagatgaaatgaatttgcatgtccctcggacggaggaagctcgcactgaagcgcttaattctcataggggttcaaaataatttatgtactcctaagaatggtgagatactggttgcttccgcgcaagacttcttgacctcatctttcttagatatgttttcgaattagattgggatggaaattcacatttgttatcacattttctgttagcaagcacaaccattgtgacattattttgcatgcactcagcctctcaccatggctatgagaatgaaattcaacttatagatataccaaaatgttatagaatcaatataattagatatgtcaagatgacaacacatatttcattcaactactatggatttttcattgataaaatacatgcttgatggctgcttgtctaaaatttatttgtttaatattctttgtttgtaagcccaagaatttgtaaaccaggaaataattccaatgaaagatcggtgcggggcggaattttcttggctttttgtagtggctaccgtagtacatcaacttgggcacttggcgacatgtccggtgcccagctccatcacatatcaatctgaaattaaacatgtgtctgagttctgaatgaaaaaattcagctaacagctaacactacgcactactaacagacctcaagcataatactgttgatttgatgtccttatatttatcttgaagcattgcattcatgcagtcatgtaaatagtactttatttatcttctgaccaacacactaataaccaacctttgcagtgatgggggatacttcaatgcaataatgagcttcccacaaaattacccaaacagcccaccatcagtcagatttacctctgaaatgtggcatccaaatgtctaacctgatgggcgggtttgtatctctattcttcatccacccagtgaagatccaaacggttatgagctcgcaagtgagcgatggacacctgtgcacacatttatggtccaatttacaatggcttcactgtaaatgggaaaacaactcggtaggaatgcttttttgaattataaattatttctatttcatacgatgcttataggtatgtgatgagtcctccaatctgagaagtagagcatggtaaagcactccaagctgctctttcatcgggaaatttatagcttgtaggtactgatcacagcacattcaactccacacagattgtccatgtttctttcagtcaccatgatttatcactaggtcattgtgtttgtggccaacgagtattgttctaacagttatgttcccatagctagctagattcattgttgtgttttgttcagggtactttcaccacttctggtatggttctgtctgtaatgtgccagggattattatattgtttttggtttggatttggaatggtttggggtccacaacgatgatgcgtcagagctgttccaaggattggatgatttccattcccctgctgccaattcgactaggctcgccgtctccgctctgcccaactggcaccaagcagccaatggaacttgagcagccaatggatgatttccattcccctgctgccaattctccgaactgctttgacccttcaactcaatccgcatgtacccaggattctttgcttgctcttctacttctgaaaattcgcaaaatggatagataattccagttaattttaatccattacagtagcctattgtggcagcaaacagcgactgggtgcggaagccggaagggagaggcgcttggttgacccagaacggacgacaagacaccgccgggggttcgctgcaaccgcacgcgtggtggccggtgtgggaaggagcccactgctcaagcagcgacgacttccgtaacttctcaggccaagggagggagggcagcaaagaaagcaagcaagaaagaagccgattccactggtggttaaggttttggattaaaggagagaggtgcagagaaaaaaaggttgcaactccctgggccaagcagtagcccagcaagttcagcaccaatggcagccatatgaaatataaggcaaagcagataaaaagcttaatttttttcaataaggtaaaggcaatgacagaaaagtgaggagggtcagaggtgtacagataaggatgagggctgaaaagaggagcaggaagggcatgatgaaatcagtgtttgctatttagcctccttcacaactaagatcatcctacataatagatttagacaacaaaaacttatggagtttgctgaaatgccctttcaggcatgctccatctgtgctacaagggtcagaatggacttgataggacatttgactatacaacatggaagttatttcaagatatccttttttaactatgctgtcgttgctgatcatttgcatttttacatttttcacattatactatagttgaagatacattcctgaggacgaatgggtgcagttatgggcttcctgcttgctgccagcagtcttttggtgcttttatattgctattaatttgtttgaaatttattatggtgatgactgggaaggtctttttgaggctattactggttatggccttggtggctctttggccgtgttggtggtggtatttataccaaggctgctgatgttggtgccgaccttgtggggaaggtagaaagaaacattcctgaggacgatccaagaaacccagctgtcattgctgacaatgttggtgataatgttggagatattgttggaatgggatcatatctctttggctcatatgctgaatcgtcatgtgctgctcttgttgtggcctcgatctcgtcttttggaatcaaccatcaatttactccaatggtgtatccccttcttgtcagctctgttggtattatagcatgtctcataacaacgctgtttgcaactgatttcttcgagataaaggctgtgagtgaaatagagcctgctctcaagaaacaacttataatatccactgttgtgatgaccattggcattgcgctcatgttggcttggtcttccatacaccttcaccatttataactttggagcccagaagacagtgcaaagctggcaattgttcttgtgtgtggcggttggtctctgggctggcttagtcattggttttattactgagtactacacaagcaatgcctacagccctgtataagatgttgctgattcctgcagaactggagctgccactaatgtcatttttgggcttgctctgggttacaaatcagtcattatcccaatttttgctattgcgtttagtatcttccttagcttcagccttgctgccatgtatggtgttgttgtggctgctcttggaatgctgagtaccattgccacagaccttgctattgatgcctatggccctatcagtgataatgctggaagcttaagtctgtatgggtgcatcttatcatttatatgtatatctgaaagcttaagtatttttttaaatagaagatgtctggaaactttagtaacgacatgagtttcaggctttcagctatagcagtcttattcgcttttaagacagagaagatttttatttagagtttagaaagagtaggtgctatgggtgcatgttatcatttatgtggggaacatctctggtggaaattaatcagtaacgacatgagttaagacagagaagcttaagtattttttcagctatagcagtcttattcgcttttaagacagagaagcttaagtattttttgaatagaagatgtctggaaactttagtaacgacatgagttaatcagaagagatggaagggtagtttatcaacatgtatttggcacttcgccgaaaatgtcacttggactatcttgcaaactgaattttcagattggcttcttctgtctgaacattcagttcagtcttgcaggatttatttggtgtgcacactccagaggtcagcattgattcgatccaaatcaacttacaacttgttctacattgtttttcatcaacaactgtgttcagcaaagagtaaatacgtactacaacttattgatcattgaaaacctcgtgccttttttgggttaaccaagtttacctagatttcccacactgggttgagtgggttgggcactgattgactcaaaattgaccagctttatggccaccgttcagcaacctcgcaatggaagacaaaaaatccttccgacaccgcggccgcaatagttgaatacgtttcatcatcatcaaccattttttatacatcatcatcatcatcaaccatttttttgataggtcatcatcatcaaccatttttaatcgcactctctcgggcggccttaccaaactccctgcatcttcttgcctagaagtgcagtacttgaatgaccaatcgtgcagctgctgcgatactactctccttgcccacactgcgtcgcaatggtgcaccgatctcctgctccagaagctaccaccgctctgtgcttggcactgctacttcttctctttccctgaaccagctccaccgccaccaccataggcggcgctccaaacacggtggcgccatgcgcgccggcgtggtgcggggacttggccatctcctacccgttctggctcgcaggcacgcatctgcccaagtgtggctacgaccaagggttcaaggttacctgtgacaaagccaaggtgtacctcaagaactcgacctgcacgtaccaaatccaggccatcttctacgccatgaagctactcagagtcgccatcgtcggcctgtcgtaggacgatggcacttgcaacatcgacaagttcgtcaatgcctccttcgtccccagcccgccgttcgaaatcgagccccaacaaaaccaggagctgttcttcgtctacgactgcaacctgcgagcgccgcagctgcctcggtcttggacacccttgcgctgtggcaataatggctcgttcacctggctttctggggagtacaggcccgaagacagctccatggcgatgccggggaactgcaacgttgcgatgataccggtggtggcgtacgagggggcgaccgcggcagattatcagtggttcgtggagggaggtttttttcttagttactacctcacggacactgaggacgacgactactacgaccagtgccaagcttgctcgtaccgcgctggccacggccaatgccggacaattgtcagtgacaatgggttccagtgctactgctctgacggcgtctactcgacgacggcctgcggaaccaagagggctaactggaagacaacaattgtagttgaatcgaagcgggaactgaatcaagaatgttctatttatatcggtctcaggatgaacgagcaccaggagagagtccgggaggaggcatatactgttgggacgtgtccaagccagtggagatgcagtggagatggaggagatcgacattggcatggagaagctgcgaaacccaccgcagcagaaccccacctagaggaagaagtagaaaacttgtgccggtatgagcttcctaatgagagctgggaagtaaatttgcctcctgaaaaggtgtctcctgagctcccagtaccaacattaggcataaactttgcaagagatggaatccagaaaaaagagtggttgtccatggttgctgcacacagtgatgcatggttactttctgttgcattttatcttggtgctcaatttggtttcaataaaaattacagtaattctgaaaatatgaggcaaactgacctcaacagggttgagatgattccatcatacttatacgaagattttcctagcaaggcaagggataatgggtacttgctctgtgatgactcaaaaagaatgagattgatcgattgtgtagctgttgtagctccaattgagaaatattatcagtattaagctgctttgatggttgcccggtctattgcttgcatgtagcatgcatctccgcggagatccaagttgttatgctttgagctattgcatcaagagtttaagatagtctttatatattttact

SEQ ID NO: 37569 - DNA, 1922 bp, Zea Mays
attgcccactaaggcatcattccgccaaagacccaaagtggcaaacgcccaaatcgacaaaccctaatgacctaatccccaacccccagccggcagccgccgagcaaaccagctcatccggtcggtcatccactcatcctcatcccctgcccatctgatccgatcggtcatctcatcctcatcccctacccgatcggatcccctgctcatccgccgagcaccaccaggcagcaggctccagtcatcgagcaccagcaggagcacggcgcgctgcccagtaggagcacggccaagaggatgacgcccgcatcctgcctcttctcctctgctactggagcctctactgctaggagcacggctaggaggacaacacccgcatccagcaggagcaccagcaggaggaggacgcccatgctgctgccgttgagcgatgatctgatgcgcccccatcatggctcttctcctccctcacggcctcgcctcgatctgctgctgccggtgatctgctgctgccggatccgagcgccgtgcccacgggtcacggccagcgatatgcagggatcaagaatccaactttgagaaaaattgctcgagatgtaaatggcgccgccggagtaccagcagtacctcgtgcaggtgaccaagtaccaggccgcacagaactgcaaggtcatggtgatttcacgtccgttaggctcgagaggtggactcaaacatgacatccaagttttgcaagttttgatgttggatgttaaatttctatgctcacccctcgtttggttattgatttgataatagttttgcatgaactattggtgttggctatctaaaggacagaaaggcagacatgagcaacagatcccgctccatgggctgaaactgggattcgtgatggcagaaagtgctactgtcgctctcaattgtagcggtgtggtactgggatccttgccaataagtgtgtttttagggtgagcccgtccaagatgcccatgcgtccccgcgcccctcgccagctgatgtcgtactaggctaggggattgaagaagcacttgaagaggctcaatgcgcccaagcattggatgctcgacaagcttggcggagcttttgtaagtaaaaaatattttctagctttggtacctacaatcttctgtacttccccatttgtctaatgcttcaggttgttcttttttctgtagatctgtgtaccttatccttgctatactgtccatatatgctgtgtgcatgaaagtcttgcattgaaaatgtcatgtgctacaatcgttaggactattaatagatgttgctctgtctatctatccatttcatcgctggaaattcccatgccctttcatagtacgcctgtgaaatgctcgctgcttttctattggtttgtgtgcagttcatgctctgcaaggtgaggtctgttcagtttggccagaaaggtatcccctacctgaacacctacgatgatcgcaccatccgctaccccgacccgctcatcaaggccaacgacaccatcaagatcgatctagagaccaacaagatcatggacttcatcaagtttgacgtcggcaacgtggtcatggtgaccggcgggaggaacaccgggcgtgtaggagtgatcaagaacagggagaagcacaagggcagcttcgagaccatccacgtgctgcttggagctttttgctatgtctagttttttcctatttgttgtacaagaaaacataaaatggaattcaactttggtggccgcaaaagtttagagacttgatttcatataaagttaggctgaacattactgcaaacagttgtattttagtttagatttagagtacacttatgtatgtgttgtttgacaatgcttatttatgatatattgaatggtacttatttatattatattaattataatgttgttcaat

SEQ ID NO: 37570 - DNA, 1761 bp, Zea Mays
attcacccccctctaggcgactatcacttatgttgtgcctcagctttttgatatcagcatttaccagaagcatagatcttactatgctgcggtcaaaggtgagcacgtaagcgatataaaagcacgggtgtcgaacacattcttgccgttacaccctaagtttgcaccgagattacgtgagattgggctccatgtgttcgcatgcttggtgagtcgcaacagacggtttccatatgattaccccctgatgacatcaatgatagacaggtggcgcccagagacaaacacattccatcatagaattggtgaggtcaccccaactttgcaagatgtttctatgttatgtggccttccattgaaaggcaaaccagtgtattctatcaatgtgcgcaatgattggctggaagaccttaataaacggttttcaagtattccatggaaggagggaatgaatgtaccggaggttgaaaaaatcgataccaaacactcaaatggcccactcctgcattggctcaaatctctcagttctaaatacatgcctcatgatgctaatgaggccacaatatctctttccttggaagcatatctgctttggctttttggatatgttatgttttgcaacacttgggggtcagcagtactagcagcaacatatgaaggactttccaagatttgcataacaacaggactttcaatgcccaagttgaggtgggctagcgaggatcctaagaaggcacgtaaaacattcaccgaaatgttagataacattaaagacatagattttttgtggaacccatacaccagaacatgtattgaaacagttgcaccacatggtctctcattgttgtgctcttgtgacaaggaatattggaaaaccaaggatggcctcatcttcaacaacactgtccagaagcacccggtagagcgggtgatgcgacattttagtttataccaagagcagttgttggttgcagtagaggatcagcaagaaggtgagcagttgttggttgcagtagaggatcagcaagaaggtgttgcatggccagaaagagagccaacaaatgtactgaaggaggaaagggtacacgatgttgatgcattcaaggagtacctgaaatggtttagggaacgttcacgtgtacgtgtggctttcattcctgaggatcccagaatgaccaacgaggatcccaaaatgaccaacaacaaccatcttctttcaaaagcaataagttgatattatcacatgggcccaggagaaaacggcagcagactacaaccaggagactgtaacagatgaggccatgatattgttagatatcaatgtgaagtgcaaagaattcctggattattataatgaacttcagccaacgaccttggatgcataggatgaactaacagaggacaaaactcacacaaccatggatacagacgtcaatccaaattctgcttcagtttgtaacggctcttaaaattctacttccttttgtgaaggtggcagtcgtgaaggtggccatgaacaaaaaaatccaaacacttttgtgagagaaagcaggtcaaaaaggcgggctctgtataaagcttgcatagatttggcttgtacaaaaagtgaaaatgatacatacaaaaaaaatcataggaaacagggctgctttggcagaattatcaagcaaatatctgcgtcacctaatgcctgtgtaagcattttgtttctcaaatgttaaatcactctcaaagattttctttgctgataaaatattccta

SEQ ID NO: 37571 - DNA, 400 bp, Zea Mays
aaaacacattcaatattaattcaagtaccatgaacgaattaatcgtatgaatatcccttacacattagtcatcttgtcaacactggattgcagtatttggttgacagtgtcgtagctgcctatttgctctcatctgaccttctgacatggaatatgagtaaaatccaagaattttgtattttatagactttaaccatgcgcatgcacatccatctattttgttgttgaatccagtgatttttttcaggcatcaacaatgcagcaatgcctcactggcatcatgattattgaacggcccaacactacagaaattcagccaaccattgacttcgctagacaacaacccacattcacggcttcagtgcgctgcttcagctttgtgaaacaaagggataattgc

SEQ ID NO: 37572 - DNA, 1761 bp, Zea Mays
ctgccattgatgggcctggaccaataggcgtgggggttgcttcagtgctgggcgattttaaatggttcaaaaaccaaaccatctactgatgatgcttgccaggaccaatcagtaccaccagcctctggttccgcaacaaccagtaacactggaagtatctcaccttcttccatagttggagaggagctaaaactagctttccaactgcgtagatttacttttagtgaactgaaatgtgccacgagaaacttccgacctgagagtcttcttggcgagggaggttttggctgtgtctttaaaggatggattgaggagaatggaactgctcctgttaagccaggcaccggattaactgttgctgtcaagacactcaaccatgatgggttgcaggggcataaagagtgggtggcagaagttgattttcttggaaaccttcagcatccacatctagtgaaattggttggctactgcattgaagatgaccagaggttgcttgtgtatgaatttatgccccgtggaagtttggagaatcatctttttagaaagtcattgcctctaccatgggccattagaatgaaaattgctcttggtgctgcgaaaggcctcgcttttcttcatgaagaagctgaaagaccagtaatctatcgggacttcaaaacctccaatattcttttagatgcggactataacgcaaaactctctgattttggacttgctaaagatggccctgagggtgataaaacacatgtgtcaactagggtcatgggaacatatggatatgctgcacctgaatatgtaatgacaggtcacctgacatcgaagagtgacgtatatagctttggagttgtactactagagatgatgactggtagaaggtcaatggacaagaacaggccaaacggagaacacaacctggttgaatgggcacgcccttatctgggagaaagacgcagattctataagcttgtagaccctcgtttggatgggaacttctccataaaaggcgcccagaagacggctcagctggcccatgcctgcctcagccgtgaccccaaggctaggcctctgatgagccaggtggtggaggtgctgaagcctctccagaacctcaaggacatggccagctcttcctactacttccagtccatgcaacatgagcgtcgcacagcacttgccaacccatatggcagtcaaagcatgaaagcgcagagcacctttgcgcggaacgggcagcagcccatgaggagcctctcgtatggccctcatgcttccccgtatcgccagtcgccaagacttgacagcaagcggcaatgagtcatggtgcttgtctgtcgaccataacatattttcaagactgaagttgtaaccagaactggtgtatgaactcagccatccaacaagcatctgagctatctattattgtggatgaagcagcaacattgattcgaatttgcatatcatctgcgagtgaatttttctctcttgttatcgcttacattttagctgtactgtctttacggctctagataccttgacttgaaaggtggaactaaacagggttttgatcggtctttgaaacaatgctcaggcagcaaatgcttggaatttgttccttcctggaaaccagcagtaggcaagtctgatatatgttacatagttgtcctaaggctgttcataatctatggtttcttgtcacaatatccaaatttgccacgtcacatattactttaaaaggtatatttgtcccaatacatagtatta

SEQ ID NO: 37573 - DNA, 906 bp, Zea Mays
gccatctacggctctacgcgaccgcgattttccctgccgcatgccatccttcttccggctccccgctccaccgctccagtacccagtgctcccggccgcggaccgcgggccgttatagctccacttcgcgtcagatcaacccgcccttcggcttcaagcacagggtcaccggcaacctccataggtgcctctccctcatcgctacgcttcatatctctttcctcacgaagcaatccctgtggtgcggggtctttattggtgaagctgagatagatgccgctggaacgctcgcccgttgttgccccctcctagaggatgtggctttcctccattgcagcaccgtggatgaggccgatcttgctggtatgcaatctctcaggttactttcgtccactccccctccacaccaacctgtgatgtttgggatggcgaacgggcgagggaaaaaacattccgaggctgcactgctctgcctccagacgctgtgatccttatcggctcctctggcgcctctccggcgagctacctcgattccaggtgagtctacgcgcattgcctcctccaacggtcggaccccttaacgacctgacgcgattcatggatccaagcatcgaggtatgccgtatgcgccgtccacagcagtaccgctcctcccctctcctggttcttgctctggcagcgcaaccatgaacgtcgtcgtccatcggcatcttgctctggcactcgcccattactgctattgtattgtaagtttgagcagaataaagttggggcgtgttcttggtctttgccttcagcttcctcctgacattgttaggtaaaagaaatctaccgatttagtttcatgacgacttgatctcttgcttcaagttgtttgttgttaattctctaaggaataatgttgga

SEQ ID NO: 37574 - DNA, 3063 bp, Zea Mays
atcgccttcaccgccacacgctgccacgcgccatatataaccagccgttccctcctctcatgctcccctttccaaatccgtctccgccctcacgcacgcggcccaactagcctaacaaaccctagctagatttagaaaaaaaatttgtccccaatccgaaccgacgaggagctcgccgccgtgagatgtccgagtacgacgagcgctaccagggcaacggcgacatgcccgcagccgaaggcggctatccgcaggccgagtacgccgccgccgccgcgcctgccgccgggggttcgccgcccgcagacagcaagccctccgggttctccgaccacgccgacggccgctcctcccagcaccagcacgagacacaatcacatgacagtggttcctcgaaatctcgagaaagggaccgagaacgcgataagggcaaggatagggagcgtgacagggatcgtggccgagaaaaggggagggaccgagacagggataaggatcgtgaaagaagtgacagagatcgcgatcgccaccacagggaccatcgagagcgcagcgagaaaagggaacaccgtgatcgttctgatgatcgtgaccgtcaccgtgatggtcgtgaccgccaccgtgatgatcgtgattctgagaggagaagagatcgtgacagagatggtcatcgtaggcatcgctcccgctccccttctaagagtcgtgaccgtgaccgcagatctagatctcgttcacgctctcgatcaaagagcaagcgcgtgagtggttttgaccaagcacctccacaacatgcacttcctattgttgctgctggtgctatccctggcaaccttggcgcactttgtcacctgctgccaatggattgagctgactgctgtagctttgatgtacgaggacactatctggtttggtatcttgttcgtcttcatatcagcatgtgttatattttcgttagtttcatagtttgatttccttgaaacaatatgctacagctgatatggagttttaagaaaaaaagttttatatgtaggctttttagcaatggtggttttctattattttgttctataatatcttttgctaagcaattttcatcattttcataaattattctgttgatgtattgtaggtcagcttcctggtatcactgctcctattcccggggttggggtgcttccgaacttgtataatttggctgcaggacagttcaacccccttgttattcagccacaagccatgacacaacaggctacccggcatgctcggcgtgtctatgtgggtggacttcctccaacagctaatgagcagaccgttgccatattcttcaatggagttatggctgctattggaggaaacacagctggtccaggtgatgctgttcttaatgtctatataaaccatgacaagaaatttgcttttgtggagatgagatctgtggaggaagcaagcaatgcaatggctttagatggcataatgtttgagggagcaccagtgaaggttagaagaccaacggactataatccttccctagcagctgctcttggcccgagccagccaaatccaaatctcaatcttgctgctgttggcttaacacctggctctgctggaggattagaaggtccagaccggatctttgatcttaatgtcaccgacattgcctgtgctgcccttaatggcatcaagatgggggacaagactcttactgttaggagggcaaaccaaggagcttctcagcctaggccagagcaagagagcatcctgctgcaggcacagcagcaggtgcaaatgcagaaactcgtataccaagtcggaggtgccctgccgacaaaagttgtctgcctgacacaggtagtgacagcagatgaactgagagacgatgaggaatacaatgacattgtggaggacatgagggaagaaggacgcaaatatggtaaaccgcacgaggcccatcgagttctcttataccttctttgttttaaaagctcttacattcagctgttatgattatgattgcctaccctcagttactgaattggtttccttttgtgtttttgtcttttgtgtgtcttttttgtagtcccacataatgccattgcagagtgttttatagtccgaccctatgcaatattggcaatcgggctttaacccacagaagacactattcttttgagtttgattaatcattatatcattagcctcttgcctatatatctctactcactaacacttggacaggtaacttggtgaaagttgtaattccacgacctgaccccagcgatgctccagttgctggtgttggaaaggtgtttttggaatatgcagatgtcgagggctcgaccaaagcaaagacggggatgcatgggcggaaatttggcgggaaccaggtggtggccgtgttctatcccgaggacaagttcgctgctgagcagtatgactgaaagttgtagaacctgttctagagttgcaacacacaatgtgtgtgttttttttaaaatctttgagggtaccgttttctcttgaatttgaatcttatctagttataagtttggtgcaggaccagtcgataagcgataagtttgtgcaggaccattaggctttgtttgggtaattagtattgatcccaatccaaatctatatatgttaatgccttgttcagttattcttattccatatggattggagtgtatcggaatgagttttgacttgctatagatttaaacaaactcaatatcatccattccacatggattgacgaagaaatgaacaagccctaaggccttgttcggttattgatattacatgtgtattggagtgtattgggtggaattgagatgaattttgacttgttatagatttaaaccggctcaatcccacccaatacatgtagattatcaccaaaacgaacaagccctaaggtggattggggtcaatactagagtacccaaactaggccttagttggagggtttgtacttgctactagggcagctaagatgaattcattcgctgtttgttctgggtccattgtttgctcaaattaacaggtgttgttatggtgctg

SEQ ID NO: 37575 - DNA, 2347 bp, Zea Mays
cgccaggtgtctaggtcgctgccgccctacgcctacggcaggtgccaggtgcccagctcttgttcggcccgtacgccggcgaggagcaccaccaggattttgtcccatttctccagttccaatggaacatagctctgcagaagattcagacattagcgattcagatattgctgagcacaaggaggagatttgtgcccaactccgagcagggaaattgaacgtgaagcgtggtgaggccttccgctgccctttctgccctggcaagaagaggcaggactacaacctaaaggatctactgcagcatgccacaggaataggggctgcttctaagcgcagcgccaaggtgaaggcatcacacctggggcttgctatgttcttggagaaggatatagccagcacgttggagcaaccattgcaaattgttccctacaagccaaaaactccaaaggatgaagagatctttgtgtggccatggatgggcattgtggttaatttgcagtgtgagttcaaaggcaaagaatgttccagggaaagtgaagaaaggctaacagcacagttctcgcggttcagacccctccaagccacaacccttagggatggaaagaaccaacagttttgcgctatcgtcaagtttgctaaggattggagtggatttaaggatgcaatggcttttgaaaatcattttgtactcgagcagtacagtaagcctgattggaaaaaaagaaattgcagaaaggacgacctttatggatggcttgcaaaaacagatgattacaactcacctgagccaattggggagtatctaaggaaaaatggaaatcttagaagtgttggtgacctggaacgagagggtctgaaagaaactggcgagcgtgtagctcattatgctcgccaaattgacgcaacaaataaacatatgagtgaactggagctgaagaacaatcagaatgcaatgaaacttgataggatgttggaggagaatgatcgattggttgaagagcacaatgaaaggatactaaatatgcagaaagatgctcgtcgaaattcttggaaaataattaatgacaatattagattgcataaagaactggaaaccaagaaaaaaagaaattggcaggagacacgaggaacttgagaagttggttatgaacagtactaacagagaaaagcttgaagcggcaaaagaagagattgcaaaggagaacaggcttctcgatttagcaaccctaaagaagaaggaagaagatgagaagttcttaaaacttgtaaaggaacaagagcaagagaaagaaaatgtcaggaagatgctatatgatttagaaatgcagttggcttccaaacaaaaacttgaactggaaagagaacagttgagggggaatcttgaggtatggaagcatatgggaaaggaagatgcaaaatcgaaggaaatgctcgataagttgcatgaagcactgaaagagaaagatgaagaaatggatcatattgattctataaaccagacccttattattaagcaacgaagaaccaatgatgagctggaagaagccaagaaagaactgactactgacctacttaatatgtcatcagctcgatccattgttggtgtcaaaaaaatgggtgagcttgacaagaaagctttcattgtctcttgcaaagagaaaacagcagacgagttgtcattgtcaattctgtgctcgaaatgggaagatgagatcaggcaaccagaatggcatcctttcaaagttatagatgttggtggacaggcaaaggaaataattcgggaggatgatgagaagctgcaagctttgaaggctgaactgggtgtgcaggcgcacgatgtggtcgtcaaggcccttcttgagatgaacgagtacaatccaagcggcaggtaccccataccggagctgtggaacttcaaggaggaccggagagcaccgatgggcgaggcagtagcctacatagtgaagcagtggaaggcgaacaagaggaagcattaggcgggcctgatgcctgatggcccttgtgccattggttcctgggtcgatgtccctgacagtgagagctgagaccctgatcccctgactttttctgctgatggaagacctagtaccagtagcactactaaaaaaattgtccgatctcttggacggttagattggctatggcacctagtgcaatgatctatatgtataaaaaatatctgtagtgtttaatgattttaccagaactagataaagattatagaatatttattattatacctgttgtgttggaaagtgaacgtggagagagagcgttacggcttccggagagatcagcgtagtttctgtgcgcgtctcgaattccg

SEQ ID NO: 37576 - DNA, 2925 bp, Zea Mays
ccgccgtctcactccgccccgccacgcgttcatccaggtcgggggtccgtacgatgcaaaaaaatcgcgatgagtccaccacgactccaagcagctgcggacgcgccgctctaaccggagatccgttaagagtccgccgcccccatctcagcgcctgagtcagccgttctctccccgtgctcgcagccactggtttccgcgggtctagggttcgtggaggcagcgtggagcttagggtttcggcgggatgagctaccggaaggggttgaaggtttgggtggagaagggggaagggtgggtagaggcggtggtgacggaagcgaaggaccacgccgtcgccgtgctcacgagccagcgggaaaagacttctgcaatccgcgatgtgcaggcacggcagaggacgatggcaactgtccagcgcacacttcaggcaatggatgaggacaacatcagagatgagtctagaactggaaggctcgtcgtcttggcggcgctggccgccggcgccatcagcatcggcaagcgcatgcccctgctggcgccatctcccccgtcatcttggcggcgctggccgccggtgccatcagcgtcggcaagactgtcatagatgagattttcatgttctgaagactgaattcaagatgatgggatgcttgtgatatcgacagttcctggttctccaccaaagctgtgcatcaaggctgttgcattagaaaacttctgtccaagagcattttcattgctgtcgatcgccggactatctgggttttgctaggccatgcagtgtcctagaaggcctattaattcaatttgcagcagactgaaagctaaagaagtccgtattagagtctgggctcatcaattagctgctcattctccagtacttcattcccttggtcccctacaactccgacctgactggctaattgctgctggagaaaggaacaaaggagaatggagcatgtagtggatgcgccaatgcaggtttcagttcctcaagtatatgttcctatcggacccctttgttcctcaagtgagtgatggcgctggggttgtcttactaagcgagacatttgcactgaacaattgcagttccgctgaactcatagagttcatgtcaatctctctattgaactttaatttttgaaagtttggtacagagattttcataaaaaaaacagatattgcctgattctgttggcacctgatttcctgaatttcatttcgaaaaaagagaagaaacagatatggtctcattctattttatttcaatattatcatgtggtatataagtcttatcacacttgtgtgctgcccatgggagcggtagttcagaagcagttgaacctggagttggtgttccagatcattttctctgaattacatcatattatctgtaccaggtccagatgcaaccagggcagccatcgatgtctgcgaacagggtttattatcaaagatctttggttagggagattgaagcccggttaaaagccaagtgtgacacattagctgatctatttgctatggatgaaagattgttttgagcacatttttagtaaggtctcgttaagcgccgcgtttgagcaccatgtccttccctggatgcacagaagctactgacttcgtggttacaatcgccctttgctttacctcctcccatgatggaaaggttgaggtgagaatggaactattgatggccaaggcattgtgtggtgggatatgtggaagaaaggtacactgccctatacaagacctcaccaattgatctatttatgtggtgggatatgtggaagaaaggtttgtgatggaggtgataaaaactttgtggtgcgaaagggcctctagcgtaatggttaaggcttccaagtagcaactccaggtcccaggttcgatctctctcgggggcgaattttgggcttggttaaaataatcctctcgttgtgtcccgcccggtctcgggggtcgatatcctgcgcgccaccctccgtctgggctgttgcagagtggcctgttgatcggcccgttaaggctgggggcagagttcggggttttttttttcggtcgggaccatgtttcggtctcttcttaatataatattgagagggcagtcttttcatcccagccggagccgagttgataaaaactttgtggtgatcaatcagaagggcattgaccctccatctttggatctctttgctagagcgggggtaatctctcctctatttggtggttacatgacctaagttcattttgaaccctgaatggatttagattttcatttgagaacgtgaatctcatgaagttaagggttgaagaaggcattgactgattaaaactgctctgaaatgatcatttatgctcagattattgctcttcgagctatcacgtggtggtggagctatcaattcagttgatgacttgactgaaaattgtctaggctcatctgatcttgtctatgagtatgttctcgtagaagaaaagtacacatttgtggggaatgtgaaaaatccttgctcttgtactatactgattaaaggattcaaggatgatgttctgttaagaacacagttgaggatgaagcagttgtgttgttatcatccgtaaatttctttgtccaggaattaggaagaataaatttgtgttgatactgtgaaggtaccaggccgacacaaatttatttgataaaatacgtgttcccaaatgtgtgtatgtacgatcaggatcgaataatttatgtcctgtcccaatgtacagaggcactaaggaaacctgtcgcggttcacagcgaacgggtcttgaactcttggctcgctcattttaatattattatgtaaatttcctatcaagaaacgttcctgtgacattacatcgagaagacgagaatcatgactgcagaaatacatctttattcactactgtatc

SEQ ID NO: 37577 - DNA, 1489 bp, Zea Mays
ttcaagataagagcagtgtactgcatgcagttggtttgatgcttgctggtatgggagcttccatcaatgttttccggatggcaagtgctcgttgggaaaagaggcaagcaaaagtcttggagaaagccagaacacggatggtgaaacaggagacgtcagacacgaggagctcttggagcgaggtctgggcatcatccccaccacgagacgaccaaagcaacggcgatggggaagcatcggagagggccaagagagcagcagctgctgccaggcggtggcgagagttctccaggcgaggtgcggacaggcctccaacgcacaagcttcccgaggcagtgggcaacaaggattagtagtagtagtaaatttgatcatattggctaaatgtacagtgccattgtctgtagaggcttgcagtgccttcccagctttgcacgcactcatgtgctccatttgtaaaatctaggtgagtaggtatatagtgatgttgataacctgaacctgtacgtagaagacaacaagcacccagtgctgcagaacaaaggtcaaacatgtacaatacaatagaacgaatacaagtgtatacatacattcgctgtaccatcgcggtacgtagaacccctgtaaccgcagtgtaggtgtagcttctcgcttttgtgtggctgtgcttgtgcagatgaattccggggcaaatttcctttggcagcagtggcacattctcgcgcatctgccaaaggagaagttgcccagaaatgcaggtgcacatcctgggtctcgcgcgctcggagccaatgaatgttctgcgtgtcgtgtgttggtgtgtatgtaggcgcaggctactgatgactgtgtgtgcactgtgcagggtatttgtactcgctcctggaactgaagagtggtatgtaaggcgcttctgtgctgctgcagatcaaaggcacgatgaggaatcaaatgaggatatacctcaggacaatgcctggtccagccgtcgtctagacgacgctgtcgctgcccacctacgaggagaaagaacaaaaggcatgcaatgcaggctggaatggcgcgctacgtgttgggaggcaagcaagctttctttactcttactccgagctgagccggaggatcggagatagggcaggcttttgcagattattcccggtcctggctccggatcgagaccactgcaagatcgacgagaggatcgaatcgtggaaaggcgagcgagccctaaagagtcggatcggagtgggcggatatccacgagcatgttcgtctcgtcgtcgccgctgcttgcattgtgtggatcggtgggcggtggctcctgcctgcttcggaccggcggatcgggatcggccctctcctcctggcagcgcggccgcggcgcatgcaagcaccacgcgggcggccactaatggctgtgcgatcggtgatgcatggggctcgtcgtgtgctgaaaaccaggcctgacatgtggttcgaactttattac

SEQ ID NO: 37578 - DNA, 1929 bp, Zea Mays
gccccttcctacacacgactacacgagtacacgacgccgcgaagaaatctctccacgcccacggcctgacggccacgctcctcgcctgcttcgccgatgccagcgcactcctcccaccttctctcccgcaacccgtagccccacgacagcctccccctccccttccacctccgatcccatggcaccgcgccccgccgccgcagttttcgtcgttgccgccgtggtggtcctgctccctcctcccgcggcggcggcggcgccccccgtgggggtaaactggggcaccatgatgtcgcaccccatccacccatctgcggtggtcgagatgctgcgcgccaacggggtcgaccgggtgaagctcttcgacgccgacccctggacggtctccgcgctcgccgggtcaggcgtccaggccatgctcgccgcgcccaacgaccagctcgcctccctggcccgcgacccgcgccgcgcgcgcgactgggtccgccaaaacgtcaccgccaacatcaacgccggcgtcgacgtcagcactcaagaacatgcagagggctatagatgaggctggctttggccaacacatcaaagtagttgtgccattgaatgctgatatctacagctcccctgagaacaagccagtgccatctgctgggactttccgcaaggatatcaataccctcatggttgacattgttaattacctccatgcaaatgatgcaccctttgtggttaacatctacccatttctcagcctatatcagaatcccaactttccgctgaatttctccttctttgatggcgctaccaagccagtgtatgatcaaggaatggtctacaccaatgtgtttgatgccaactttgatactcttgtctggtcattaaggaaagctggtgtgcccgacatgagaatcattgttggtgaagttggctggccatctgatggtgataagaatgctaacaccaaatatgcacagaggttctataatggttttctgaagaaaatgacaaaaaatgtcggcacgcctctgagacctggtcgtatggaagtttacctgtttgcgctgattgatgagaaccagaagagtgtcctgcctggacgctttgagcgtcactggggactattcacatatgatggaaaaccaaagttctctatggatctcagtggaaatggcaagggcagtgtagctgaagtgaaaggggtgcagtacttgccaccacaatggtgtgtattcaacaaggatacaaaggataagtacaaagatctgccagcctctgtaaactatgcatgctcaaatgcagattgtacaccactggggtatgggtcctcatgcaatggtctcagccatgatgggaacatatcatatgcattcaacatctatttccagacaatggatcaggatgtcagggcttgttcttttggaggccttgcaaagatcacaacgacaaatgcttcacaaggagggtgcttgtttccagtacagattacgagtgcttcagtaacagtggtgccactgatatttttgcctatgctagtctctgtgatcactctactatagacatggaaggctagtagtaagcactgaaatattaggttactgaagcaggaataggtttgcacatgacacaggaaagaagagtcacccaagataaagttgacgaggaagacaaattgtcgaactcgaaccgagtcgttttctctgtgctactggcactagtaacatacctgtattaactttggacagtgggaaagctaaaattttgacatgcgattggtagaagctagattttctactgtctactttccagctgacgattttgcataccaacaagtgtaaactcctcagccttttacgacatccattgctgtgctgactgcaggctgctgacattttacagcaacatggctttcacttccttttcgatacagaattc

SEQ ID NO: 37579 - DNA, 2036 bp, Zea Mays
cgcgattccccaccccgcgcccgcagcccccccccccgtcctcccggccgcagccgagcacagccgccgcgcccacaaatcacgcgactcccgcttccatgtcctcgcgtcctccattgcagccgcatacatagcgtcgccccttccatcgatggcagccagccgcgcccgcaaatcacgcgactcccccttccatggcgtcgcccccttccatccatggcaggtccgcgcccctacgccccaaatcacgcggatggaaggggtcgcgagggagtctctctctggacgcgcccgtcgccgcctccaagctcaggagggagcggcgcccggcccccgcgagcgtgaacccggggccacaatgcttgaggcggaggaggggcctggcggttcgctgccagacggggtccaccgcagcgcccttcctcaggacggaggagccccccgcggctgcggcgggggcaaggaatgcccaggcggggttcaccttcgtcatgaagttcggcggctcgtcgctcgcgtcagccgagcggatgcgggaggtggccggcctcatccttagcttcctcgacgagatgcctgtcgccgtcctctccgccatggggaagaccaccaataacctcctcctaggaccttccatttctagctctcagcgcctgagtcagggccgaagagaaggcggtgagctgcggcggaggaggggcatctgaaatccctgagctcgctgtcatcagggagctacatcttaggacaattgatgagctcggtttagataagtcgattgtttcaggtatgttgttgtttgctccactctgctcttggaacgcctcagttgttcctcttgctctatcatgaatgcttctgttatacaatgggatgtcgttctcttggatgtgccaaagttttctctccccttagtctgaataacaattcctggtggatgtatgtatgtattctcttggatgtgcgaaagttttccccttggatgtgcgaaacacatttactcctcaccgcaatctgcgcctccactctcgacccctcctccttcctcctctccctagggacccttctccccaacacgcaggggtagcgtaggaggtgttgtggcggcattatctaggaagcggtctgtggacatgaggcagatcaacccgaaggtgcctaaggaggaggctgtcaccatctccggtcgactcgtccagatcctctccgaccatgggcccctcaccatcggcaacacctagaacaacacgaaggtacccaatcaaccagtcagtcaggcagagtggcaaaagctggggagcgatgcaggcgtcagagcagcaacaacggaggactctgccagtgtagatgagaaggaaacacgcaaagagcatcaaaagcaagttcaacgatcttatgtcaacccatccacctctgaatgaggcatattcagatgtgtgtgtattcagtttacagagctcaatatgttacatcgaccttcccaacccgccggcagagcttaagaagctcaagcacaagaagtgcctcgtccagtccccccaactccttcatggatgtcaagtgccaacgatgcttcagcatgtccaattcgcttgtggcataggaatctcatcctagattcaatagaggggctgcaatgccggcatcgccatagctggaaatcgagcactgacggacaccgggcgccgagatgggccgtcttgtccaccgccgcaagaaccgcatgcgttggagccatccttacacctgctcctacttccgcgccagcaacccaacacgccgacgacacgagctcctccttataaaagtgacatctttattgtatagataacgaatggttatagttatttattcttgtgtccaagtggtattggatttttttagcttggggttaaagaaaagacagtcatgtactttgcatcttttttgtatttatgttttatgctaaattgtggaataacactatattagttgttagcaaagaatttctgagatattaaggttgatgataatatatgttgttatttcatttaatc

SEQ ID NO: 37580 - DNA, 1134 bp, Zea Mays
cgctggttctccgtcttcatgggagcactggttctccgtctccgtgggagccgtgagcgctgggagacgtctccgtgagcgacttccgtctcctgggagtcatccttgggggctggttctagggaccgctaatcaggagaccacgattgtggtctatgctcacgtgaggtggatcaacttgagggtaccgttccaggaagtgtacggggacgtccgctgcaacctgaaggaggcagtccagctggccgggctcacatgggaggggcgcgctcactgcgggctcgacgacgcccgcaacaccgctcgcctcctggcacttctgatgcaccggggcttcaagttctccatcaccaactcactggtgtggcaacctgccgccgctccgcagtcaaccgccgccacctgccacttctccccggaccgctctccggacccagtcgtcgtccagctccagcaccagcagcagcagcacaagccgaaggaggcgctggggtctcccgcgtcgctggtgaacccatcgtacgccacccccgcgggagggaaggacagagccatgtactgctactgcggggtgctgagccggtggagcgtcgtgcgcaagccgggacccatgcaggggcgctacttcttcgggtgcgggaactggaccgccacccggcgcgccatctgcccgtacttcgcatgggcctcgtgaatagcaaagcaagcagagatctgggctggtgctttaaccgagggaggcgcgccatgttgctgcggctggctgctgcgcctcccagttccgtatatattattattgttattattatggtataataactttgctcgcgagacaatggaggttatctaggtagtgtctctaacctgtcgtactgacttctgtcgatagaagagaatggggccagatgctgcttaggtgtgatctatcctatccatccatggataataaagaagtttgtggattgctgttttattaacttgatggaactcctccgtaggtgtggtttgtgcaacttggattttgaaggcttgtgcgtctgtgagtgtttgatcaaatcgaaggtggtgtttgtttgctgaatgaaatggttatggaaggtgcctattattcctgacaagctctgttcagtgaga

SEQ ID NO: 37581 - DNA, 2062 bp, Zea Mays
atatcggtcagtttgccatcagaacaaggagaaaaaaaggttccggtcttcatcccttccatttccaaaggacgacgctctcaccattcacgaacggcgactgcggatcgatcgtgcgtcgtctcctgcgccggcctctcttcaagtcagcgcgcggtgtcctgtgttggacgcgctcccacgacaacgcctaccccctccccctgcgcccaacggagccatcagtttcagatagtgtctttagtgccatggcgccgctacgccagggagcaagtcggtccgccatggctgggtggggcatataccacagactgaagcataaaccaacgcaaatccaatgattgtaaaacagcagtttcgatggttcccaagcagcccacagattctattgattgtgggtgtctttcagcatctgagggtttctaccagtccaggttacacacaagcttcaaattatcgcaaaattcctcttacatatctacatctcataccggaccaggtctcataccggaccagaaaaatggaatacactttattacctgatttagcaccgcataagatacatgcaaagattcaagtacatgtatctagaaagtggcttttccgaggtgctactgatagtggaccactacaacatgttgatatggttttgtctgatcgagagggtaatgctatttatgctgaaatccctggaaatttagctgaacaaaaagcaacaaatattgaagaaggaggagtttatgatatcaacagattcagagtgtgcgcagcaaaaactgttttcaaaatagtggatggggacaaaatgatccaattcacatttcataccatagtaaaatgtgccacaagccctccaacaacatttccattatatgtttatcggctaacatcatttgatctaattgagcctcatgttcaaactacaaataactttgttggtgtctacctaagtggtggtcctgcctgtagatggtacttcaatccaacaattccagaggcagaaccttatcttaccagccagtctacaaaaagaattgtgttacagcttccccaaaatttacaacatcctccagcgatggaaacgaagccaattgtcgaacataaatccctctatgaacttcttacagttaacccatatgatttcccggaaacaggatttgaatgtactatcacaatagcagaaataccagctgaacacaaatggtggtttccatcttgcacaaaatgcaataaagcaacaatccctcacactacaggttatcactgtgaatcatgcaattgggatggatacaaatttaaatacaagctcaaattcctggcatctgatgaaacagatattgcagaaatgttttgttttgacactgtagcaaggcacatcgttggtaaatcctgtgagattgttttacgaagtgtcactgaacagtctcctatcccacctgatctagcacaaatcatatctctgaaatttacattcagagtcacaattgacaatcaatctcttttccaacaaaccagttgcccaaacgtgttccgcattaattctattgttgctgcacatgggagacaacgttctttaccaatgcaaataggaatttctgatcaacaaggaccatcaacacctcaaaacaaatcaaaaccgatgttattggaagactctccatctacaactttggaaaaattatctactacaactcctacaactgtagtaaggaagcttctatattccgaaactgacaacacgccgaaaacgcactcaatttcttttactcaattatcttttattcattttaagatttagtgagtattgacagttaaaaatacttatatttgttccatgttgacagtgcaaacaagagtaatatcaatagcccagaaaaagatgatggcgataaggaaaccgcacagcttgatacaatacccactaacaaaggaaaaggaccagcagatacaattgaatcgccacctaaaaggttcaaacaagggacgatacgcatcggaaaagaaatggacatcaaatcctccgagaactaaagtttcactcagatcttcgtcgaccttttga

SEQ ID NO: 37582 - DNA, 1895 bp, Zea Mays
aagtttgaaaatagggctaaattcgtaattatgaataaagagtaattgcggtcgtggttccggattccccgccgccgccgcaagaccggagccctaattccaagcggtaaacgatgaggccgcacgcggtgggtatgggtggcggtggcgtggggaggcggaaggcgggggccgccgccgccgcggctagccgggagtggttggtggtgccggcgtcgggcccggcgcgggtggaggaagcagggaagcacgcggtgatggcgcgtacggggcttcccgcgcgcgatctcagggtgctcgacccgttactctcgtacccgtccacgatcctgggccgcgagcgcgccatcgtggtcaacttggagcgcgtcaaagctctgatcacagccgcggaggtgctgcttcctaacaccaaggatcccgccttcgcgcgcttcgttcgcgacctccagacccgcgtcctcgcatcttcgtctgaccaggcagctgaactcactgacatggaagatctttggaagaggaagtatgtgcttgcatctggaattgtttgtctggttatatgttgtttatctggccgcaattgaattcatacctctaacatcagacttctactctggagctagaggcatatccagcattagatgagctgacatcaaagatcagcacattaaaccttgaacgagttaggcaaatcaagagtcgtctggttgcgatatctggtcgagtacagaaggtgagggatgagcttgagcatttactggatgatgaaatggatatggctgaaatgtacttgacagagaagcttactcaacaagaaatcagtgaggcttcatctagagctgaggttgatgatgcatctcttacagaagacgatagggatgaagattatagaagtgaaccagatggaagcaatggtagtgttataggttataagcccaatattgaagagctagagatgcttctagaggcttactttgtgcaaattgatggcacacttaacaagctatcacatctgagggagtacgtcgatgacacagaagattatatcaatataatgttggacgacaagcagaatcagctgctgcagatgggagttatgctgtcaactgctactgtcgtcatcactgctggagtggctgtagttggtctttttggtatgaatattggcatatcactttacgcagacccaacaaccgaggaggaaactcgagcagcaaataggaaattttgggaaactactttcgggaccgttgctggctgcgtgattttgtacatcatagccatgggttggggaaagagaagtggattactgcaatgatgcggaagcatgactgcatgagtgttctgtacccagtgaatactgggttcacaaaaatctccaaaatgagagattattgtattggcatgctgctcgatcatactgctgccagaaaatacgcctcgttccactatgctggaaaagaaacatcttgtgtaccgctagtagctgctaatgcgtgaagtatattttacaatctgttgcccatcgtctgtcatggcaactcagcagttttgtacctgtttaccatgctaggtgctgtttttgctcttgttattgtgatcattcctgtaactgtatctagcggcctgtaatatgtatgccgctgattggttgagtgcctcccgcagtcccgcgtgcaggcctcccgcgcgcctggctcatcagcgattgtcatccgcgccatctccacacgcccagacgggtagtgaaaaaaatgcctagcctgcacacccgcatgctggccagcattctcatatctaagcaactaattagaatctcgtgcttggtcaaagcacgctggagcctcgttatctctatgcaagcaaccaatcacgtactatatgtacttgctctg

SEQ ID NO: 37583 - DNA, 4679 bp, Zea Mays
ccacggccacggacagtgttgccttctcctcccccttctccttctcccgtccactcagcgtgcctgactgcccgtgcgcgccctcgctcagtcgctctcgcgcgcggcgacaactgagccaccgccgacggtccaactcttcgtcggaccctttgccggcgacgagcacccaccaggggtttcatggtagcgtgacctgtctcggcctagaaaatgtatataaagaaggtcgtaatcgaagggtttaagagctacaaggaggagatatcaacagagcccttcagtcccaaagttaacgtagttgttggtgcaaatggatctggcaaatcaaatttctttcatgctatacgatttgtcctgagtgacatgtttcagaacctgcgaagtgaagataggggtgcccttctccatgaaggtgctggacactcggttgtatctgcttttgttgagatagtgtttgacaattcagacaatcgtattccagttgataaagaagaggtacgcttgcgcaggacaattgcttcaaagaaggatgaatactacttggatgggaagcatgtcagtaaaactgaagtcatgaatctgctagagagtgctggtttctctcgttctaatccatactacgttgtgcagcaaggaaagattgcatcccttaccttgatgaaagattctgaacgactggatcttctcaaagagattggtggtacacgtgtttatgaggatagacggaaggagagcttgaaaataatgaccgaaacagccaacaaaaggaagcagattgatcaagttgtccactacttagaggaaagactgagagaactcgatgaagagaaagaagaactaaagaagtaccagcagctggacaaacagagaagatcacttgagtatactatattggaccatgagcttaatgacgcaaggaatgaattagcttcgatggatgataaccgaagaaaaatttctgaaagtatgtcccttgcggacaatgaagtggtggatgtccgagagatgatcaagagttttgataaagaaataaaagtctcaactaaagggataaatgataccaaggcgcaaaaggaaggtgttgagaagaggcgtactgaagctctgaaggtagttgctaagattgaacttgatttgagagatataaaagataggattgtgaatgagaagcgagcaaaggatgaggcagcgagggatttgcagagtgtgaggagagagagtgaaaagtcaaagtctgaattggctgaaattagtaaggtgcatcaggccaaactaaaggaagaggaggatatatcgaagagcattatggatcgtgagaagcggctaagtatattgtaccaaaagcagggaagggcgacccaattcgcaaacaaagctgctagagataagtggcttcaaaaggaaattgaagatctcaagcctgtacttttatcaaataaaaagcaggaaggtttacttcaagaagaaatccagaagcttaaagatgaaatcaatgatttaactaactacatcgagtctcggaaaagcgaatcaagtaagttagaggaaacacttgcgaaaagacataatgactataacgatttgaggaagcagagagatgtgcttcaagaagaaaggaagtcatattggaaggaggaatctgaggtgacagctgaacttgataggctacaagaagatcttataaaggcacagaaaagcttggaccaagcaactcctggggatatcaggagaggcctgaattctgttagcagaatcattaaggaccatggtattactggtgtttttggtcctgtattagaactggttgattgtgaagagaagttctttacagctgttgaggtcactgctgcaaatagcttgttccatgtggttgtcgagaatgatgacatatcaacaaagatcattcaaatattaactagagaaaaaggtggaagggtgacatttataccattgaacagagtgaaagttccagatctcagctgtccgcaaagtcctgattttgttccattgttgaaaaaattgaaatatcgatctgaccatcgtcgtgctttcgaacaggtttttggcaggacagtcatatgccgagatctggaaactgcgactaaagttgcacgtagcaatggtctagattgcatcacacttgatggtgatcaggtagggaaaaaaggtgctatgacaggaggcttctatgattctagacgctcaaaactaaagtttgtgaagataataagggataacaagacagcaattgatagaaagacgggtcatctagagagtgtcgtaaacaagctaaaagatatccttttttggtttaattataatttagttaccaaacagcagcaaatggatgctgaacgtgatcatgcgaagtcagagttggaacaatttaaggctgacattgccagggctatgaagcaaagggggtcacttgagaaagcccttgtcaagaaggaaaaatcacttaacaacatctgcaaccaaattgagcaagtccagtctagcattgcaatgaagaatgatgaaatgggcacagagcttattgatcagctaacttcagaagaaagagatctcctttcacgattgaatcctgaaattactgatttgaaggagagatttctaatgtgtaaaaacagtcggattgagatcgaagcacgaaaggaagaattggagaccaatttatcaacaaatcttatcaggcgtcagaaagagctagaagcgataatttcatctgcagattctagaaccttgcctttggaagctgaggcaaaggagcaagaactgaaaagttccaagagaaaccttgatgaactaacttcattattaaaggctaatgtcgatgccataaataatttcaccagaaagatggatgatctgaaaagaaaaagggatgatctgaaggctcgtgaagctattttagagcagactgtacaagatggtgccaaagacttagaacagttgatgaacagcaggaacacttatctagccaagcaagaagagtgcacgaagaagatccgagatttgggcttgttgcctgctgatgcttttgaagcgtacaagaggaaaaacaagaaacagctacataagatactctatgactgtaatgagcagttgaagcagtttagtcatgtgaaccaaaaggctcttgaccaatatgtgaacttcacagaacaacgcgaacaactgcagagaaggcgagctgaacttgatgccggtgatgtgaaaatcatggaactcatatcggttttagaccaaaggaaggatgaatccattgagcgcacatttaaaggggttgcaaggcacttccgtgaagtgttttctgagctggtgcaaggtggtcatggatatttggttatgatgaagaaaaaggatggggatgcagttgatgatgatgaggaggaggatggacctcgtgatccaggccctgatgggagaatagaaaagtatatcggtgtgaaagtcaaggtatcatttactggcaagggagaaactcagtctatgaaacaattgtcaggcggacagaagacggtggtcgcactaacactgattttcgctatccaacgatgtgacccagctccattttatctgttcgacgagatcgatgctgctctggatccacaataccgaacagcagttggaaatatgatccgccgtctagctgacatggctgacactcagttcattgcgaccacattccggccagagattgctaaagtggctgataagatatatgccgtgagacacaagaatagggtgagcaacatcgacgtggtgtccaaggaggaggccctggacttcatcgagcgtgatcagacttaggtagctattggaccagcttgtttggcgcatcaacgttgtgaatgtagcagctaccaccttggtttggtaccagctttaattaagtttgggaagcgctgattagactagacgtacgttacatgttgccccatgattgttgtatggcacgcccagcccaaaatggcagtaatcagttcatttcgacaattaacgtaagtgtaagtgtacgagtagtggtattcaaatgttttttaactgtatttttctagtacatttattttttgtacccataaatcatgttacacgtagtttcattggagggagcataaacatgttcctttgacagaaagcctaataaggctataaaacaaaaattactacacgtagtttcagcaacgcaaacaaaaaaccccgtgcctgcctaatgaattggtcattaggcatgggcttctgcttctctataaggcgactacgagctcccagctgctcagtagctagggtacatgcccatccttcctatggtgctcctgcagccgaagttgacagagcctcgaggctttctgctgccatttgccttcgtggtggatttcgcaatcctcttttccttgcccgtgaacttatcactgtctcgagctctttctttcgaccgtgccacttttgtcattgacgagagagagctttaagtcagtaccaggtcatggcaaaatcaaatggaaactaaatagtatagcaggttatctgaacacaaacaactctatttggaagatctgtgaaactagagtcataataatctggggctgtaggcattaccttagctagcctctccttaagctttggccttgcagatactaccactcttgctggttgacggtccgcgtttt

SEQ ID NO: 37584 - DNA, 2370 bp, Zea Mays
atgaggccaaacaactctgttgtacctcacacacattggcaatgtatcccactccttgcccagcacgtcaacacagtgtttctccagaatatactgcagtctgcggcttggtcagttgccgaagccgtgcagtctgcggctcctgcctacagctacaggtgccgtgagcgtcgacgacgccgcctctcgtgctctgtctgtggcgcacatcaaatcctctcgcagaacagccaaaccaaccaccaaaatgtaagaacacacgcccggcgctgtgacgcctacgctactagtcagtactcagtacagtagtcacccccaaagctccgcctacgcacctcttcccactcgcccggccgcggctatggcggccaccacgtccacaacgccggccgtctccttctccctcccctcgcccccgcaccgccaaggggccccgcgccgccgcgcgcctttcctcctccgtgccgcctccaccgcggcgcccccctcccccgacctctccatccagctctcgccccgcgcgtccccgcccgcgtcgacaaacggcgccgccaccgcgcttggacgccccgtggccgcctccttcgcccgtgaccgcgccgaggacctgcaggccgaggcccgcgccatggcccgcgccgccggcgccacagtctacagccccgagctcctcgcctcccgctacggctcccgccccttcaaggtggcgctccgggcagcggaggtgctgtccaagctggcgtcgttcggggtgaaggtcctgctggacgagcggagaggggagtcgtcctcggagaggagacgcgccagagcggtggagttgcgcagcatcctcaccagactgggcccaaccttcgtcaaaattgggcagggtctgtccacacgccccgacctctgcccggtcgagtacctcgaggagctcgccgagctgcaggaaggccaaaatgcaagaaggtttaaaaaactatatgccgataagcaagatgtcttagtgcctgatatattttgggattacacaagtgctaaggttctaacaatggagtggattgagggtgtaaaattaaaccaacaagcagctattgaaagtcaaggattgaaggttctggatttggtcaacattggtatccagtgtagcttgaggcagcttctggagtatggttactttcatgctgaccctcatcctggtaatatattggcaacacctgaggggaagctggcttttcttgattttggcatgatgagtgaaacaccagaggatgcgagggtagccattataggacatgttgtccacttagtcaacagggactatgaagcaatggctcgtgattattatgcactagatttcttggaaccggatgtagatgtttccccgattgtgcctgctctcaagaatttctttgatgatgcactaaatgcaacagtgagtgagctgaacttcaagacaatagttgatggcctaggtgctgttctctatcagtacccgttcaatgtaccagcatactatgcattgatactacgatcgctcactgtactggaaggtttagcactctatgctgaccctgattttaaggtgcttgctgcatcgtatccttactttgcgaaaaggctactcactgatcccaatccatacctcagagacgctttagttgagcttctattcaaggatggaagattcagatggaataggcttgaaaatcttcttgttcaagggcgccaagatagagagtttgcagccaaagatgcattacagcctgttctaaagcttctcctgggtcctgatggggaggaattgcgtgtgttggttgtgaaagaggcagttcgtgtaacagaagccatcactattggaacactgatcgattcatacaatgcagctccagcgtttttgaagccattaatttccagtggcaatccagccggacccttcaagtttagtgaggctgaacaagaacagatgttggagctccgagaccaggttttcagagtatggggtcttttgagatcctcaaataactttgatccgagccttttgcaaccaatcgttcaggtgctacaagaaccagaggcccgcgtcttgggttctcgtgtcgcaggtggtgtaacacagcgccttgcggcacgtctgctgcaacagcttctcaggatcccttctcctggatcttcgtaacagattatatagagatgggctcgtatgaagcatgtaaattgacacgatacttttgacaggaaactgaggtgccatttgattcaagaaatgtaaatatagatatgggctcgtatgaagcatgtaaattgacacgatacttttcacaggaaacaggatgtcatttgattcatgaaatataacgtaaataacaacaataatgattcacg

SEQ ID NO: 37585 - DNA, 96 bp, Zea Mays
tggtgattgagtgccaacacaagtgcttaagtgttaatctatgccaattaatggacaaagtgcaaatcaagagtaaaggtatgtttctaagactta

SEQ ID NO: 37586 - DNA, 1901 bp, Zea Mays
ctctctcccctctctcccaaccaaccacgctcctcgcatgtgtcaaaccaaaacctgtagtgtagggagaaaccatggagttggcggcgtcacgtccaagtatgcctacatcggaggcccaattcccgagcaggcactaccatcaccgtcgcagagagagagccctttgctcccaccgccggcttaagcgactgctagcatggtctgctgcaaggagcaccagaggatctacactgagtggttcgccctcgccgactcaagggctctatgcagatggtgatggaccgcatcacgggtactaacaccaccagttttatcatcaagtttgtgctttcatgcgtcgatctctagtaggtgagcgtggggccactggtctcctcctactcctctcctggtttgggtgatatcatctaggattatcgttgacgaaaggatagtgatatttccctgattagggatttgcgtgaggaggtgtgggcgatagcggattccaagctgcaggcgtacctcagattcgttgagtttttcatagcaatgtagatccgtcccaatcatatgcattagacatagcatgtgcatctgacaatcaaacatgaggttaaacttttggtttggtggactgacgatctaacacgatcgatatacaaaatgcatctcatgtctctggcccaagcagggaacgagatcacacaagacagcctaaaacatgaaggtagttggttgtgagctaaactttaccttccttttccccttctatgagttcatttgggcatggatgtttgaactcaattgtttatggtgcttcatgtagacctcaacaccttagatttgcctgtgatggaaggtgtcaatgagcttctggctataagtctaaaatcttcagattttgtgtcattcaaatgtatttgcccctttaaacacaatactatgatggattgttgcgacattatgatgtattgtttctttctagaaaactcagatagtgagcctgacttcgaagagaccgaacaaaaaacaataaatgagccacatgtcaatgttagaagtgaacctcttacaacacgtcgttgtgcccttcaaccgtggatggatggtagcagtagcagcaacagtactgttgacctcccagatggtgtacctccagctccttcgagaaaatgacaggctttctaaagaggaaatgattgcaacgatggatgaagttgttcagggacgcaagatgcaagtggaaaaagccactaaagagagtgaagattgagagaaatcttctctcaccttttcaataaatatttggcatgtttctgttttcaagagtcatcaactatgtttgatttttgcaggcggaagctataagaaaaatattgggcatggactctgacaagaagaaagaagagaggaacaaaaattaacattttcctttcctattttttctctgttttaaataggtctgaagtccattgcaagtaaaatatgcctatatggagttggaaagattggagcacaaactcttttttgaaatgctctcccaaaaagaggacacatgctgaaatgatgaatttgttttcaaaatatgggagtataaaggatttgcagattttgagaggttctcagcgaatgagcaaagttaaatcatcttggttcatattaggaacggagcatcaccgtaatcacttttagcttcctctttctaacttgcttatcaactatggatgttgcagctggttgtgcctttctaaaataagaaacaaaagagcaagctatggctgttatagaagctttaaatggaacacacaaaatagaggtttgtataaataaaagattcaaaaagaatctttttcttaatgatggtattatttgccttctcataaaacatattacatacccctaccactcctaacagg

SEQ ID NO: 37587 - DNA, 280 bp, Zea Mays
cttcacggacctgtctgcagatgtcaaggaaagggagctacacaacctgttgtgctggctcttgggattcgaggtgtcttactggatgcggacggtgccggagctgagagaggtcattcgaaggtcgatgccagaggtggagaagacaagggtcataaatagagaagaggttagaataacagattatttatcagaatttctctgtttcatcgtttgtttatatgcattgattctttgtttatatgcattgattctgtccattattgagagacatcactat

SEQ ID NO: 37588 - DNA, 730 bp, Zea Mays
ttcagtgactgaggctctgaaggtcactgattggagaaaggcaatgttagaggagatggcatcaattgaagggaacaagacatggccactggttgatttacaaaaaggacatcgtgccagaggtctgaaatgggtgtataagctgaagcgtaacgaatcaggagctgtgatcaagcccaaagctagactggtagctaagggatatgtgcaacaacaaggtattgattttgaagaagtttttgctctagtggcaagaatggagactgtcagggtactattggcagtcgtagcacatcatgggtggccaatccatcacatggatgtgaaatcagtgttcttgaatggtgatttggctgaggaggtatatgtcacacaacctcctgggttcactgcaaaaggggaggaaggcaaggttctaaaattgcacaaagctctgtacggactgcgacaggctcctcgagcttggaatgtgaagctagacaaaagtttaggcaaacttggtttcacaagatgcaagactgatcatgcactatatactagaaagaaaggtggtcagagagttgttgttggagtatatgtagatgatttgttaattataggggaatcagacgcacagatcactaaattcaaggagatgaagaaggagtttgaaatgacagatttaggatcactgtcatattatcttgggattgaggtacgccaaacagctgaaggactggaattaaaatag

SEQ ID NO: 37589 - DNA, 2134 bp, Zea Mays
ggaatcagagctcgtgcatgcacagactgcactgcagcggtagcaacttgtcagctgactttggtcgcttcccgccacgtcgtgtacggctctaccggcgccatgcgccaacgctactgtacaaggaatcattagccacaacagaacgatccaagcgtctcccattatttaaccccgcggattagctcagtgagtgcactcacgagacgcaagctaagtggttgccagtcatgggcatgcccgacgccaacaggcgcatcaatctcgccgcgccgctcctctccgtccggcgccacggtggtgccgagacagcgcccacggggacgcggttgccagcctacaagcaggcgggagccgccacgtcgtcggagcccccgggccgcaccactaccagcgccgtggccgtggccgtgccattcgggtgggagcgccgccccggtcaccccaagagcgtccgcacccgccgccagccgccgccgccgcccctcacgacgatcgtcgacgacccctctcccgcgacgcgcccctcggacgacacgctctcccgcgacgacgctgccagctgcgtcaccgccaactgcagcgccaccacgggcctcagcgacgccgcgtccgcgggggccgggacggggtcgtcggagccgcgcgcccgcgcccgcggcggcgccatgatggaccggttcctgccggccgcgcacgccgtggccgccgccgggtccccgcagaacgccttccgccgcaaggccgcccggacggcgccggccgccgccgacaggaggttgtacttgttgccagcgcagccgcagaggcgggtgcccctccaccacattgcggcgtgccacctgccgccgcccgtccctcccgctcccatgagcagcccccgtggcaagaacgacgactacgacggcgccagttctgacgcgcgcagcacgccgggcttcgtgtccaggactaggaggtgcggcctgctctccgtccggtgcgtcaggagcgccttgcggcgacgtgcgggcagaccgttccggtccaacggcggcgccagaagccgaagagaaaagaagccactgctgccgcataccggagacgatcacggcatcaatgctgggaggaagtgtacatcaagtcgctgctccggtcaggccgcggcagcctgatgggaccggcggccgccgtggcctcggagctggacagaaccgtgtgcgaactgtacagcagacgccgacacgggcaggccgccgtccgccccaaggcgagccatctgggtctgctcctggtcctcgacaggtcaaacgaggcttgcggccacgccgcctcaccgccggcgcggaagttctctataaccggcggcggcgacaccgcgttgcttctgaggggcggcgctgctaccaagggcagcttgcgcttgcccaacggcggcgagaagcggctgggacgtgacgacgacgcggccgccgccgatgctgccgccggcggcggggggtacggtttcccgctgcttctggacgacaaggagggcggtagtgccggacgagagatggcgctgtcatcgccgcagccgctgctcccgttgccgttgcccaagtcgcctacggagtcgtggctcgcgcgcgcgctgccgtccgtgtccactcgacccccgaccacgtcttttctgggcctccatgtgcagcccaggaagcatgctccgttgccgtgctgctccattgattccagcagggacgtccatcatgacaggcaacggcaaattcgcgtgcacgatctacacaaatgatggacgaagctatcctgatcgtgttaagtgctagcgagcggctcctggttgttttgttctagtgatgggtatatgtaggaatggatatgctgtattgatgggttagtaatctccaagggcatatgttagcatgtagcatgattgtattcgtattactactaatagagctgtatagctatatactggagcccggggtaagtaaatgacagcgtaatttacccatgcttgcttcctaaccttggtccagatcagcagcaaccacaactagatatgctcagacatggtcgatcatgattgacaaaatgcagagaaggggaagttcaacagcacattacaacggaatgaggcattatgagtgatgag

SEQ ID NO: 37590 - DNA, 684 bp, Zea Mays
aaagaaaaacggtggactagaaacttccaaatcgaacggcacacaaaaatcacaacccggaaagggaccagcagcgcaaagaacaatgtgatcattgaggaggtgaacaagggcctgaacccaggaatggtggttctgcttgtggttgcaagcttcctgctgctcttctttgtggggaactatgcgatgtatgtgtatgcgcagaagacgctcccgccaaagaagaagaagccggtgtcgaagaagaagctgaagagggaaaagctgaagcagggggtctctgcgccgggagagtaaacggccatgctgccgatcctcccgtccagagctcctattcacatgattattaaagaaaaaaatttatatatatataccagctggagccgtagtgttggagtaactttgttctgtagatgctctgtctttaatggtacatctgtattggagactttaatggcctgagccgagctagtatgcttcctgtttcgtacaagttcttgaaatgctggtgatggcgcatggctctagagaaaaactcaagggagctgagccagcgaaacatgatctacctctacctctagagttaccaactatatgcagttttaagagctgcagtagtattatttttggagtaactcttatgttactttgaaatccttaaaaaacaaacaatttagacatgga

SEQ ID NO: 37591 - DNA, 674 bp, Zea Mays
gcaccagtgaacgacggcggagctatagccggagtgcggcgatccagggctctggtacgctgattcatgcgtaaataagtgcaacacgcagaggtcactaaggcgaaaacaatagggggtgtattaccggatggcacggcgtggaggtaactgctctcagctagatgcggcggagtgaggattgcatcccgacggcgagcgattgccgcataatcacaaccccgcgcaccaggagactcccctgaactcgatcagtattcccaatcggacgaccctgaccacccagcagaccccaaccgacggcgagggtgggggacagcgtcggggcggtgcgggcgtagatgaagatgtcgccggacttgaatccgcccatggcgtgctgcgacccgccgaggagcggagaggtacggtggagcaggagcttggggccgaggagagtggattcgcgactatggacgagcacgacgtgaaagatggccaggcttgtcggcggcgtctagaatcccgacctcgccatgcatccgaatcaaccacggcggcacctcccgcagagtccctcacaacccgcccaagggtagcgcgccgctgcagacatgaatcaccggttgcgccatcttgcggaccccgaggtcgtgcaccgtgagcgagcggaggcgactggagttcacggcagg

SEQ ID NO: 37592 - DNA, 2078 bp, Zea Mays
attaacgtcactaaaacaatcaggcttgattggttgctgcagcagctccaaggcattctagactggaggtctcaagttcgattcctcttaaatgcatctttttttgtgcaattactaggggcaacaacgtccaaatcccagacccacgcgcgctatgacttctttttgtgcacgctcggtcacgcgcaggatgacttcttttactgcaccggagggagtactcaaccaaccactttctacttttcaaatttagtccatctgtgaatcatttaggcgttttttatcactccagttgacaggtaataaaactattgctgatggcataataaaaaacagttgaagaaaagaaaacttgtcctcaatcctcattgattcatctaagatgatgtgttacctagctgatgctgaaccgttcgttttcgtaactaaacctcttttacatatcaatgggatgcaaattttttcttgtggttctgtattgcatgaagtacacaagtgtaattcacttgatggattcttaactccacagagaatactttgaggatgttgaccgaacatgggaaacctttgagaaaacattatggagccatatctctaactttttcaaactttcaaaagagagtcctcagacattggttcgagctttgagggttgttgaaatgcaagagatcttagatcaacaagttgcagaagaagcagctgaggctgagggtgctggtgctatggcgacaataacaaaccaacgtagaactgcaaaaaaaggtgcaggggcaacagttaccccaagaaagggcactcaagaaaaatcgaaggttcagggaaagggctacaaggacaaatgctatgagtctatcaggatggctgttgaggcccgcttcaacaagttgcttactgagcttgtttttgtggaggacttgatggaagctttggaggaagccaaagctattggagatgagcttggcgatatatatgattatgttgcaccatgctttcctcctaggtatgaaattttccagctcatggtaaacctgtatactgagagattcattcagatgcttcgacttctcagtgatagagcaaacgatattcaaaatataaatatcctgaaggtgactggttgggtcgtgcaatatcaagaaaacttgattggtcttggtgtggatgaatcacttgcccaagtttgttctgaaagtggtgcattggatcccctcatgaacatgtatgttgagcgtatgcaggcaacaaccaagaaatggtacagcaacattttggaggctgacaaaacacaaccaccaaagagtacagaggatggaaaactatatacacctgcagcagtggatctattcagaatattgaccgagcaagttcagatagttagagacaacagcacagacgtcatgctatatcgaattgcacttgcggttattcaggtcatgcttgattttcaagcagctgagaggcaaaggcttgaggagccagcttctgatgttggtctggaatctctatgtgcattgattaacaataatctgcgttgctatgaactttcatcagagctaagtagcagtacattggaggcgcttccacaaaactatgctgaacaggttaattttgaagacacctgcaaaggatttcttgaggttgccaaggaggccgtcctccaaactgttagtgttatttttgaagacccaggtgtgcaggatctactcgtgaagctttaccagaaaggttggtggtagggtagaatgtggggctgcataccaaacttattacaacattccattcttcacctttgggtgggcactctggcatacaagcaacttaccaaagattgaagttctattggactgggctcaaatctgatgttgaacaatttgtcaaactatgccacatttgacaacaagcaaagcatgaacattgcaaatatccagggttgttacagcctttacccattcctcaaaactgttggcaagatttatccatgaactttatagagggtgggtactcagtgattctggtggtggtggatcgcttgactaagtatgctcattttatacctgtcaaacatccttttacagctc

SEQ ID NO: 37593 - DNA, 2709 bp, Zea Mays
cccgccccaagcccccaacccgatctctctcatcagctcgctctttcctgtcccctctccgccacctcaccgccggctcgctcaaaaatcctcgcgccggacgccggccctgcctccgcctccgcctccgctgcgccatgcccgtcggcgcctgattcatgtctcagtcctacgccgccgccgcctcgaagcgccccttctcgtcccccaccacatctccgtccccgacgtcatcccctgcgacgccgcttatgaagaaggccaagcatcccgccgccgcctcctcctcttccgtggggaccgtagagaagaacggcatccagcttgataccgttgccgccgccatgggtgggggccgaacgaatggcgaggaggatgcggacatggtgctcgtcaaccaggacaagctccccgcgcccagcgtgccggcctctgctggcgttgccgccaacctctttcgaaagaaggccacgctcccgcagccgtcgacctccgcccgcaagccgctccgcatcaaaataggtcaaccaaaactgccaaaaaacttcgaagaggatacatggtcgattttgaaggatgctatcacagctatttttctcaagcagaaactttcttgtgatgttgagaaactctatcaggctgctggtgatctttgtttacacaagctaggggcaaacctatacgaccgaatcaagaaagaatgtggaatacatatagctgaaaaaatatcagcattagtgggtcaaagcccagatctggttgtattcttgtctctggtccaaagaacatggcaagatttttgtgatcagatgttgattattcgtggtattgctttacttcttgatgtaaaatatgtcaagaatgtggcaaatatctgttcagtgtgggatatggggctgcaactgttccgcaagcatctatcactatccacggagattgaacacaaaactgtaactggccttctcagattgatcgagagtgagagaaccagtcaggcacaccatttaactgataatacgcacctgagctgtgcagtcgaggttgcaagaagaacacgaaaggtgtattctatatttggaagctaacacgaggaagccactgattgcaactactgaaaagcaattgctagaacgtcatacatctgccattattgagaaggggttcactatgctcatggatgccaatcgtataaatgacctctcgaggatgtacaaccttttccagagggtgaatgctgttgagctgctaaaactagcgcttagttcatatatccgggctacaggccagggcattattatggatgaagaaaaggacagagaattggttccatttcttcttgattttaaggcatccctcgacaaaatattggaagaaagttttgccaagaacgaggctttctccaataccataaaagattcatttgagcaccttatcaatctacgacagaaccgacctgcggaattgattgcaaagtttcttgatgagaaacttcgagctggcaataaagggacatcggaagaagagctggagggtatacttgataaagttctggtcctgtttcggtttatacaaggtaaagatgtatttgaggcattctacaagaaggatctagctaagaggttgctgcttgggaagagtgcatcaatagatgctgaaaaatcgatgatcacaaaactcaaaactgagtgtggaagtcagtttaccaacaagctggagggaatgttcaaggacattgaattatccaaagaaataaatgattcattcagacaatcatctcaagctaggacaaagcttccctctggcattgaaatgagtgtccatgtgcttacaacaggctattggcctacatatccgccaatggacgtgaaactcccacacgaactgaatgtgtatcaggatatatttaaagagttctatttaagcaagtacagtggaaggcgtttaatgtggcagaattctttgggacactgtgtcttgaaagcagactttcccaaaggcaaaaaggaacttgcagtatcattgttccagagcgtggttttgatgttgttcaatgacgcacaaaagttaagcttcattgacatcaaagattccactggtatcgaggataaagaattgagacgaacattgcaatctcttgcatgtggtaaagttcgggttctccaaaagataccaaaagggagagatgtagaagataaggatgaatttgtattcaatgaagattttagtgctcctctctaccgcataaaggtaaatgcaattcaaatgaaagagacggtagaagaaaacacgagcaccactgagagagtgttccaggatcggcagtatcaggttgacgcggccatagttcgaataatgaagacgcggaaggtcctcagccacacccttctaataactgagctttaccagcagctcaagttccctgttaagccagctgatatcaagaaaagaatagagagcttgatcgaccgggagtacctggagcgcgacaggagtaacccccagatctacaactatctggcttgacaacgttttggtggatcgttcccatttcattactatcagaaaaaggcactgtaaattaatttattttccggtttcttgttctttcatgcttttcttctctgggaggaagttgtagttgtagctgctgcaacgtgtttatatagaacaattttttcggcatcagtataaaatcaggttccttaaagc

SEQ ID NO: 37594 - DNA, 826 bp, Zea Mays
acgatcttcgacgctgctattagttttctgaacctgtccgcaatgaggaagaatgtcctggccaagtgctatggcggtgatattactcggaagaagaagttgctagagaagcaaaaggaaggcaagaagcgcatgaaacgtgtgggatctgtcgacattcctcaggaagccttccatgagctactgaaggtctccaattcaaaatagatggtgatccactgcaaatttagtttctgtagctgtccaaattttataagtagctgtgtggtgatgagtagcagcaaccttttctagtcatcttctgacagatcttgacagaatgatcgattccattgagtacataatggcctctcctgcgccttgtcagacgagccaacttgtgctggaagttgctcctcctgtagtcctgtcatccatcctgtggtgattgatatacacacaagtcttctcagctggccgcagacggatttcagtagagccaccatctttgtatttgttgattgattgatggaaaaccatcctttgagcacttgctgaacccagttttctctgctgacctgacttgtcacgttacactctattttttgtgttagataacggttttgagcaaaaataataggtcatatacacattaattggtcactgaaacaatgtggtacatgtaataagaggagctgcattgaataaagacatagtagtatcacgtttttggagtttgcgggctatctccttttcatcctgaaatgaacccctcttctaagccgagagtatcgtttggcttcgaacacagaagttgataaataaacacaaaaaataaaaaaaaaga

SEQ ID NO: 37595 - DNA, 254 bp, Zea Mays
ctcccttcttccctccaccaaaacgattgaagactcgcaccacgacgacgatgatccgagcggcaatgattggcaccttgggaggaggggattgagaggggcggcggctagggtttggtggctgcaagaattgagagaggaggagatgggcagggggggcggccaagggggaagagaagtgggggggctgcacatggggggagggggttaggagggaggcggctagggtttgggagggttaatgggccgaaact

SEQ ID NO: 37596 - DNA, 2865 bp, Zea Mays
cgcagaggcacggcgccgacatcccccgaggcccgagggcccagccatgaaggccctgggcgcgcacgtcgtagacctgctccgcggcccgcacctcctccgcgccgccgtcctagctttcgccgttgcggtcgccttcctcgtcggctaccactggcccaacgcctacccgcgccttgtcttcttctcgtccgcctcctcctcgttggcgtccaggtcctcccgctctcctgccgtcgcgctctcccccaactccaacatctccttcgaaccgtctctgatccctacccccaccaccccgcctgcttctcctgctcccaatgcctgccccccgccctcgctaccaccaccgactccggcgccgccgcctcccctcctgccccctccaccaccagcgcgcctcggcatcgtcggcgaggacggcgctatgcaggacgacttcgacatcgggagcgtcggcgccaacgacaccgatctggccagcgacgagaccgcgccgcaggagcctagcaacggaggcgccagcggcggaccacccagggttcggattgggaggttcctggtctgtcccgagagcatgagggagtacataccctgcctcgacaacgaggaggagatcaagcggttgccctcgacggagcgcggggagcggtttgagcggcactgccctgcccaggacaagggtctcagctgcctcgtgccggtgcccaagggctacaaggctcccataccctggcctcagagcagagacgaggtctggtttagcaatgtgcctcacacaagattggttgatgacaaaggaggacagaattggatcaccaaggtcaaagataaattcagatttcctggaggcggaactcaattcattcatggagcaaatcgatacctagaccagatttcccagatggtaccaaatgttgcatttggatctcatactagagttgtcctggatgttggttgtggagtagcaagttttggtgcctatttactttcacgtgatgtcctgacattgtcaatagctccaaaagatgttcatgaaaatcagatacagtttgctcttgagcgtggtgttcctgcaatggtagcagcatttgcaacacgccggttattatatccaagccaagcgtttgatatgattcattgctcacgctgccgaataaattggactcgtgatgtctttccactaggtctgctgggatgatatcttgttcacattctcaaagaatatttgtcattgttagatgttgaatttatttcatgattatcaaagcaagaaatacttttaatcaacggatagaaaactagatggtatcctgctcctggaggttaatagattacttagagctggaggctactttgcttgggcagcacaacctgtttataagcatgaacaggcccaacaagaggcatggaaagagatggaggacctcactacccgactttgttgggagcttgtgaagaaagagggatatattgctatgtggaggaaacccttaaataactcttgctacatgaaccgtggtcctgcagtcaaaccttcactttgtgatgctgatgataacccagatgttgtctggtatgttagtctcaaagcttgtattagtcggcttccagagaatggcgaagcaccacctcctgttcaatggcctgcacgcttaatggagccaccaaagaggcttcagggtgttgaaatggatgcctacccatcaaagaatgagattatcaaagcagaaacgaaattttgggaggacataattgatggttatatccatgtctttaagtggaggaagttcaaactccgaaatgtaatggacatgagggctggatttggagggtttgcagctgcattaattagtcggaaacttgattggtgggtgatgaatgttgttcctgttaatgagccaaatgcactgcccgtaattttggatcgggggcttcttggagtagctcatgactggtgtgaaccctttgatacataccctaggacgtatgatctactgcatgcatctggtcttttctcaaaggagcagaaaaggtgtaatatctctagcatcttgctggagatggaccggatactcaggccaggtggtaaagcatatattcgtgaccggagagaagttatacaggaaatcaaagaaataacaagcgctatggggtggcgtggtactatacgtgacactgccgaaggcgcatacgccagtaggaaggttttgatgtgtgacaagcctatggtgcgttaggcgatcaggggaaggttcgatgacacctttgtggctagtttggaaattcaaattctcagggatttaaagagatttaggatttgttcggtttgaattggattgatggggattttaggggatttaatccccttctatacaaatttgtataggaggggatttaatcctccccaatcccaaatcccctcctaaccgaataagacctgagagggaaatgaactcaatctccctcaatccacccctaaccgaataggcctgagaggaaaatgaactaatttctccttcaattctctccaatccccggagaggggatttgagtttccaaactagccattgaagtttcgaattgccaagcaggagtaaattttcaggaacttttggaactgtcaagagctgctgtcgagacttttgactaacatttgttctgtagatagggtaggtcaaggtctcatttgtaactatttatgtgatcattcgtacaatgatgatcagtgtaattcctgacagtcatttttttgttgtagtcgttattgaaatcttacaaaagtgtaggagataatttatcggaagaatggccattttttactctaggtgacactgacacaaggagtaattggttttgtttcgc

SEQ ID NO: 37597 - DNA, 3008 bp, Zea Mays
cacatggataacataggctttagttccctgtcgatacatgtagattgtggtccaggtcatctccccgttcgctggcttcagcagcagagctcttgctggcaaacaagtgatctttctacagttttagaagggcaggcctttgacactgggtttgctctcttctcatgttcgaagctcggagattatgacacaagcatgactggtccttgaaaactatacacggctttggagagatgggatgtgctgcttccaggttagaagatgaggaagccatcaagatgtgccgggacagaagggacttcatcaagcaggcactggagcagcgcaaccgatttgcatcttctcacattgcttacatcgagtccctgaagcgtgtttcaatggctctccaacggtttgttgctggagatgaccaccatgagctcatcttcgatacattcatctcccctgtcaagcaacagaagccagagacgctcagcctgccttatggttcatatgagaagagaaccattcatgtctcgagatacttgaggtcagggcctaacccatcagtgtcagttgaggagcacccacgaccggtggaaacagtccgtgttgagtcacattaccctatggacaatcacagtggcatggataggttcttacaatcgcactcctcaccggtggtatcgtcttcatactacccaccaccttataccaggccaagctacccatctccatcgtcccaggaaccagttatgaatacttctacctattacatgccttatgacaggccaagatatgcacctccatcaccccaggaggcaatgaggacttcttattatgcatcttatgacaggccaagctaccgaccaccatcatcccaggagccaccgaggaattcttatcatgtgccatatgacaggccaagcttcccacctccatcaccccaggagcaggaatcatcaccatgggactccttctggaacccattctcatcgctggacagctttggatatccccgccctcggagtagctatgacaacgtgaccaatgacgatgaactcgcgaggttacagcgggtacgagaggaggaaggaatcccagaacttgaagaggaagacgatgagtgtcaagagcatgtacaaatgcatagaaaagaagaacaagaagatcatgataatgcggatgatgatgatgaagacgatgaggaagatgacgatgacgaatgtgagcattcagatgagtatatggtttctgacgagggcacttgctctgtcaattttgatgctaatatgaagcaagaaacaaagggatttgaatccaaaggtattcagtgtactgaagcaccagaacctcgcaagacagtagaacttgagttaaaggcacacaagaaagaactgatgagaaacagagtagcaaatgcagaagaaactcctggtttcacagtatatctgaatcgaagaccagcaagcttggttgaggccatgaaggatatcgactgtcagttctcgggaatatgtgacgctgctcgggaaatctcagtaatgttggaggcaagtagagctcagtactcagcctcaaacgatctttctgcgaagatgctgaatccggttgcacttttgcgctctgtgtcgtcgcgttcatcgtcttctcgtttccttcttgctccctctagctcaatagatgatctctttgacaatgagactagcagctgttactctgaagaatcttgtagtaccatgtctggaagtcaccactctaccttagatagactctatacatgggagaagaaactgtacaaggaagtaaaggctggtgagcggttaagaatcgagtacgagaagaggttgacacatttgaggaaccaagatgtcaaaggcgaagaaccttcctctgttgataagacttgtgcagcattaagaagcttgcatactcggctgaaggtgtcaatacagacagttcagtcaatatcaacgaggattgaaattctaagggatgaggagctgcatcatcagcttatggagctgattcaagggctatcacggatgtggcgggccatggctgaacgccacaaagcccagaagcgcaccatcgaggacgccaagcttctcttcctccagcaccacccctcggccgccaccgccatctcccttggcccgctagaggctgcaggtcccccaccggctgccttggaattggagtccgagatccaggcgtggcgaggagcgctggaggcctggctgttcgcgcagcgcgcctacgcgcgcgcgctggccgcgtgggcgcgacggtgcctcggcatcagcaccgcggcgcggccaagtagccacgcgctgccgccggcgttcctggcgtgcatggagtgggggcgcgcggtcgacgcggccactgaggcgcgggtgatggacggtctggacttcttcgtcgccggcgtcgggtcggtgtgctcgggcgcggctgccgggatggagggcatggctgggcgcgtgctgtgtgctggcatggcagcggtcaccggcgccttggcggagttcgcggcggcgtctggcgacagctatgacgccgctgtcgcagctgtcgtcgccgcggcgcgtgcgccggagcgcgggaaagaggacggcgtgggacaagtgccggaacgctaggaaagtgctgcggcggttgctttgttggttgaccggcccccgtgacgtagagtggctctgctcaccttgtgatgacgatgggtagggtaggagatggaattaagcatgcagctacgtatgtagtcttgtgattgataagaatgctattacaaggctatctaattttgctagcgactgcttattatagtgtggtggtcctagaccgacaaatctaagcaatagcaacaattggttgtttgtgatacaagcacaagcgaatgggatggagtttgtttatgagagcaagaaccgctacgcgcggctacggggaaactatccgatacgaggaagacgaaggcttaccggtggcttcaaatgcggcttttcccctcgagccgttct

SEQ ID NO: 37598 - DNA, 3490 bp, Zea Mays
gctctctcttttcccaggccacgagcccacccgtccgctgaatggcaaacccaccacggccaccatctcgctcgccaccgcttccttcccgatgccgtcgtcgacgatccgaagcatctccatcaccgtctccgacgacgacggtgctgcggcggcaccgtcacggcggccgcgcgctggaagacggaaggcggtggcgcgtagcttggggcagcgggcggtgcggctggtggcgcggtggtggcccgttctcctgctcctcccggccgtcgcgctcctcctcttcgaggcgtcgcggctccgcgcctcatccccgggcccctccccaccggtctccagcctcggacggctcgacccgaccacacgtctcgtccatggcgtgcgcgagccttgcttgaagctccttagccccaaaagtttggcaaatgtggtgttcccggagggtacaagactcgattctgtggtgagcagaatcacgtacaaaactgatgacgatgactatgacacataccactccgaagcaaactctacatatttactgcaacatgcggaagcaacaaggttcgacctgtttacaggatttcagacacttgctgaaagagaagatagcttcaaggtgaatgagactgttagtgtgcactgtggtttctacagcgacaatggtggcttcaaaatttctgaggaggacaggagatacatgagagcctgtaaagttgttgtgtctacctgtgcatttggtggtggggatgatctatatcaacctattggaatggccaattcttctattggcagggtttgctatgttgctttctgggatgaagtgacactagcagctcaggaagctgaaggaaaggtaattggtgatgatagcatgataggaaggtggcggatcattgttgtcaggagcctcccttttgtagatcaacgattaaatgggaagataccaaagatgttgactcatcgccttttcacagaggcaaggtactctatatgggttgactctaaataccaattacgaagagatcctataggaatgcttgaagctcttctttggaggacaaactctacatttgctatctctgaacatggagcacggagtaacatatatgatgaggggaaagctattgttcaaaagcacaaggctacccctgaagaggtagaggtacaattgactcggtatcgtcaagatggaatgccggacacaaaaagattgcacggactgaaagctctagccgaagcctctgttattgtgagggaactcacccctgcaacgaaccatttcatgtgtgcttggtttaatgaagtggttcgcttcacatctcgtgatcagctcagttttccatacgttttgtggcggctaaacatgcatggattgagcatgtttcctgtatgcactcgcagggatcttgtgaatagtttgggtcacacaaggaaagtaaaacctcttacacagacaaattcagggtcttctactacttcgtaaccttcctcccagttcatttgctggtagccaactaaccattgatttacatatggttctaatcgtcgatactcgacatctctggttcacaattttgttgttgtatattatcatctttgcgttcttcctgcgagggaatcctggatctgaaccagaaacacgttaagctgttgcttcactgcaacgcaatcacacgatgttgccactatatatgtaaaagatatgctttctttggttagaagagaatgaacacttttctgcctcctttccgtttcctgatggaacatgtgaaaatggtgtccgttatcaattaattcggcttctgctgctgatggttgtcgcggaaactagcagcaatggaagttctgttcccgtcattttatttggactcgagaatttctctgattaccgatgtttctaattggtacttgaacagcggaatcgtttgaaaaaaatatggtcctgtctgaagctatattttgttaatgcagctccctttgcccaatagtaatacattgaatttcttttttttagatggaattatggaaccgccattattctgagtttgggaagagtttcaaaggaagcgtttaaatctcagatgagctgataaggtgtcgtaatgggccaaatctgcatttcgttctgagcccatgaagcccatatgttcttgttaacctttccctgttctttgtctcctatccccttatccgcttgacgctccccactgcgcctaaaaatggccgcgtcccactgaaccaaccgtctgcacatcctcctcctgttgccgctcgctcgccgtgccgcaatggctacggccgtcgcctcccatacgttgctctcctccgccttcgccccgcgccactaccaccgccgcctgacccggaccgcgtccgtggggccgcgccgggccgccccggtgggactggccgtgcggtgcgagaagagcgacaagcagaagaggcagccgctcgccgcgctcgtgccccgcgagcagcgcttcatgttcgagggagacgagctctgcggccccgacatatggaatacaacctggtatcctaaggctgcagatcatgtaactaccgagaagacatggtatgttgttgatgcaacagacaagatcctaggcaggctagcatccaccattgcagtacatatcaggggaaagaatgaacccacttacactcctagtgtagacatgggagcttttgttattgtggtcaatgcagataaggttgctgtttctggtaaaaagcggtcacaaaagctttataggaggcactccggaaggcctggagggatgaaagaagaaacttttgaccaacttcagaaaagaattccagagagaatcattgaacatgcggttcgtggcatgctccccaagggaaggctgggaagaagattatttacccacctcaaggtatacaaagggacagaacatccgcacgaggctcaaaaacctgtcccactcccgatcagggataaaagaatacaaaaaactggatagagaattcatcgactgaaaaggatgcagtggcgaattcctccccagaaggttttgccctttgtttggaatgctatcctcataaccatgcctctgatcggggaggggggggggggagtataaatcctctttgtaattttgatgtttaccaatgcatgaaattcagtcaaatttctgtcaatgagtagtcatgtaatatggtacggtttaaatcaacctaaaatctttattttccagttgaagtttgtaattttgacctcgtatggtatgaagtggcagattgtttcaatgttcggcctgccatctggatatacgaaattgatcgacagttttcataaccaattttcttgggtggcgaggtgtgatattttcttctgagtttgtagaatagacatgtgcttcctcatgtgacctatatcttttggtaaaattgttgtggatgtaactgaatgctggaatgcgtgggaataaacatggaaacataaaataaaataccacacatacag

SEQ ID NO: 37599 - DNA, 8281 bp, Zea Mays
caaaactctgctcctcgcttaaacccgcgagcctccggacccggatgttgttccggttccgcccggccccctcgtagccatcgcctccttttagcgccgccatcccacctcgccggcggccatggcgaccccgtcttatgcggcggtgaagtgcctcaacacgtcctcgtccagccgcaagcgtttctcgtttaagagcttctcgcagcgggtggaggagatcgacatcgatgtgtaccgcagcctccacacactgaaggcggagccatccagcggatcgtccttcttcctcgacgcaattgtggagtggagggagcttaatactgcagaagacttcatctcattttatgaggagatgataccattggtacaaacacttcctcaaattgtcttgcaccgggacaagctcttttccgcacttctacaaagggtaaacatgagtgcaagattgtccctggagccaatactcatgttgattgcagctttctccagggatattctagaagattttttgccttttttaggaagacatgctagtgcacttttatctcttcttaacgacggaggtgatcgcgaccctgaaatcttggagcaggtcttcacatcctggtcgtatataatgatgtacttgcaaaagtatctagtgaaagatactgtccaaattcttaggatcacagcagcgttgagatatttcccgaaggactatgttagagaatttatggcagaatctgtttcatttttgctgaggaatgcacctaataatcagctaacgcaaggtctactgaaagttctacttgaggctgctaaacaaccatcacctgcacggatagacggggtggtctctttgctgtggcatgtcatgaaaggaacttccacaaagctacactcaaaagctgggcaggtcttgaagttcttgttgagcaagtcaattgtttccactctccgtgataaatttcctgatgataaggtgaagatgattaaacttgttgagttgctggttagtagatatgtgttccctggtagcaacataacaggatcttcttcaattgaggttcttggaagtattcttgactttatgctttctgttctggatgttccaaccattttgggcaatttgtccatcatatcacctttctatgccccagtgttcaaacttaaaaatccgagggtgattgtctttataaagaaacttttggtaaaaggtccccaagttgcacaacattttgaaagtcaaatattaagtgcaatggataatttcattgtaagttcacccgaggatgtcatatttatccttttaaatttctttaaaggatcaaagaagcaaatatttctttgtagcactgatggaaatcatctggattcagtggagaaaacttgcaagttctttgaatcaaaattttctttgtggatagagttattagatgatacagccggcactggtaatcgatctagtaaccagttggtttttctaaatggcataaattcaaaggatttacatgcagggaacatgaatggtcttccaatgactacctggagaggtctacttggtgcagcattgtcatcgtaccacaaactactgttggtcaacaccagcagaaattcagaatttagttttttcttatcgcttgccaagagtcacagtacatgcccacaagtactgtctgctgtagctgaatatttggattccctgcaaggagtatcatccatggaagtgacaaaagaatttgatccacaaaatctcttggagctgttctccatctttgctttcaatttgagcagtccaaccaaggatgttcggattttaacattgaggattctatcatattttgtgaagatggatcaacgtctaatcacagatgaggagcgaccacacaagaggcagagaacagaagtttctggagaggaagctgttgctaaatacgctaatgttgtggatattcttttgattattgagtcaatgccaatttcagtatctactagccgtaaaattgctatcttcatttctcggatacaaatgagtttatcttccaagatggttcatgatgattacatacctcctctcttacatggtattattggcatattgtacaatagatttagtgatctatggccacaaacactggattgccttgctgttctcattagaaaacacaaggagcttgtttggggtcagtttgttccgttcattgcaattcaccaatcaaaaggactgactgtgaaaaatcaggagaagctggaagctgcaacccaaccacagtctatttttgactgcttcaacttgtatcttgctatggactttgattgcacaccagctgtgaccgtggctaccttattgcttcaatcgctccaaaggattcctgatgttgctgaatcccgctctcgacaacttataccgctatttctcaactttatgggctatgatgatagcagcatctttagtgctgattcatatatgcctgaaaaatgtaaaggcaaacaatggaaagcgattctaaaagaatggttaaacttattgaggttaatgcacaatgcaagatcgttatatcagggcaattttctccaggaagtactaactaaaagggttcttgatgacagtgatcctgaaatacaagcaaaagcattggattgccttttgaactggaaggatgaattcttgatcccgtacagtcagaaccttaaaaatctgattgatgtaaagactcttcgtgaagagctgaccacatgggcagtttcacatgactccttgtcaattctgaaagaccatagaagtcgtgtggttcctctggttatccgcgtgttggcaccgaaagtaaggaaactgaagctactaggttctcgaaagcacacaggtgccagtcatcgaaaggcaattcttcgtttccttttgcagtttgattcaaatgaacttgagctttttttttctttacttctgaggtccttgatccctggcagcctccagcttaaaatgtttggttctcagccagacaaccttcttggaagtttctctgacattgttggaacttcaacagaaatttgtgtagagaattttacatggaaaaaggcaaatggtttcattcatctggttgaagaaatttttggtacttttgatatgccacatataagcccatttcttaatgttttattaatcattgtcgctcgcttgctggagagttgcatgaggaatcttagaaatgagagtgatgggaaatatccttgcaaccaaacaaatgaccatggtaatggttgttccataaattctgaagtgggcaattctgtgaacgtggatgaatgctttaaagaaatgcatctagaaggccatatggagcaacctcactctatcacgcagacaagtgtatccatcaagcagttgaaggatttgaggtcttcatgtattagagttgtctcgtcagcccttagtcactatgaaagccatgagtttggagaaaacttctggggtgtttttttttcttctgtgaaacctctgatagactgctttacacaagaggcttccagtagtgagaaaccaagttcattatttgcttgttttatggctatgagccggagcccaaaattagcaccactgttggggtcaaataatcttgtaccagctattttttctattttgactgtgaagacagcgtcaggatccatcaccacctatgcacttgagttcattgagaatctgttgaggttggatattgatttgcagcagcaagatgaacatttagtgaagaaagttcttcttcaacatatggatgttcttatccatagtctccatgattttgttaatcatcgcaaagagctcaacaggagatctggtacatggcttgggcaacgtgaacttaggctgttcaaattattgctaaattacatcacagatccctcagctgctgataacttcatagaccttattcttccatttttcagcaagaaagatttgaactccgacgattgtttggaagcactatgtgttgtgaggggaataattcaaaatctgagatgcaaagtatctgaaaaagttctaaatgcactgaacccattacttgcaattgttggattggaactgcgactatgtatctgtgatatttatgctgggttgtcattgaatgatccttcgatgttgtttctggctgggttaataggagatctgaatgcagtttcagcttcagaacttggtgaactagattatgacacaagacttaacacctatgataaggttaggccacaattgtttcttggcttgacagaagagcatgtgggcgccatattatctcattgtgtgtatgatatgtcatctgaagaattaattttgcggcaaagtgcatctagggctctgcagtcgttcctggacttttccgcctcagttatgaataatgatgtgtccaaatactctattgatgataaatttagagagaataataccagaagcatttgcacgatgggctgtattcagaagatattggaaaaaacttatctgcacaatatgggagtagcaatgactaaagatgtatcaattcaaaaggaatggattattttacttagggagatggtctccaattttaatcatttagcatccttaagctcatttaggcctctctgtaaggtggatatagaagaggattttttccacaacataactcatttacaggctggtaaaagatcaaaagcactgttgctttttagacagggaatcaaggaaaacaacttttcagaggatatcactatgaaagtctttgttccactatttttcaatatgttttctgacgtaaaagctgggaaaggcgaacaagtcagagatatatgtttggatacactatctgctgttgctgccaaagtgcagtgggaacactatagaacaatattgaagagatgcttccgagaattaaaccttagacctgataagcagaagatcatattgaggctgatttgttccatattagatgcattccatttcatgaaacctgcaaatgatgcctcaggaaattctgatgctttgagtgaagatattgattcttcccttacattctctttggtcacagtctcttctgataagcaacagtacatgcaaaaggtagtgtttccacaggttcaaaagttgttaggatcagatccagagaaagtcaacgtcaacataaacctggtagcactgaaaatacttaagttgctaccggtggattattttgagtcccaactttcaagcatcattcatcgaatctgtaacttcctcaagaatcgtcttgaaagcatacgtgatgaagctaggtctgctttagctgcttctgttaaggaactggggattgggtatttgcagtttgtggtcaagatattaagagctatacttaaaagaggttttgagttacatgttctgggctacacacttcattatttgttgtcaaaaaacattactgctgatatgtatggtaggcttgactactgtttagaagatttgttggcagtggttgacagtgatttacttggagatgttgcagaacaaaaggaagttgaaaaacttgcctccaaaatgaaagagacaaagaagagaatgtcgtttgagactcttaagctgattgctcaaagtattacattcaagaccgatttactgaagaagataatctcacctgtttctttacatcttcagaagcaacttactccaaagttgaaaaccagacttgagatgatgctacacaacatagccttagggattgagtgcaactcatctactgaaacatcaaacttgtttatcttcgtatattgtcttattgaggatactattacaggaagcagatctgaatgcaaagagaatacacaatctagtcctgatcaagacagtactgtaagaaagaccttcctgggactaggtgagagtggatcacagaattcttatatacttaccaagtttgcacttgacttacttcgtaatcgtctgaagagcatcaagcttgacaaggaagatgaacaactcgtgaagatgttggatccttttgttgaccttctgcgaaagtgtatgagttcgaaacatgcaagtgtcctctcagccacatttagatgttttgccttgttggtgaaacttccgttgccatctctgagggacaatgcaattactataaaaaatgtacttatggagattttacagagagctggaaactccaatggtcatttagtcacatcttgttttaagctacttgctgatctacttagaggattcaggatttcactttcagataatgagcttcagatgcttgttcatacccctatgtttgtagatcttcagacaaacccttcccctgttgccttatcgcttctcaaaacaatagtcaggctaaaattggtttctcacgaaatttatgatatagttgttaagataggagagttgatggtaacaacattaactgaatctatacagcagcaatgcattcaaattatgctacaattttttctgaactatccactttctgagaagcgcttacagcaacatattgactttttcctggcaaacttaaggtatgatgaatatccatagttactttatcatgatatctcactgtatgctaacactctggaaaattgcagttatgaacatccttcaggaagagaagcagtgcttgaaatgctccatgacattcttaccagatttccccagaggattattgatgagcagggtcaaaccttttttcttcatcttgtagttgctctagccaatgaacagcatcagaatgtgtcttcaatgatccttagagctattcaaaagctgttaggacgcattggtggtcagggaaagagttacatttatgagtattcactttcgtggtacactggtgagaagaaaagtttgtggagtgcttcagctcaggttattggtttacttgttggcgatcacacattacaaatgggcaagcaccttaaaagtattctggctgttgttaagaaaataatggaatcatctattattgcttctggagctatacaattaggcttatctgatgaagctgccctgccattgtggaaagagacttactactctgttgccatgatggagaggttacttcttcgctttccggagttgtattttgagaaaaacatggaggacatatggataatattatgcaagttgttgatccatcctcattcgatgttgcgtagtatttcaagctctctggtagcatcatattttgctacagtggagaagaggaaacatgaacagaaattggatgccccatcatggttgcttgttcaaccgagcaggctattcataatagctgtttccttgttgaaacaattgaggagtgagctgagtgatactacggcaaataatctgattgtacagaatgttgcatactcagtctgcaacttgcatatgttgattaggcaatcgacctccacacatcagttttggtctagcattagttctgatcgtggtgctttccttgagggttttgaattgcttggttcaagaaaagcaaaaaatatatttctcctttgtacttcaacatctagtgatgtatctggatctagcctcgacaccaacgaagagcctacatctttgttagtttcgtcaatcctaaagaagatgggaagaattgcaatgcaaatgcaggatacacagataaagaacgtgttcaattgcttcaatatgatttcatcagctcttggtcctgatgaatcactaacctatgctgatcacctcttggccccattgtataaagtttctgaaggatttgctgggaaagttgttagtgatgaagtgaagcaactggcccagggggtccagaacaagttacgtgacctgattggttccgagaaatttgttgaagtctacaagagcgttcggatgggcctgaaacagaagcgggacggtagaaagcaggcacagaagattgttgcagccgtggacccagaacgcaatgccaagcgaaagcagcgaatggcagccaagcaccgggaacacaagaggcgaaagataatggcgatgaagattggcaggtggatgagatagcttggtatttaggctctgcggaattcggtgaatcatataattgtagaggataatttttcgtgctacaagtgctggcataaaattatgtttctgttttatatgctgtctcactgacttactgcccgacgtaattttattgttgagttaccgaaccataccgtaagtaaaaattaagaggcataagcaatgaagacatagaattgattgaattatatttttttggggtggatggataagtaacaatatattattaaatgtgcaattaagagttttctggctgaggtttgc

SEQ ID NO: 37600 - DNA, 1759 bp, Zea Mays
gtccattgagcccaggcgtcaagcgccagcccattgcccactaaggcatcattccgccaaagacccaaagtggcaaacgcccaaatcgacaaaccctaatgacctaatccccaacccccagccggcagccgccgagcaaaccagctcatccggtcggtcatccactcatcctcatcccctgcccatctgatccgatcggtcatctcatcctcatcccctacccgatcggatcccctgctcatccgccgagcaccaccaggcagcaggctccagtcatcgagcaccagcaggagcacggcgcgctgcccagtaggagcacggccaagaggatgacgcccgcatcctgcctcttctcctctgctactggagcctctactgctaggagcacggctaggaggacaacacccgcatccagcaggagcaccagcaggaggaggacgcccatgctgctgccgttgagcgatgatctgatgcgcccccatcatggctcttctcctccctcacggcctcgcctcgatctgctgctgccggtgatctgctgctgccggatccgagcgccgtgcccacgggtcacggccagcgatatgcagggatcaagaatccaactttgagaaaaattgctcgagatgtaaatggcgccgccggagtaccagcagtacctcgtgcaggtgaccaagtaccaggccgcacagaactgcaaggctgccaggtcatggtgatttcacgtccgttaggctcgagaggtggactcaaacatgacatccaagttttgcaagttttgatgttggatgttaaatttctatgctcacccctcgtttggttattgatgtactatttccatctcatgtcacaaatttggcataaggaatgggtattggtggctactgactgtgtttgtttccacgtattatacatgtacaatggaacagttgataatagttttgcatgaactattggtgttggctatctaaaggacagaaaggcagacatgagcaacagatcccgctccatgggctgaaactgggattcgtgatggcagaaagtgctactgtcgctctcaattgtagcggtgtggtactgggatccttgccaataagggtgagcccgtccaagatgcccatgcgtccccgcgcccctcgccagctgatgtcgtactaggctaggggattgaagaagcacttgaagaggctcaatgcgcccaagcattggatgctcgacaagcttggcggagcttttttcatgctctgcaaggtgaggtctgttcagtttggccagaaaggtatcccctacctgaacacctacgatgatcgcaccatccgctaccccgacccgctcatcaaggccaacgacaccatcaagatcgatctagagaccaacaagatcatggacttcatcaagtttgacgtcggcaacgtggtcatggtgaccggcgggaggaacaccgggcgtgtaggagtgatcaagaacagggagaagcacaagggcagcttcgagaccatccacgtgctgcttggagctttttgctatgtctagttttttcctatttgttgtacaagaaaacataaaatggaattcaactttggtggccgcaaaagtttagagacttgatttcatataaagttaggctgaacattactgcaaacagttgtattttagtttagatttagagtacacttatgtatgtgttgtttgacaatgcttatttatgatatattgaatggtacttatttatattatattaattataatgttgttcaat

SEQ ID NO: 37601 - DNA, 1066 bp, Zea Mays
cgcgcttcccttctgcaccgaagtccgagcaaacagtcatacactgggacgcggagtcgcggacgcctgcgcgatcagcgaacggaagaccgtggaagcaaagaggcgcaagcgagcacggaacaaatacaccttcaggtggcctccctccgactgccgactgaatcttccacctcgcttcgcgcctccggctccgcgccgggcccgcataatctgtgctcgggatcgcctcttcccgcggcaaatgggggccgactccgaggacgccgtcaagcagctcagcctcctcatggagcaagtggaggccccgctgaagagatcgtttcagaggcctatagtcccagtagatttatacaggtcaatacgtgattcacaacttattggcctgtcaggatacacaaaggagttttcaataggaaagttaatatgccgaatgaagatcgcactgaagaggttaaagtgttaacttatattgattgtcaaacttccacggaatgatgtcctactaactgcaacatgggttattaagggtctcccaatttttggcattggtgttggacatagcacatatgacaaagcttcggtccactactatgtgcaatctcatatccagattaacgagtaccgtgatcgtataattttgcctaggctgacacaacagtttgggcggcctgttaccagctgtataaaagtgctggatatgactggtttgaagctatcagcactaagccaaataaagatgttgacttccatatcgacagttgatgatctaaattaccctgaaaagacagagacctattatgtagtcaacgttccatacatattttctgcttgttggaaggtactatcagttacagccaacgctcggacctacggtttttagtaatttttttagcagaaaggaactgatgacagttaatttgagcatgccgctaggttgtgaagcccttattgcaggagaggacaaaaaagaaggtcaaagttttgactggctgcgggagagatgaacttctgaaggtaaatatattcttccttgcttgctgccttttcacctgtcatttctggg

SEQ ID NO: 37602 - DNA, 313 bp, Zea Mays
cgcctagatccaccttccctgtgaaacacctattggagcgttgtcgcgggacgtgaagggaggcagaagctgccgcatccgttcttagccggggtagcaaattggggcgtgtggttgaccaacgaccttcgtagtgccctcgggagcgaaattgacgccgccgcagaatcaatcggagcgcggatcaagaggaattcttcaccgaggtgggtgaccgccgtggccacacttcaccatggacgaagacggcgtggcgaaaccggggtaatcatcccatccctcgcttagtttccatacccccatcgtgttacat

SEQ ID NO: 37603 - DNA, 1497 bp, Zea Mays
gagaaacccgcggccagcccccgcaggcccggaccctggcccccggccctgttgtcatcctcctgcggctcccgcatctctagctctcacgtgcgcaccgcctgctcgacgcaattccccactcgcccaccaaccttcccgtccccgatggcgatcatggcggccaccgccactgccgtggcttccccctccagctccacctcgccaggtcccctccaacccagcccccgcttcctccctcccgtctccacgcccgctcgctgccatctcctccccaagccgcggcggtggtgcgcgcgcctccacatcgagcgtcgggtggccgtcggcagcgacgtgtcttcgtcccatgacgtggctgccgaggaggccgctgctgcgcccaaggtcgggaagcgcgtgcgcgtcacggtgcccgtccgcgtccaccacgttgccaaggcgcccggcctggacctgcgcggcatggagggcgtcgtcaagcagtacatcggcgtttggaaggggaagcgcatcacggccaatctcccattcaaggtagagttcgagctcaagctggacggccaggacaagccggtccggttcatcacccacctccgcgagcaagagttcgagatcctcggggaggaatagagctctggactagagaataacgcgctctcatcggcggctgtggcatctgtatactattgtgtctgcgctaaagaagaacgtggtcgagggtgcggggagaataggagattgcaactttgctaacagctcgctggtgggcacaggtgtttggatttcaaagcgtcaacaaatgggaataagttctgatcagcttctgctgctttcagagccatcattcctgcacaattggcaaatggtacttggacagttgaaaatcccaaaaacatcactaatcctttcattgagggctggcggaattctatggctgatatggaggacatatatagttctctatcattgagggatgtcaaaatgaagatggtgatatgagtgaaacaaattattcaacaatttagagctacaacggcctaagaacattctctgttagagctactggagcatcaacatgtaggaacagtgaccatcagataatctggctgtgagaagaatctgtgtattgtggggattatgtgcggaggaagatgaagtggtccaaatggttcaggatctagaaagcgatggatttctactatcacgacgactcgaccgattatgtgttcatgttgattttcgacggtttttaccaacgcggttcttatagaagtgggctgaaaaactagggcatttgacagtctgcaacaacttttggtggccagaagccgaaaaaaagcccaaacaaacatggccttagtatcagtgttatgcaagattgaagttaaattcctaagtttcaatatactactgtctcagttgtgcatttctaaactgttatggttatagcttagtacaaattgtgagttgcatgcagcacacaaaattctaatc

SEQ ID NO: 37604 - DNA, 466 bp, Zea Mays
ctccctcttccttgcccgctgtcgcttacgcgtgggccccagtcacctgcttcccttcctcctccgatcaccgcgaccactgctctgggttgttgagatcgagcggagtttccgctactggactctgcgaacccctcagcccgacgaataaataccgagccccgcacccctagccatcttcatgtcgggcgagcaccacgaatcgtgagctcgcacaaaagagggaccctgaccgccgccggccacatcctcgcggaaaggcatcactggagcctcgattggtagctctcgggaatcgctggaccatcacagatccattggtggagatcggtagcatagaggatcagtgagtgattgggaattcgtcgccagagtacatcatcgccgtggagccgcttcgtttcgtggtcaaggtctgctactgctctacagccggtaagaagccaaccatgtcgttcgcccgacc

SEQ ID NO: 37605 - DNA, 1614 bp, Zea Mays
agaggatttctattgtagaaatgcagttaggcccattaggttttgcccttttttttcagactcggattggtccgccctccttgtgctccgccggcaatggcgtccaccgccgtcaagctcatcgacatcgcagtcaacttcacagatggcatgttcaagggcatctaccacggcaagcagtgccacgccgccgacatcccggccgtactcgcgcgcgcgtgggctgcaggcgtcgatcgcatcattgtcaccggaggctccctgaaagagtccagagaggcattgcagatcgccgagaccgacgggagactgttctgcactgtgggagtgcacccaacaagatgcggggaattcgaggagagtggagatcccgagggtcattttcaggcactgctggctctagcgaaggagggtttagataaaggcaaggtcgttgctgttggtgaatgtggtttggattatgacagacttcagttctgtccggcagatatgcaaaagaagtacttcgagaaacaatttgagttggctgaagcagtaaaactgcccatgtttcttcacatgcgtgctgctggtgaagacttctgtgaaatcatgacacggaatttgcacagattccctggtggggttacacattccttcactgactcagcagaagatcgggacatgctactttcttttgagaagatgtttataggtgttaatggttgctctctgaaaactaacgaaaatcttgaggttctacgaggcattcctgtcgagaggttgatgatagaaacagattctccatattgtgacataagaaatactcatgctggaagccagtatgtaaaatctgtctggccatctaagaagaaagaaaagtatgagccagattcaacagtaaaaggtcgcaatgagccttgtttagttaggcaagttcttgaggtagtggctggaagcaaaggaatttctgacatagaaggcctgagtagaactctgtaccacaacacatgcaggctcttctttcctcaagatcttgacgcttctgctaatgcgcagcttgagagtggtactgccgtccaggattgctgatgtcagagtgatttttttattataaatgtttccttttgactgttgcggcggcgtagggcgggggtaggacagggcgcccacgcggtggcggaggccgacatggtggcgctgcaggttctggaaccggaggctgagaagcggggcaggggcgtaatggcggctgcggtggccatggccggagcgcagagatttatagaatatgacgaatattgaataaattattcactatccaggcgtaggggtgggcattttaaaaccgaacctgaacccgaaccaaacccgaatagaccgaattgtcggtctattcgggttttcgggttcgggttcggttcctatatgtgctatatttcgggatatgtgttcgggttcggttcctaacctttaaaacccaaatagacctaataacccgaaatataaaaaagctcttaatatgtgatggtattattatatgtatgatttataaacttagtagcttgaaataatgatatcatcttaacgatagtatatatatctttgtatgctattttttatagtcacttgtag

SEQ ID NO: 37606 - DNA, 2685 bp, Zea Mays
gcagcccagcacaccttccttgcgctactattattatcttaatatccgcggctgcgctttggaagcaattcaagtgtatcaccgttgttacttccataacgtgctaacagtcaaatttgtcaagctactgttgatgctccagatatagtagaaaaccatgggagaagttagtgatgataattccaacatgtcctttctaaaaagaatcgctacaagtgacgtgccactgttgaaagagtatggtgtgaatggagttgttgtcgccctgcttctggctgtagttactcctgtcctgctttccatgatgtttggcaagaagacaaagcaaagggcggtgcgagctgatgtgggtggagaggagggatttgcaatgcggaacaacaggttttcctccttagttgaagtcccatgggagggcgccacgacaatgtcagctctgttcgagatggccagcaaaaagtactctcgacagaggtgtcttggcacgaggaagctaattaagagggaatttatggaatcttctgatggtaggaagtttgagaaactgcaccttggtgaatatgaatgggatacctacactgaggcatttaatcgtgcatgtaatttttcttctggacttatcaagatgggccacgacctagatagtcatgctgctatcttctctgatacaagagctgagtggatcattgctgctcagggatgcttccgacaaaatttaacggttgtaacaatatatgcatctcttggtgaggatgcattggtgcattcactaaatgagacacaggtttcaactctgatatgtgattcgaagcaacttaagaagatacctgcaatcagctataaattgcagagtcttaggcgtattatctatattgaggatgaacctgtcgaggctgagacactgaaccaagtgaagcatttgacaacattgtctttcactgaagtagaggagcttggcaagacatctcatgttgatgcaaggttaccttcaggctctgatactgcagttatcatgtatacaagcggaagtactggtcttcccaagggtgtaatgatcacacatggcaacatggtggccacaactgcagcagtcatgacaatagtcccaaaccttggcatgaatgatgtttatctggcttatcttccattggctcatgtctttgaactagcaggggagactgtcatgttagcttctggcagtgccattggatatggttcagcattaactatgactgatacatcgaacaagattaaaaagggaacaaaaggagatgtttctgtactgaatcctactcttatgatttcagttcctgcaattttggatcgtatcaaagatgcagtatttaagaaagttggtgagaagggtggcctgacaaaaaagctgtcttgattttttcatataagcgaaatattgcagcaattgaagggagttggtttggatcttgggcaccagagaggatgttatgggatcacattatttataaaccaatacgggcaatgcttggaggacgtctaagatttgttctttgtggtggtgcacctctgtcaagtgacacacaaagatttatgaatatatgtctaggtgtcccagtgggtcaaggctatggattgactgaaacttgtgctggagcagctttcactgaatgggatgatacaagtgtgggtcgtgttggtccaccacttccttgttgctatgtgaagcttgtctcatgggaagaaggtggttacaagatttctgattctccaatgccgagaggagaggtcgcggttggtggacacagtataacaaaaggttatttcaacaatgaagcaaagacgaacgaagtatacaaggttgatgagaggggcatacgctggttctacactggtgatattggtcagttccatcctgatgggtgccttgagattattgacaggaaaaaagatatagtaaagcttcagcatggagaatatgtgtctcttggcaaggttgaatcggctctagcaacaagcaactatgtggagaacatcatggtttatgccgatccatttcataactactgtgttgccctggttgttccagcgcaccaggccttggagaagtgggctcagaattccgggatgaactatgaaggctttggagagctttgccaaaacgaccgagcaattaaggaggttcagcaatcgctatcaaaggccgcaaaagcagcgaggctcgagaaattcgaggtgccagcgaagatcgtgctgttgcctgaaccgtggacgccggagtccgggctggtgaccgcagcgcttaaactgaagagggagcaaataaaggccaaattcaaaggcgatctggacaagctctaccactgaagaagcgacagaggacggtttaatttgcacctactgcttccagacgcttgcggtgccaaaagctgcctggatggaacttttactgacctgcacgagtggtgtgtgtgtgtgtatcccagctgctgatacacaggagcttcgttcttctgtgactgtgactgagggaaaataaacccagtgttggaatgatcttgatttgtaatagcttcacgtcatgggattttaattttgtcatagcacagaggatgctcaatttcacgtccgttacgggtcagttatgacactaagcatattgtaaatgatgtttttttatatagacacaataaataggccctgggcacatca

SEQ ID NO: 37607 - DNA, 382 bp, Zea Mays
taaaatttaaagtgcacaaatgatataaagcacaattgctacttgtttaggtgacacactgtttgcatttctcatcagaatgtcacaccagtcacttatgttgcgacccacaagactcatccaccatccaatcaaggttgcttccagttattcagactgtgaactagaggcatcaagagtttttttcagttgcttgtggttcatcgtacctcctgttttgtgcatgctgtaccacaggtatctagcaggtcacttaagaaggccattggattcaaaactcatgtacgctactgtgacacattgatggtcctgaagttgtggacaatgtcaaaggttccctttagatcaaggtaacttctaggtccctttgtctagattatac

SEQ ID NO: 37608 - DNA, 3029 bp, Zea Mays
ctgcagaaatggacctttgttatgggccgtaacgaagcccacatcctatccgacaggcagaagcagagcacccccaccactcgcctccaccgcacgcaagcagacgtcccaccgtccccatggccaccatggcttccaccgccaccgctgctgcttctctccgcctcgccttccctctcctctccgcgccggcttcctcctcgtcgtactccaatacccttcgcttccctctccgccgccgcagctcctgccgccccctcgccgtcgccgccttcaagaagctctccgaggcgtcccccgtgcccatccctcaggagcccacccaacccctcctggtcgacgaagacgccctgcctcctaaggccggggtctacggcgtctacgacgccgccggcgagctgcagttcgtcgggatttcgcgcaacgtgagggccagcgtcgagggccaccgccggaaggtccccgccaacctctgcgcctccgtcaaggtcgcagtatcagatgaggaggcaccagatcgatctgcccttaacaatgcctggaaatcatggatggaagaacacatagcggccacgggcaaggcgccaccagggaacgttgcaggaaaccacacctgggttggtgccccccagcggcccccggacctgcgtctgacgcctggacgccacgtccagctgacggttccgctggagcagctgatagaccggctggtgaaggagaacagggtggtggccttcatcaaaggatcaaggagcgctccccagtgcgggttctcgcagagggtggtcttcgtcggaggggagctcgtgggaggctgcgatatcatttcgtccatggctgagagaggggagcttgccgccctattgattcagaaatgaagacttgatttagtacagcgacttggaataaatgtttgcttccatgggtgactgatccgttgcttgcacacgtagcatgccatccaagttggtatctgtggctttcggcaaggaaagaaagaaaccgttgctctgcgtctggacagtccggtatcgatttaattatatatatatatatatatatatatatatatatatatttatatacttattagaataaaattaaaacatgtgcatgcaaatgtcagcagtgtacgatggacgtggtacgtcccaaattgaaaagcaaagcatgtggtgtggtgtgggtggttgaattggatggttggtttgcctgctggtgctgtttataagtagaagtagccggccgcaagagacgccgcgcctggagacggcacgcgcacacacacacacacacacacacatattttgagaacggagagggagcgagcctcttacgttacgccttccgttcacgtcctagcaaatcaaaccaattccatctctctctttctctctctctccccgatccatcttgtccaactcctcgatcggccgttcatatgtttatgcgttagcaaaccaattcccattccattactccggcggcggccgcaccaccgccaaaaaccaatgcagatgacggcggatcaggaatcggcggccaaggcgacggaggacgacacgatgagcggccggcggcgggtggacgacgaccacgaccacgacgtcgtcttcgacgccgggaaaccgccgccgttccgcatcggcgacgtgcgggcggcggtgccggagcactgctggcgcaagaacccctggcggtcgctgtggtacgtggcgcgggacgtggcggtggtggcggcgctgggcgcggcggcggcgggcatggacagttgggcggtgtggccgctgtactgggcggcgcaggggaccatgttctgggcgctcttcgtgctgggacacgactgtggccatggcagcttctcggacagcgcgacgctcaacagcgtcgtgggccatctccttcactccttcatcctcgtcccttaccatggatggaggatcagccacagaacacaccatcagaaccacggccacatccacagggacgagtcatggcacccgatcacggagaagctgtaccggcaactagagccacgcaccaagaagctgagattcacggtgcccttcccgctgctcgcattccccgtctacctcttgtacaggagccccggcaagtcgggctcccacttccttcccagcagcgacctgttcagccccaaggagaagagcgacgtcatggtgtcaaccacctgctggtgcatcatgctcgcctccctcctcgccatggcgtgcgcgttcggcccactccaggtgctcaagatgtacggcatcccatacctggtgttcgtgatgtggcttgacctggtgacgtacctgcaccaccatgggcaccatcagcttcctctcccctggtaccgcggccaggagtggagctacctgcgcggcggcctcaccacggtggacagggactacggctggatcaacaacgtccaccacgacatcggcacccacgtcattcatcacctcttcccgcagatcccgcactaccatctcgtcgaagctaccaaggcagccaagccggtgctggggcgatactaccgggagccgcacaagtcagggccgcttccacttcacctcctcgtcgtgctcctcaggagcctcagagtcgaccacttcgtcagcgaccacggggatgtcgtctactaccaaaccgaccatgacttgaacactagcagtgctcatcgctgggccaaccaaaaccaccataagcaaaaataatggtttctcaaacacagagacggcctgatggttgctgttgttattgctccaaggactcacagtacaatatataggcatgcgtatgagaaagccaaataattaaagagaagggagggatcctctagctgaagcaatcaattaattacagtatcccactagatcgagtttgctaagcattactcctactatatacaatatgtactgttgcttgtattaattagctagatgttgtgttggagccttggatgatgaaactaaaggatgagccactgaaatttgtaccatttgttcggaacttcatttatatgg

SEQ ID NO: 37609 - DNA, 301 bp, Zea Mays
gttagatgacgtccacttggcgagcatctcacatcttggcgcttgatccgatcacccaatcttcaagttcattcatcagtatcaccttgcgaagaaacccatgcttaacaacatcttgtggttgactcagctctggtccttcgtatcacgtgatcagctagcgtacctaatgagatgcatggtgcacatgaatagatatgagcaagaatagcacaagcctaaataatgttgtacgataatgaattaaacacttagcggcgaggcacataatagcacttaaaagcaaatactagatgtcgag

SEQ ID NO: 37610 - DNA, 2474 bp, Zea Mays
accccatcggcaaccggctctgtccggaaagcccccaagcgcaaccgcttcttcccggaaagggcaaaaaggaaacgcgcctcgtccggtcggacggaagcccttcttcccctccccatccgccgccactgccccgcgagattcggcgagaattaaaggcaccatatcctgcctcctctctcgtctccctatttctctctcactccccacctcccgcgcattccgcaccgataggtaggctcacccggactcgtctcccgctcccccctcccttttcccaaaaccctagcgggtttcgacctcccaggccaatcagatcgaccgctgccgcgcgcaattgttgagccatcgaggtttgacttcatactgccctgccccaaaggatcaagatcgcatcaccagtggaagcctcgggggctgctaagtaacgttatctgactggctgactgcgccattgataaccttgggttacaactgcacaggaggctgcgacccacaggccatccggggctcattgcagctgacgaagcccctgcagactactccccgacaatatggcgacagcgacaatggcaaccgccgcgggggccgcggcactgctttactacacactgaaccgccgcctgcagacagagaggctgaataaggaaggggagtgcagcgatagcagggatgtgacacccagggccgcacagggttctcccagcaggagccgtgtatcgcggagggacgtccgcgcccctgccacctggcttgagactatctcgacgctgtcagagacgctgcggttcacgtattcagagacccttgggaagtggccgatcggcgaccttgccttcgggatcagtttcctcctcaagagacagggaaacttatctgtagcaagcatatacgctggaaatgatagtgtggagctcaaaggagctgaagtaattgctgatttaaagtatcttctcaatttgctgacactttgctggcatttctccaaaaagccattcccgttgtttttggaggcgactggctacactacggaggatgttcttatgcaagaacctaaagcaggaattttgaagccagctttcaccattttgcttgatagagacaaaaagtctatacttctattaattaggggaactcatatactaggatatgctcattttgggatggttgccgctgctaggtggattgcaaagctctcagggccttgtctggcacaagcattgcagatgtacccagacttcaaaataaaggttgttggacattcactgggaggtggtacagctgctctgttgacatacgttctgagggaacagaaggagtttgcctctactacttgtctggcatttgctccagagtcaggagtgcattttatcactacagtcatcaatggagctgatctggttccaacattttctgctgcgtcagtagatgatcttcgttcagaggttacagcgtcagcttggctaaatgatctccgccaccaaattgaacaaaccagaatcctaagcactttttatcgttctgcgtcagccttgggatcccggcttccatctatggcaaatgctaaagcaagagtagctggtgctggcgccatcttaagacctgtatctactgggacgcaggttgtaatgaggagagctcgcagtgtagcacaggcagcatggacaagaccagcactgcaactgtcctcatggacttgtattgggccaagacggcgaaataatatatctacctcaactgtcacatcagaggaaataatagcatctacaggcggtggatctgaatccacttcattgttgactgaaaccactgcggaaaccacagagacagttacatcagaagctgtatcagaagtggttcagagttctgtttctgtggcggtcgatgctgttgacttggtagatgacaagggagatagcgatgatgacatcgtcgatcaccatggggacgaggacaggatgactgatgtggagctgtggcagcaacttgaaagtgagttgtaccggaagagggagggagaagaggatgacatagccgaagagatggctgaaagtacaattgctgaggaggtgggtggcgtggctgaagatgtgctcagcgagacaaaggaagtgcataggttctaccctcctggaaaaatcatgcacatattattctccagcagggaagaagcagatcgtggagaggagcctgaggatgatgttacggatggggaggcacaaagcagcatagggatcttcttgacgccaagatctctgtacggcaagctgaggctttcgaaaatgatgatcaatgaccattacatgcctatatacagaagaaacattgagcagctgatcgcggagcttgagaaggattcctcggatcaaatagggtgcgtcaggtgtagttgaccgttgtaagagctgatcaaatagggtgttataggtccgacatgtgtatatacttgcttaagtttaccgcttcccttctgg

SEQ ID NO: 37611 - DNA, 8915 bp, Zea Mays
acccaattgcccagggccgccgccgcgccgacctcgccgtcgcgcgctttgcttctcttgcccccctgcccgtggcctccgccccaattccagcgggacagcctcgatgagccgccaggatcgtcaccagtggcctcgccctaaccacggatacgaccctcgcgccgccgccgccgccgcgcaatggtatggcgccgcttcgatgctgtttcccgaccccggcgcggcggcgctgcacgggataaacccctacggcttcgcccctaaccctttcttcaataacttcctcccccagaactccgctgccctagctgcctaccaactgcagcagcagcaggctcatcacttcgcctcccatgcctaccaccaagcccctaccggtaacaccatgcaccgctctaccaaacccgccgccgctgccaaacctgcgccgccaccgggcaaccagcaggccgtgctggaccgggctcaagaggcggcgaggaaggctcgggaggagctcgtgaagggtggggacggcgtcacggcgtggaaggtggcgcaggcggtgctggtggcgctcaaggctgattcgtgggactccctcggcgtccagccccaggatgtgcctctcctgcgggatctcttcctaatcgagggcaaggtgaacgcattcatccattgctatgttgcagcaagaaaaattgtaacggtttatgatctggaggttgagatatgcaagaatgagggggttgtgcaatttgaagagctgggattgggacctttccttcagcacccgcttgttgcacattattttttagtgccagctgatttgtctgtggtgcctaagctttgtagcgaggaaattatcaataccctgctgaaatttgtggacaaatctaagaaaaaaatcacaattgaagattttttgaaccatcttgcagagaaaaaatcagtctctgggaaggaaaaacttggtgtgcgggtacaaagcttggggttgcatatttccttactacgacaggccaagcaaacagaagtgtctgctgcgaagcttcgagcaaatatgagtggatctggtaatagtagtcaggagaaggatttgttgaaaaatgcaagtttccatactcacaagaaggctttggacaagaggttcatttctttaactaatcgtataaaagagttaccaggcatcaataagcatatccattttgattcgaccgatgatgaaactaatagttgtactggttctgaggatggtaaatctgatggcaatgagaatgagaatgaatgttctattcttgacaaaaaggatggtgataagcgtgtgaatagctgcccatatccgtcaaaaactgaagaactggaaaggcttggtttgaaatctgaaattaataaaaggcaatctttagagaatagcaagccaagagacagtgggaaaaaggggaaagttttggaaatgttagcaaattactatgggagaacgatatcagggaagaggagaattagaaatttcttctcacagtacccaggcattggccttctcaatgttgctgttaaatcaatgggatgtggtctgctggatagcatttacgatgtgatacagcttgctgatgagaatgatgtagcttcaagccctcctcctaacaccaccactgaagttatggaaattgagcctccaagtaaagaaaatacaggtagcactaatggagcccatgagaagagtgaagacaacatgactgcacatggtgttgctattgatgatgtcatcaggaggatttcagaatatattgaatccaacagtaaaatctctggtgatgtggctttgcaagtgagggcacttaatgattgtgaaacatgggtaactactcaattttcagcaaatcaattcagtgctcttggccatgggacattccttgagtttttggacaaacattgtcaccagttccgaactgctttgagtagtttctttaaggagggtccttctaattcttcatctctggaagtttctgtactgcagcagcaaattgaatttttactctgtcaagctgagagtaattggctggaagatagtgacttttcagaggatagttttgttatgcttcttaaaaagcaatttccaacaataagctttaatattgtgcaagacaaatctgatggtggagtttctggctttattgaggggcagaagaaagacatacggacatatagtttaaaattttccatctctttgttggagaaacgatggtctggaactttgccaagtagacatgggaatgttgatgaactggggaacattgtcgctgaacaatcttgttaccataccacagtttgctcacgagaggcaattaattgtttactgagggctcctatgctgtctgatctgcatctttggtcccattgggattcgctatttgctcctacactgggctcctttgtacattggttgctgaatactggtccaattcaagagctcgcatgcattgcgaccacagatggtaggtttattagagtagattcatcagccacagttgaccagtttctggaagctattatccatcgatcaccacttcaagtggcagtgaaactgctttcacttctatacatttacaatggttctatgaacaccccaatgtcattgctaaaatgttatgcacagcgagcaataaagctcatagtagataacaacaatgatttgatgaatgctaaatctgaaaacaaaatatttatgcctgatgagccccaaaacctaagtagtgaaagctctacttgttttgctgatcagtgtcaagaaagctctcaggcgtctcctggaaggttgatcaggtctgatagcttgccaaacattaataacactgttcatttgatcacaaaatttgtacttgattgtcttgatcatctaccttcagaattccgtagtcttgcagcagacatactattggcaggatttcgggttgttactaagaactggcatgcagttatgttgcatgaagccactgaaaacgggcagctttgcatgcttcatgatattggtttgtcacttggagttgtagaatgggttgaagattgccataggttgtgtttaactgatgaagttcatgtgcagacagaaatgcattcttctgccaagcttgcaacacctgcctctgtgggagccacccatgaagattctaacatgcatatttctagtgatgttaatatgatggataagagaaaacaattgtttcctgtcataaatgatcgggctggtatagataaggaagacaataagatgttaaatcctgctggaactgaggcagatgttgcagaactacatactaccagcagatcttctatgatggaagaaacaagtcttgaggaagcatctcttgttattgagactatacgccgtgaagagtttggtctggatcaggcactaagtgacactgagaatagcttgttaaagaagcagcatgctcgacttggcagagcattgcattgcctttcacaagaattatattcccaggattctcatctacttcttgagctggtacagaatgctgacgacaatacatatcctgaggatgttgaagcaacattagcattcattctccaagaggatggtattgctgttctaaacaatgagaggggcttctctgctgagaacattagagcactctgtgatattggtaactcgacaaagaaaggatcaaaccagggttatattggaaataaaggcattggatttaaatcagttttccgggtaactgatgctccggagatccattcaaatggtttccatgtgaaatttgatatcacagatggccagattggttttgtgttgccaactgcagttccaccttacagtaccacttcttttagtagaatgttatccgttgaagatgacaaggatgcccattcattgtggaacacttgcattttacttcccttcagatcaaaatttagggagtgcactgatctgcacccatctctactgctgttccttcatcgactaaaatgtatcaagtttaagaatttgtttgatgacacacttctgattatgagaagggagattcttggtgatggtattgtgagaatctcgcatgggattgagacaatgagttggttggtggtcagtaagaggctacaaggtaccattgtgcggcatgatgtgtgcaccacagagatagctgtggcgtttactttgcagcagactgaggaaggagattatgaaccttatttgaagcagcaacctgtgtttgcttttcttcctctaaggaattacggtcttaaattcattcttcaaggagattttgttttaccatcttccagagaggaagtggatgcggatagtgcatggaatcagtggttgttgtctgaattcccttctttgtttgtaagtgcccaagaatctttttgtgctcttccctgttttcagaggtgccctggaaaagctgtcacagccttcttgagttttattcctctagcaggagaggttcatggattcttcagccagcttccacacttgatcctttccaagttgcgtctgacccgctgcatgtttttggatggctctactgtgcaatgggtctatccatgcaacacacttaggggttgggatgaacaaactaaaatgttattttcagaaggcttacttcatgaacatcttggtcttggttacctctcaaaaaatattgttatatctgataagttatcaagagccctaggtattcatgactatggaccaaacattttgctagatgccatctcatctatttgccgaattgatggttgtattgagtcattgggcctggaatggctttgtgcttggtttgttaacctttatctgacattgctgtctcattcttctcaaaatgtttcctcagcaagaaacctcgaagacattcttttggataaagttaggaaaataccatgcatcccactttcagatggttcatttacctctatttcagatggtcgtatatggttgccatatgatgttgccagttccattcctgaatgcagtagcattccgaattttccagctctatatggtaatcttcgaactgtaagtccaaaccttctctctgcatgctgcaaaaataaatacctcatggaggaagtcagaataaatgatctggcagacatgctccaaaggatcggggtgcggaagttgtctgggcatgacattgttaaaaatcacatcatggtgtccttgcgtaacggtttagatgctaatgtggctgatatagtgattagagagtatgtgagctttattatggttcatcttcagtcttcttgcaccagctgtaactttgaaagaggagagatagtgtcagaactacggaagagtcctatcttccttacaaaccatggatacaagagcccagctgatgaaccaattcacttcagtaaagattatggaaattccgtggatgttactagactgcttcagaatgtagaaataagttggattgaacttgatagtagctatttgcagcatcatggttcacagtcgtcatcatttgcacgggaaaaatggaggcaattttttgaagaaatgggtgtgactgattttgtgcaggtagtgaaagttgaaaaaactttatcccaagttgattctattctagcaggaggactttctctagctgatgtatctacaaaacaatgtacagtgtatgactgggagtcaccagaattatctagaattttatcaatattttcttcaaaaagatgcaaggaaaattgtgtatatcttctggaagttcttgatagattctgggatgatcattatagtgcaaaatctaggatcttcacagatgctacacattgtggtgaaaacagagcagttgaatcatcatttatgaagtgcattcaaagcttcaaatggatagcatcaagaatggatgaggatcttcattatgcaacagatttattctatgattgtgaaaatgtccgctctctttttggtagtgtggctccatatgctgtaccgcaggtatctagcagttcacttaagaaggccattggattcaaaacagaggtatcttactgtgatgcattgatggtcctgaagtcttggataacgtcaaaggttccctttagagcaagtatgagccagatgtgcaaattctataccttcttgtctgaaggcgtggcagacgcaaagattgacattaaacgggagttcatgtcgtctccttctatatttacaccactacagcgtcctcgggcaagtgaggttattcctggaaggtttttggcgccagaagacctctattggcatgacccaacaggatgttctgaaataacagaggatttcgttgcaacgaaaaacagaagtatgttcccaagaaaaatgctgtctgcagcctatccaaacctttatgaattatttactctgacatgcggtgtaccaaaggccccaacaacatcaaattatgttgagatgctgctacggttgtcaaccattgcattgccttcacaggcaggaaaccatgtcttttgtgtatttgtgagatgggccaagtgtatgcattctgaaagtgacaagatgaatgatatattgtacttgaaagaatcccttcagaaattagaaacaacaatattgcccacctcagccgataaatgggtctctctacatccttcttttggccttgtttgctgggtagatgatgatgagctaaagcaacagtttgttaactctaatgatgtttacttcatacaatttggcgacctttcttctgaggataagcaaatgttgtatggaagagttgctgctttaatgaaaagcttaggcatccaagcactttcaaaggttgtgtatcgtgaagcaatattttatggtacatcagagaacagagaaaaggtttccttgatttgttggctgttgccatacatgcaacgttacatctataagatgcatagagatacttatatcaacttccagaaaaacgacatcatgaagattagcaacctgcaagtagtagttgttgacaagttattccacaagtatgtactgaggggactcgagagttcttctaagaaaagattccaatgtcattgtcttttgcagggagatactctatatgcaacacaagaggctgactcacattcagtatttttggagctttctagaattttctttgatggatcccatgatcttcattttgcaaattttctacacatgatcaaaaccatggccgaatctggcactcatgctgagcaaatagagacttttatcgttaataatcagaatgtgcctgagttacctgagcatgaagctatctggtccttctcttccttgtctgcagccaaacatggttcagcgaaccaaggtggtgctgatacccagggggttgatttccaacctgtccatgaatttagtattcccaatcatcagaaggcacaggtgatggtttctagttggcctctaaactattggagaacagcacccgtcttcagaacacctctcataaaccagcatgcaagcatgcaagaggcaaaggtgaatgatgctggaccttcatcaaacttaaacatgcctgctatgtatggacacaccgaagatagtttgctttctgctgatcttgaaagggattggattatagaagagaatccaagaactgaaactacattgtttggagatagttcatcggaaatccttgatgagcctcagatggtgatgtctgctgaacctttccatgcacctgcttatttgaacttggaggctggaaattcaagcccaacggttcatgtcgagctaacaaattccgatgagaaactggccaatcttgcagaagacaagaatcagcgactttcagatgcaaaccagttaagaacagggaggcttggtgaagaactggtcgagaaatatttggccaaacagctaggttccaacaatgttaggtgggtgaacaacagaattgaaaccggactgccttatgatattgttataacacacccagagggtttcacagagtatgtggaggttaaaacaactgtatcttcaagaaaagattggtttgacgtctcagcaagggaatggcagtttgccttggagaaaggggattcatttagcattgctcgtgtcatcttaggtacaaagaaagcaagtatagaaatgttgaaaaacccacacaagctttgtaagcagaaagcattgcggcttgctctcctgatatccagatcggcagcaacctagactaaaatgtcggttttgttgaggctagcaccgatcatccttctgcagattgttatgattactctgactaataatcaacatgaactggagtgagcatctgcatcttgataggtatttgctgatccaagttagcagattcttctttttggagagagatggggtaccgggtacggcatgagtgcaagacaacatacagttgagccgctctatagtaggctcctctttctattattctaactcgggtaatcttctccaatggcggctctctaccatgtctcttgttacatacaacttacgctctgcctttgtaacccattctggtattttgttgcataatgtatgtgattttgtcattagatttgtttttcaatttctgccctagacatcgtcccataggttgattgtgtaactaaacatgaaactgtacataaatggatggaatttgattttaccatgtacatgaaatttgattttgcgtgcggcggctgcctggtctgtgcgttctggtctctgtgcgcagggcgcggcatctgcccggcagcctgctcgccggctgctcggtgagaaaattggctagttgggtactggttttttttttcaattgataaaaaaacaggatctgatggagccttttcatttttgttttactttccgtctcttttatcagcagttgaaaggcgatcacttattctcaatttggtggaatctcctttatcagtaattgatagttgaaaggtggtgacttgttttcaat

SEQ ID NO: 37612 - DNA, 2667 bp, Zea Mays
ggcccatatgtcgtgtcactgaggccgccaggagaagaaggcagctgccgctgccgccgccgtccgccgatgccgagctgcctcctccctggcatcgcgccacgcccaccgccggccgctctccgcagcctcctcctccgccgcagcagaatggcctcctccgggccggcacgcgccttccagctccgcctcaacccactcaccggcgactccgagtggctcgtcgtcgacgaggcggaaacggaagcggaggtggctgcgcctgcgccgacccaccataagcagctccttgccgccacctcctacctcgacatgctcaacgacgcctcccgcaaccgcgcgtaccgcctcgccattgacgccacggtaacggaccccacctctcgcgtcctcgacatcggagctgggaccgggttgctgtccatgatggcggcgcgagctttggcagctgctggaggtgaaggtaggggaagcgtgtcagcatgcgagtcctaccttccaatgggcaaactaacacggagggtactcagagccaatgggatggaaaataaggtcaaagtatttcacaagcgatcagatgagctcggagttggagtcgagcttgattctcgacctgatatattggtaagtgaaattcttgattctgagctgctgggtgagggtctcatacctactctacagcatgcgcatgacatgctattggtgaaaaatccaaagacagttccatatcgagctactacttatggagtgttggttgagagcacgtccttgtggaagatgcatgatctgcacagcaatgaagcaaatgctgaagatggtgtgaggcttattcccagtggaacacaaattgttctttctgtgaagtcacagcaacatgcgatgcaatgtgatgcgctggcagatgaaataagattgatagtcatcgtgaaacaaagattgagataaaagcaacagctgatgggcatgctcatgctattgtttcatggtgggtgcttcagttggattcttctggatcagtcttttactcaactgctcctagatgggtgagacaatccagtggtgtcgatttaccacaatatgccaatggcacgaaggattggtgtgatcattggaagcagtgtgtttggtttatacaagggacaggggctcctgcaaagaaagatcaaactctttctttgagcgctagccataatcaaactagcatctcatatcagttgaatataaatgatgaaggaagtagaagccccaaaagtaatcatctaacactgttaccagaaagggtagcactttatggtgataaagtttggagatcagcgttgataagtgtaatcaggaattatacgagcgaaagatcctctccgatctgcattgtggctgatgacagcgtgttcctagctctcattgtttcttttctgttaccatcttcaaaagtcctcgctatgtttccatgtcttagagacagtggcctcaactatcttcaagctgttgcagatgcaaataatttatccatggaccggattaaagtgattggtaaaaaggcatcgtcccttactacaaatgacttaaatcatgaaaaggttaatatgttagtgggggaacccttttatcatggaagtgaagggatgctgccatggcaaaatctgcgtttctggaatgaaaggactctgcttgatccgttgctctctgaggatgcattcatcatgccttgtaagggaatattaaggttctgtgccatgtcacttccggacttgtggagaagccgtcgtagccttaaagatgttgagggttttgaccactcagttgttaatgatactttaggggcctgtggtgacctgcctggagagcaacaaggcccttgcctaccttattatgtgtggcaatgcggttataccaagaaattaagtgaagtttactctctcatggatttgaacttttctgagcctatccactcttgttttggtgaaacaaaggttgagtttgcccacgatggaacatgccatgggttcgctgtttggatcgactgggtacttgacaaggaaaattccatagtgataagcaccgggccagagagcagatactggaagcaaggggtgcagctgcttagcacgcctgtacaagtgaacccagcgaattcggtgatgcacgtggaggcgaatttcgatgctgacattggggagctcacgtttaaatccaccacgctctcatgatgccaactgtaatgtgtggacaaccaagcctcatgcgtgtgttgttcttaaaagttagcatttgtcgctgcgttttgttcgtcggagctcctgatgtgagtcaagcactcaagctcatgattacgtgtgtgttctgtcatgctagcacaagcaactgcctcctcggtggagctgttttttcatggtcttgtttgttagcccctcacgtcgtgaggaagatgctctagctgctgtcaagaatcccctaccaaaacagagcctgccagagcatgtctctggccagtctccctcgaccctctttccttattccgtgtgtatatcattttcccaggtcccctctccgcctcttcctcgtcatttttctcaggtccctcttagcacacaagttcaaggagagaatgcaggctccatccatgtcatgggtgctatttaagttaggtttggcctatttttaactaat

SEQ ID NO: 37613 - DNA, 2522 bp, Zea Mays
taaattgagcaagggagagaggggcgaccctgagcctgagctgcacacctcatcatgacagcgcagcgcagcgcagactgtggcagcagagcagagtgtgcgcccagcgtcctcgtggtgagggagcgccagcattgcaagcggctggttctctgctgaaatagaattcaaggcatggccagctcggtaggtgagggtggtggtcaacatcgaatgccctcactcactcacaaacactctggtgctcatcgtctatctgtcgtcagatgctcatcttaaaacctttacatcttgagccgagctgagctgactagcagagggccatcttctactcttctctcccgtctctcccagcccccttgtccaacggttcagcctgctcaattttagtgaccagttacggcaaatgcagccctcggcggacagcaggaagaagaagcggcggcggcggcggcggaggaggctggcggcatgctgctcatcgagacctgctgccggcgccgctcaaggtcagtgtcagtgcggctcctctagccccggtggcggcggcggaagcggcagcctcgtggcaagaacaccgcgcgcgttctctagctgctcaagcgccgccgcctcgtctgcctgcgcgccggcggcggccgtccatctcggcacccagcacaagctgacggcgctcctcgtcgcgctcgcgctcctcctcgtcctccctcgccctcctctcgtggcaggggtcccggtgtcgccccgcaggatggcgaggatccgcagccacgtggagaggatcaacaagacccccgtgcgctccatccgggtaagaacacgacaacagcgcggggaggccgaaccaatcgatcggttattccaacgatccatccatggatgaagcgacaacaactgtgtttttgtttttcgtttttctgtctgtctcccggttgacgaccacgcatacatacatacatgcatggctgatggacggtggggggtcgtcggctatcgtttgtttcagagccaggacggcgacaccatcgactgcgtggcggcgcacgagcagcacggcctggaccacccgctcctcagggcgcacgccgtccagacggagccgcccgaggcgccgaggggcggcggcgcgctctccttcccgtctggctctgcgacgaacgggagcgggagcggcagcggcagcggcgcaggcaaggacagcaggcggggcgcgtggcagacgtggcaccacggcgggcactgtccccggggcacggtggccatccggcggacgagcgccgaggacgtgctgcgcgccggatccgtctcccgcttcggccgcaagaggaggcaccggaaggccgccgccgccgccgccgccgccgccgccgccgcgcgcgcggcctacgcgccggacgtcatcaccggcaacgggcacgagcacgcgatcgcgtacacggcgccgtcgcagcagccggtgtacggcgccaaggccaccatcaacgtgtgggatccggccatccaggagtccaacggcttcagcctctcccagctctgggtcctctccggctccttcaacggctccgacctcaacagcatcgaggcaggatggcagtcaggtcagccctgagctgtacggggacagcaggccgaggctcttcacgtactggacaagcgacgcgtacgaggctactggttgctacaacgcgctgtgcccggggttcgtgcagacgagctcccgcatcgccatcggcgcgtccatctcgccggtgtcgtcggccggcggcgcgcagtacgacatgacgctgctggtgtggaaggacccgaagctgggcaactggtggctcagctacggggaccagctggtggggtactggccggcgcagctgttcacgcacctgtcggaccacgccaccatggtggagtggggcggcgaggtggtggacaccaggcccggcggggcgcacaccgccacgcagatgggctcgggccgcttcgccgccgagggcttcggccgcgccagctacttccgcaacctggagacggtggacgccgacaacagcctggccgaggtggcgctcgacgccatccagacgctggccgaggaccccgcctgctacgacatacgcaaggcctacgacgacgacgacgacgacgacgacgacggccagcactccgcccgcggaggctggggaacccacttctactacggtggcccgggacacaacccggcatgcccctgatggccggatctctgtcctctgatggagttgtgacgatgagcgcgcgcgcggcacctgaccggccgtacgtaccatggatggcatgcatttgatttaacttccgcctatatatgtgtacgtggccaaattttgacgtacgttcgcacgtgcctttgctagtatttcaagctttcgctaattctacctgtaaggacttgcaatatgtaattaactgttgatttatctgttatttcaatcgatcccaaggatcgtcccagatttaattttcctcgaaacatagacaatccatcgatgctgcgt

SEQ ID NO: 37614 - DNA, 538 bp, Zea Mays
ccttggtatttctatcataatccttctttaagtcaataaaaatcatatgtaggtccttttgctccctatactactctatcacttttcttattaagaaaatgacttccatggttaaccttccgcacatgaaaccaaattggttcaaagagatcattgttatttctctctgacgatgctcgaaaactctcttgcatagcttcatagtatagctcatcaacttaattcctcggaaattagaacaattatgaatatctcccttattcttgtagatcggtgccagtgtattcttgtaaaatccatttaaaaagagtgattttgttgtaactcaatagcccaacctagtgattgaacgacattaactaaaacttgaatagtaattaaccaaacaaaggcaagcactaaatatgagtgcacataaattcccagtgtacaacaaaggcaaacgataaagaaaccttaggtacaaaagatgagagaaacaaaagagtttatcggactaatgtgtgcctcacctatgtgtgataggccaatcataaaa

SEQ ID NO: 37615 - DNA, 315 bp, Zea Mays
aaccgaggttcagtatcacagaaacaaaagtttacacttaaatccctaacccctattccgccacctgcgaaggcccggccgccgccgctgggtcttcggcagatggttcgcccaccgccttcgaggcgtcctcacccgttagcccaggggctggcgtggggtctttgccagctccagtcggcgcgagggtcgctgaggggccctcgcccgcatcggatggcggtgccagctccacccccgatgcctggggcagcgtgctattgggcagtgtgctgtccagatcaccaagatcctcaacctcgtcgtcatgcgcca

SEQ ID NO: 37616 - DNA, 681 bp, Zea Mays
agcttgaaaccaaagggggattttggacagtgtcagtttgggttgctagtgtttggacttgttgtgaggacgatggctgatcttgtggccgtgggcataaagaggagggacgccgaagtgggcagccatggattccccatcctccttggtcccaagaggatcaaactagaggacgaggcagagatcccggagccgatggaagaagaggaaccacttgcagacgtggacgcagacgccggtgcagcagcaccggtcgttgtgcaggcgcagccagccgtgtcggtgtcgatgccctcaccgtcaccgctgcagccagctcagggccacgaggaggctgctgtcctccgtgagccgcagcctggcctgcaacaggcggcgccgatggacgtcgaggaggatttccggcagccgcagccgcagcctggcctgcatcctcgcttttggtcaggtctgttctgatggcgggagctcctgtttgtgcaagcgtgcaacaaccaaaaagtggcgcgccactgttccaggcagcctttgtcacctgctagctccgtacacgctggattgaatgtgccgtcgcagtaatgtctagcttcctgcaattggtggtgttgcagtagtcttcggtccttggaacatgtagctttcggagacagagtactgaatagatccactgttaaattacac

SEQ ID NO: 37617 - DNA, 1288 bp, Zea Mays
ctgaacagccccccggtcgctcctcctccctctaccctccagctccagccgccagccgccagccgcccacgcccggagcaccgccgcaacccgcagcgccgctcgcccggaggccggagcaccgccgctctccccgcacggagcaccgccgcgaccacgccgctgtccatccgccgctccgcgctccctccttcgaccttcgccttggttccgacgcggtgaccgtgcgctaaacccttcgaccttcgcccggaggcgggagcgcggcggaccggagtccggagcaaccgtgagacgagcaggggcggccggcgggcgcggatatttgggcgcaacaactttctgcccttccatttctccaactaagaaggaataggatgccaagagagtttctgcaaccccaatgaagatggcaccagctccgcctccggaggggactgcaattctgctaattcgtggagctcaggaataggacgctccgggcgaactgcgaagcagaagcagcgaagagttctatcttaacggtgctgctagttatgcttgggtgttagtgctatggctactcattaccaagctgctaccttgattgcctctccgtcttacccaaatgccattgcttggtcaagtgacaatctcgtggctgtcgcatctggtcatattgtaactattctgaacccagctgcgcttgatggaccccgtggattggttggacttcgtcacagtgacccttttcctataggagtggttaagagagaagatctcttggagccatgtttattgcccacttccttagcgcgtgaaactgaaccatgtgcccgatcgatttcatggtctcaacaaggatttgcacctaactatgggtatacatacctttgacattctaaatgatcttctctaggtgtgtttgctggctgtttgcactgtgaatgatcatgtgaagctttaccgatcaccaatttgggagttatgtgatgaatgggtagaggtcgcagatatatcacagttgctgtttaactattataaaattataaacttcggagaggataatggttctcatttgacttcttcgaagaatacaaattctggggaggcagaagttttaggatctacttgtcgatcggaagaatctctttatttcaggggtcctggacagagaaaaataaagccagcaaggttggcaaagagaggactagaccatccagagaggtgtccgttatgcgatcaggagtctgaaactttggaccacattctggtttcttgtgttttcgcgagggacttttggttcctg

SEQ ID NO: 37618 - DNA, 2388 bp, Zea Mays
ggcgaatccgggccgtccatcacctctaccccgcgcccctccccgccgttaaatcccacgcgtcaaaccgtgtctattcctcgtcagactttcagttcttccaatctcttgcaagcacaactgcacaagggaacaggaggaaaaaagagcgagaactcgcagctgacgcgcacacggcaagccccaatcggagccgcggaccggatcagaactaggtctcgaggcgatggcaagcggaggcgagggcgcagggagcggcgaatcccctcccgccgcctcagtggaggcggcagcggtcgaggcgacgctgcacatccggtgcgcgaacggctccaagttcacggtgcagacggacctgggcgccacggtgggcgcgttcaaggaggtcttatccggtagctgcggcgtgccagcaccgcagcagcgcctgatctacaagggccgcatcctcaaggacgagcaaaccctagacagctatggcgttgagacggatcacacaattcacttggtgcgaggtgtcgccacaccagctgcatccagtgcacctgctgctgccaacccccttgcttcatttactcctagtagtggccctgcaggtggcctgggaggcctatttccaggtgttgatgctccaggaaatgacaggccatcaggtatatttaggccaggatttccagaattagagcaagttgagcaacatttaagccagaatcccaacttgatgagggagataatgaatatgccggcaatgcaaaatctcatgaataaccctgatttaatacgtaatatgatcatgaacaacccacaaatgcgcgagatcatggatcggaatcctgatcttgcccatgtgctcaatgacccaagcgtcctccgccaaacactcgaagctgctaggaaccctgaaatcatgagagagatgatgcggaacacagacagagctatgagcaacattgagtcttctcctgaaggttttaatatgctccgccgcatgtacgaaactgtccaggagccatttctaaatgcaacaacaatgggtggggaaggaagcacagcctcaaatccattttcagctcttctcgggaatcaggggtctagccaacctggtcaaggtcaacctgcaacaaatgctccaactactggttcagaatcgacaactggaaccccagctccaaatactaatccacttccaaatccctggagcaccaatgctgggagtgcacaaggtgcaacacggactcctagtggcaatgcaagaactggtggtgttgggggcactggtgccaccggtggactgggaggattgggttcaccagaattgagtagtttgcttggtggtcttgctggcagtccaagaactggttctgctggtggtttaggaggttcgggttcaccagatttggggagtatgcttggtggttcacctgatgtttctccgttcagtcagatgttgcaaaaccctgcaatgatacagatgatgcagaacattatgtctgacccacagaccatgaaccagttgcttaacctcaacccaaatgcacgcaacctgatggaatcaaacactcatatgagggaaatgtttcaaaatccagaatttcttcgccagctgacatcgcctgagactttgcagcaattactctcatttcagcagactttattaggacagcttggtcaacatcaacctagccagggcgggaacaatgcaggcagtgccacaggtacacggggaaaccctagccttgacaccttgatgagcatgctcagcgggcttggttcgggaggtggtctaggtgttccaaatacctccagcgtgccaccggaggagctctatgccacacagcttactcaactccaagaaatggggtttattgacaccgcggagaacattcaagcactggtcgctactgctgggaatgtacatgctgcggtggaacgccttcttgggaaccttggacagtagctaacccgagcgagccagacactattcgtaaatcttaaaattgtcgcgcatatgcaggagtgttcggcttaatgttcctcaagccccagaatttgaaggcggcggcgtccatagtcccgaaaacaaaataatgaaagagtcaggcagccgtttacttttgtcatacatggtggtcttgtcttttttttttacagcgatgtattttgcaatgttgattggtgtacatacgtatcggtcggatgttacctccctgtagtctgtcttttccaactatcgattcttgatttccaatatactatcaaatcaaattattatctattctaatccaacgggtggtttcctctgcagacttgtgtcaatactgatcgttgtgggcttgtggcattagtactgcagaaacaggtggacatgtatgggatgtgccggacgac

SEQ ID NO: 37619 - DNA, 1337 bp, Zea Mays
ggcgaaattccgacggtttacccgctggatttgtgaggcgatcgcgccatcgggcccaaaggtttctggaggacaattcttcgctgtctagccttcctcaaaagtaaaaagggtaaatgggatcagaagggccttcagttgtcactgtccatgttactggatttaagaagttccatggggttgctgagaacccaaccgagaaaattgtgaccaatcttaaatctttcttggaaaagcgagggttgccaaaaaatcttgtcctcggaagctgcacagttctcgaaacagcaggggaaggggcacttgccacattatataaggttttagagtctgctgttgcagacagaggaactgggtcctcggcacagggacaagtaatttggatccactttggggtcaacagtggcgcaataaggtttgcccttgagaaccaagctgttaatgaggctaccttccggtgtccagatgagctaggatggaaaccacagagggtccctattgtgccctctgatggaagcatctcacggacgagagagactaccctgccagtcaatgaattaaccaagtcactccggaagataggctacgacgtggtgccctccggcgacgccggtcggtttgtatgcaactacgtgtactaccactctcttcggttcgcggagcaacacggcatcaaatccctgttcgtgcatgttcccctcttcttgacgatcgacgaggaggtccagatgcacttcgtcgcttccctccttgaagtcatcgctttctcatccaactaggaacagcagttggaagatcagcgtctggattcctatctcaaggatggatgtaaagctggaatgctgcatgtaggctgaataaggtggtgtggtcattggcgatagatgttaatcttgctccacaggttgtgtttgggaatcgggagggaaaaaaagagaggtcattggcgatagatgatgatcttgctccagagggtgtgtttgggaattgggagggggggaaaagaggaaattgctgcatagagtcagacggtgtatcagcttgtacgccatcaatcaagtgctgtaaacatgcctgggaaataattggggacctggatttgaataagatttgagttgttgggggcggacgcgctacattaagacttgttcggttattcccaatatatatggatcggatgagattggaaaaaattaagaaaaagtttgacttgtttgggattcaaacccatccaattccactcaatccatatggattaggagctaaccgaacaagtccttacgtgatttacgtgcgacgggatagaaatcatgtatgttgacgtggataaatgtgct

SEQ ID NO: 37620 - DNA, 2943 bp, Zea Mays
atggcgaggacgcgctccggaataccagatgagcgaagccactcgacggggataccacaatcccaaaaggctcgccaaaaccccctcggcggttacccttctctcccgatggcaaccgccgccgccgccgccgtggcggcacccgagcagccgcgtcgccggaagccggcgccggggcgtgggggcgtggccctccctgcgggactctcggaagaggaggccagggtgcgggccatcgccgagatcgtctcggcgatgggggagctctcgcggcgcggggaggatgtggaccttaactcgctcaagtctgccgcgtgccggagatacggtctggcgcgggcgcccaagctagtggagatgatcgccgccgtgcccgaggccgaccgtgccacgctgcttccgcggttgcgcgctaagcccgtgcgcacggcgtcgggtatcgccgtcgtcgccgtcatgtcgaagccgcaccgttgcccacacatcgccaccaccgggaacatctgtgtctactgccccggcggtcccgattccgacttcgagtacagcacgcaatcctacacgggatacgagcccaccagcatgcgtgccattcgggcaaggtataatccatatgtgcaagccaggagcaggatagatcagctcaagaggctagggcatagcgtggataaggtcgaattcatcttgatgggtgggactttcatgtccttaccagctgaatatcgtgattatttcatcagaaatcttcatgatgctttatcgggtcacacttctgcaaatgttgaggaggctatttgttattcggaacatagtgctgtcaaatgtattggtatgacgattgagacgagacctgattattgcttggggcctcatctgcgccagatgctatcttatggttgtacccgcttggaaattggtgtccagagtacatatgaggatgttgcccgtgacacaaacagaggacacacagtggctgctgttgctgattgcttctgtttggcaaaagatgctgggtttaaggtggttgcccacatgatgccagatttacctaatgttggagttgaaagagatttggaaagtttcagagaattttttggaagtccagcgttccgggctgatggtctgaagatttatccaacacttgtgattcgtggaactggtctttatgagctctggaaaactggcaggtactcctctaatctagtgtcctgctaaatcttacttacgttcttggggttatttttaaatcttaaggtaagaacttatatactaatgacaagtcaggttgggcaattggtttaaaccgattgttcgggtcggtttgttcgttgttgaaaaacttcagtttgcccaaaacaacaactgatgaaacttaatacctgtgtgggtgtcgcatgccaccgtcgtagtttaaagtgggttggtgcctgatttgatgacaaacggtgcttgctcaccatctacgctgcacttgcagcttgccgcactgcctcccagggcgctcacttcacgctgtcaccacacttgaccgcctactgctcgcctgttgtagctcaacccactcgtcaatcgtctcctcacagcatgcaggcgtcacacgtcccgcttgtcgctgctcgcctgatgccatgacgaccacgccaccgctgcagctgcagctagggatatatgagtgggctactgaggatagggagaggtgagagctgagtgggctatgcacagtctgatacggctgtatccttgggctaaggtgggccaacgagagtgaagggctagaggccatgcgtgcttgatgtattgatgagttacactcgtgaggaatgtgagggagcacttcagtttatatacagttgcttgccccccccccccccctcctctttctgtcaccgaacagcgatcttgccaggaactgaaactgtaaccgaataaaccaacagttcagtttggtttccggttaaaaaatgttcaaccgtaatgacaagggctcacaagtccaggatttacccagtaagatttctgctgcagatatagaaattatccacctgagctgttggtggatattgtggcaagaattctgtctttggtaccaccttggacacgagtgtatcgggtccagagagatattcctatgcctcttgttacttctggtgtcgagaaaggtaaccttcgcgagcttgctttggctcgaatggaagatctgggcttaaaatgccgggacgtcagaacccgtgaggcagggattcaggatatccatcacaagatccggccagatgaagtagagcttgtcagacgtgactatgctgcaaatgagggttgggaaacattcctctcttatgaggatacacgacaggatatcctgatcgggctgttgcgcttgcgtaaatgtggccgtaatgttacatgccctgaacttgtagggaggtgttcaattgtgcgtgagcttcatgtctatggaactgcagtccctgtgcatggccgtgatgtggacaaactgcagcaccagggatacggaactctattaatggaagaagcagaaaggattgctcgaaaggagcaccgatcgaagaaattagctgtcatttcgggggttggtactcgccactactaccgcaagttgggttatgagctagaagggccttacatggttaaatgtttggcgtaatgctatttcattttccgtatcatatagagcagactagtgtttgtaatgtaatatgggtagtcttttttaaaaaaaatgatcgttataccattgttttctaatattgagtagtccagaactccagatgaaaatggagacaactttctatgtatactgaacgatagctaatttgtcgcttatcctcaactttgtgccgtgcagcaactgtgatatgtagtcaggttactccttatttggtgttcaaaacccgttatccatgaatgaaggaaacaatcaattca

SEQ ID NO: 37621 - DNA, 3454 bp, Zea Mays
agtgccagaacaacgagcatcaggcgctgacagatgtgtattatcctgagactttgctcaagcattgttagcatcgggcagatggacgaaggcaggtgccaagtcctctacaatggcatcatcatatgcatccacggttacgagcattggccccgagctcccgggatttgcttcctccaccgggcatctctgccgtgccgagcagctacgtcgcaagcaggcatccgcagaccgcaggaggacagagaacttgtccagcccccgcgacgagtcgagtcggctacttgcgtcgagtcaagcgttcccagggcctccagcaccgagctggacagggagttcatcgccgcctccgccttcgtcacagcatcagttgcctccagcaccagtgccctcgaggcaggcgcacacgtggacgtggctggcgaaccggagtttccgcctcgtgtcaccctcgatggccaccccgacgacgaactcctccatgtcgaaggggcggtggtccggccacttctcgaagagcgtgagcagcagcacggcacggcccagagggtcatcgttgcgcggggacaatcggtcctccaccgtcagtaccagctggactcgtccccgctcgactcctgcaacatcttcgctcctgaaagaccggccgaccgggagatggtcgaggcgtcagccgtcatggtggtgtgggcgtacgacgccgcgtgcgaccgcgtcggcgtgcaggaggtgaagcacgcgtgcgaggtcggatgcagcggtggcgagatgtgccttttcacggacctcctcggcgacttgctctgccgcattcaccgctcgccggactccctcatgttggtcgtggagacaacaatcggcaccaacagcacggagatcgccggaatcgttcgcggctgcgccaagaccgccgtctctgttggcaccacccagcaggccaaagacgaccccatctacaccaaggttggctccatccttggcctccgcgtctcgcccagccactggaggaagggcatggggaagaagctagcggatcgggaggaggacgaggttgtccaagcctcatacacgtacaacatctacaacaactgggctccattggaggatgcactcagactgtttgatagaatgtgcatggagcatgactcgcccaggacaagtgctgtgaaccttgggagctttaatgtgatggttgatgcatactgtcatgctggaagaggtcaatatgcgattaaggtgtttgggaagatgccgagaagaggcctgtgccagatgtactcctccaataatctgattgactggctagggaagaataaacttgttgggaagtctgaaggatggtacatggaggaagctgcaagagctgtattgggtgagtggaataaagcaatcatggccaccacctgtgcaaagtgtgatactgggtgatggtgttcaagtcaggcttccgccttggccaccacctgtttggaaagtatggttgtcaatgaagattactggtccactgagtttcaagttgggtcccaaatggcgagtggaaggattggtctattggaattattgtagtccacaatatacaccagaattgttgggagttcaggcatcggttcaccagatgacagtcaaagtgaccattggacagactatttcatgctcacatctgttgcgcagcggaaagatagctacgatttgccatgatgcaagtattgcccactctgagcatcagtacgttgctactgggatgcctacagaagttgttctggaggttttggttgagaacatgggacttcctggtggttataccccatctttcgattcatctgatttgcgaaggagttgtcagtggtggaataatctggccaagagagtagcaactctggaatttgatcgcactcgaaagtcaatgggagttattgtgaaagcaaactctgggaagaactcactgcttgttaagggagctgtagagaatctgctagagagatgtacctacattcagttgctcgatggatctgttgtgctattggatgatggtgccaaggcactcatattatttacactccatgacatgtctgccagtgccttgagttgtttgggttttgcttacaagtatgaattgtcagctccccgagaagaagtccacaaatcaattgacacatgttatggttgcaacaagagacaacaaagaaacaacagaggccatttgccgtaagattggggttttcagccctatgaaggtcaaactggcatggtccggcatggatcctgccttgcccacctaggaggatgctacagctttgaaggaacgctccctgcacgcgtcggcttggggacaagccgcatttgaagacccggggaatgtcagcactgatgatccacaagagaaggagacgatggagctgaagactgacaaaggcgacgtggcgtgactccagcgtttgaggcgcgacaatatttgtgtgtctgggccagaccgccagagtgggttgtctgatggccgggttgggccgggttgtaagcgctggtttgtaagcgtcgcatataagcgaactcttgggagagggtgaatcatggaacaacagaaagcttacaacaattaccttcgtcgcgtccacttctcctgttcttcttcccaaatccacctcgtccctctagctctctctggttctcccgattggttgctaacagagcatattctcctcgccaagataaagtgctccaagaaccgcctgtacctggttgatctgaacatcgtgcagctagtgtgcttggtggcgtggcacaacgaggagccgtggttgcggcatgcccactttgagcacctgagcttcgacgtgctcgggtggatggcaaggtagcagatacatggttggtggggaagccgaggaagctcctttcctaaggcagcaagcaagtatctcgctggagctcgtccacggtcacctttgcaggctaatcactccactgacgcacagagggcaacgatatttcttgctgctagccgatgactgcatctacttcatgcggttttaggatttccaggattgcccgagagccaaagttagacggatgggttgcaagagctgctatatttgacacccttcgtggcactgttagttccatgcaagtaacggtgattatcttaggccctcttgcacacatctgttgattgccgcaggaaacttgttgttgctgattggatcttgatgattccacggcgattgaggtttggcacagtagcctattattcaatgtgccaagtcttatgtcctgaaactgacaaagtctgaaacgaaaacattgtcaaagataatgctataaattgcaagtactccaaataatctaaccgtctgtaacatctatttctctgaatattagataaccaaagcttcaatcatcatgtctagagactagaggtggtagactcagatcccgttggatgggaattgtgttccag

SEQ ID NO: 37622 - DNA, 221 bp, Zea Mays
gtgccgttcacatgggcagagaggggactgtcgtagtatgcagctgcaagtttctcttgtcattcacgtggctactgagatcgatgtaattgtaataactccccaggtgccacaagtagttggtaaaagtctgacagtgtgactgttaggcttctatggtggatatgtagtctcttcggtcttcacttattcaggcagaggcatttttcagtctgagactc

SEQ ID NO: 37623 - DNA, 2166 bp, Zea Mays
ctcatccactcaatcaagcaatggaccctctgcttcgttttgtttctgtccctctcctttactaggaaggaatgttgtcttggatgagtttggaacccccaaagtggtcaatgatggagttaccattgcccgcgctattgagcttgctgatcccatggagaatgctggtgcttccttgattcgtgaagttgctagcaagacgaatgactcggctggtgatggaaccacaactgcctctgttctcgctagggagatcatcaaattgggcatgttgagcattacttcaggggcaaatccagtgtccgttaagaagggcattgataagactgttcagaaattggtggaggaacttgagaagaaatcaaggccggtcaagggtagtggggatattaaagctgttgctgccatatcagctggaaatgatgaatttgttgggactatgatcgccgaagctattgacaaggttggccctgatggtgtcctctcaattgagtcgtcatcgtcgtttgagaccacagttgaagttgaagaagggatggagcttgacagaggatatatctcccctcagtttgtcactaaccttgaaaaatctattgttgagttcgaaaatgctcggattcttgtcactgatcagaagatatcatcgataaaagaaattattcctctgttggagcagacaacacagttaagagcaccacttcttataattgcagaggatgtaagtggcgaggcgctggcaacattagtcataaacaagcttagaggaattttaaatgtggctgcaatcaaagctcctggttttggtgagaggcgtaaagctcttcttcaggacattgccattgttacaggtgctgaatatcaatccaaagatcttggtctactagttgaggatacaacagtggagcagcttggcatagctcggaaagttacaatctcaagttcctcgacgaccattatagcagatgctgctagcaaagacgatatccaggccagaatcgcgcagctgaagagagagctttctcagacggactcgacgtatgactctgagaagttggcagagagaattgcaaagctttctggtggagttgctgtggttaaggttggagcatcgaccgaggcagagctagaggaccgcaagctccgcatagaggacgcgaagaatgcgacttttgcagcaatagaggaaggtattgttccaggaggcggtgcagcatatgttcatctatcgacattcgtaccggctatcaaggagacgttggatgatcctgaggagcgcctaggtgctgatatcattcagaaggctttggtggcacctgcagcgctgatagcccataatgctggggtggaaggtgaggtgattgtggataaaatccgggaaagcgagtgggagttcggttacaacgccatggcggacaagcacgagaacctggtggaggctggtgtgatcgaccctgccaaagtgactaggtgcgccctgcagaacgctgcctccgtggctggaatggtgctgactacccaagcaatcgttgtggagaagcccaagaaggctccagcagcagctgctgcagcggcaccatagggttctttcaccatgtaataatactttctagtgaaaaacaattttactaggcatggaacaggcacgttagagtgacgaggagaaaaaactatttttgtcatgcgtgggccggaataaattgagtcaggaattgcatggattttgggccaggacgatttgcaaattggttggattagagtgtggatggctgattggacattgtatcctatctgcattctgttcactcagttggctaattcacatttctctccagtccttccctcccttttgtgacgatgcagttttttatcgtctggtaaaatggcaaggcaacaaattcatggtgctgcttctatctccccgtctccatcccgcaccacaggtactatttgctctttcatccgctacgatctggcagcggtttccaatggtacatgacaacaccggcagagcatcgacggatcgcttgtggttgaagggcgaaaaggctttgcttgagttgctgctaggaccttggcaagagtagacaggcaagctgacagaggaggtgaagttggcagcagaagaaccagacacccagttggagttggatcagatgtagcacagca

SEQ ID NO: 37624 - DNA, 8221 bp, Zea Mays
tacatagagcctatccattccaccgagggagaaatggaccaactcataggttttcgatccgacgaccacgtccttcacacggagttgcttcgccttgacgcaccctccgcgatcacgctgcgtgccgcagccagttccctccggaaccgccaccgccgagttttgaggcccaaactctggtgggtttgaggcccaaaccaccaaacctgccgtgagcaccgcacttcgtgcacgtcctccacgatcagacgcgtgtcccgccagtccctgaccacaccggcaacatggtccattccaccacgtcctcgcataagtgtgtgtcacaggtgtcagccaccacgattggtcaattgactgctttgatccgccagtcaagacccatcactcgtcccttcaccgctccgggtccatcagtacgagcccgcatgactttcacctcagtcgtcgaccaccgttcctgtgctccacacctgcacaccacaagtcgaccgacatggttgcacaagcataatctcacactctggactaacatgcaaatacggcgcaaatctatggtgcaatgtggaaaagcgttggtcggtaagggcccgataaaatgagacctcctctcctccgggagagggatagagtgcgtccgtcttcgttccttgccccccttccttcagaagagcgaggccgcggtcgcggaggaggctttacgaacaaacgagccattagtccccaaaagccaacacacaaacccaggcgatagcgagcgcgcccgcgaaggctacgacgcgagagcgcgcgaggtgtggagcccccaatcccggaagcttccttggccgcgcgcagggcgcgggagtgggagctcgccgccggttaccgagccctctccgccgcggatctcccgatctgagacgccactcgtcaattccccgcagggttttgcggtgccagcgacggacatgagcgtggagagcccaggggagctagggttctgaagcgcaccgtggggcacagcgtggcgaacgacggcccccgacatcctgctaggttttccatgggagatgggggagtcgcgtgcgccgtccgctcagtcgagagcttccgtgccggcgccctcgtgaggagaggaggagcgggagaagcgatgccggacaagggggagagggcccatggccaccgccaccagcaccagcactggaagaaccagcagtcggcgacagctgctgacctggaggagggggagctgcttaatggggaggccgggaccaatgggttgcccgagaggagcatgccacctaagaagtggaggaaggtgctggcagcctccgcagctgctgtggaggtggagcctggggagattgtgagtacaaagcaagcagtgccattgaagaaggaaagaagaaacggggacgttgagaaggtagagctgctgccagagaggcagaggaaggaaaagtcttctgggaagagcaccaggaagtctatcaaggatgatgtggagccaggggagattgcactgccaggaaaaaggcgggatgccaagtcccaactggcccatgataacagcaggaggccaagttcgtctgcccagaaaggctccttgcgggattctgatgaagaacctggtgaaattaagccagagagcggcatcagtggcagtgtaaggaagaaccggccaacagagcctcatagcagtaaccacaagcaccacactgacacctctgaccagtcaggatcaaaacatcgcaggaagggagaaggaaagagttcatctgctgccagacatttgtctgggagaattcgtgaggtctcgccaccaacacgggatcggcgtgataagcacgagaggagcccaggcatcttgggccgttttcctcatgaccgttttcgtcatgacaggtatgacaggagcccgagccgcttggagcgttccccacatcgcactcgccactatgatagcagagaccgcagtccatatatttcacctcgacatagagctcgtccgccccaattcagggataacacaccaagtcgtgttgataattcccctcgtgggagggtccagcatgaagatatcagagaccgtagcccatttcgtcatgacaggtcgccttctgaacgttgtcgtcctactgacacgcatgaagcaagcaagaagagcagaagtagcaacaactcagagaagtcacatcacaaaagcaaatcagcgaagcaatcttcaaaaatcaagagtggtagcaatgggaagaatgaggagaaaatctccaaagaaaagcacactgaaagcagtcagtacactgaactgccaccaccacctcctcttcctctaccaccgccaccaccaccgccgccgccaccgccacccctgccgcctgctgtaccacctccattgcctccatcaccagaacctgagccacctggagttctagccgaggatatgatagaagacatggatatctgtgacaccccacctcacactagtgcagtacctgaacccacagaaccaatttgtgatatagggaggtggttttaccttgatcacttcggtatcgagcaaggaccttccaaacttgctgagctgaagaagctggtgcaagatggatatcttctttctgaccatctgataaaacatgctgatagcaaccgatgggtgactgtagagaatgcagcttcaccactggtgccatctgatttcccctctttatattcggacacttcaacacagttggtcaacccaccagaagccccaggaaatttgctcgatgaagctctagaggaggcttctaacttggcatcaggagctgaggataaacaaatggaggaaacgtctgcagaagatagtgaagaattctgcattgatgatagggttgaagcactgatggatggatcaattttggtgcatggccaggagctcgagatcattggagagcttttaggtgcagattttcagcctgctgattggcaaagatggagtcgtcgtgaagattttactaggctcaatgtgcacactgaagtaaacaatgaaatcaatggaggcacagaaaatagagcaacagatgcttatggtcttgtttctgtggagaagaactttcatcataacgctgagtctagcgaatggttttctggtagatggtcttgcaaaggtggtgactggaggagaaatgacgaactaagccaagatactccattcaggaaaaaacttgttctcaatgaagggtatcctctgtgtcaaatgccaaaaggtagctgtgaggatccacgccggccctgcaaggatgagttgtactaccctgtacgtgctaaaaagtatgaactgccattgtgggcattctcattgacagaagaagatattgatagtgttaatgacaccactaaaagcggtgttgtgcctgggaggccaggtcagaccagacagccttctaggggagtgaagggcatgatgctttcagtggttaggataaattctcgtgttgttaaagatcaatcatctgttgaaccccatacaaaacccagaggaactgatcgaccactgtcgaggtcttcacgctcccattcaattggagctgagagaagttctgtccatgaaggttcgtctcatttcaggaagcaccatgaccatgattcacaaagttcgcacaagtccaagcctgttccaaacattccaaaggaccgtgtatgcactgttgatgagctgtcagtttatcggggtgactggtattaccttgatggcactgggcatgagcatggtccattttcttattctgaattgcaagaattagttaaaaatggcactatcattgaacaaagtagtgtgttccgtaagattgataacacatggtttccagttcttaaggatttaaaacctggaagctctgttcccagtgcagcacgaagctcaagttttactgctgctcttatgctcccagaccaatataattttggtgtgaaccaaggatcaggtagcttcaatcagttgcacccccagtttgtgggttatacacgtggtaaattacatgaactagtcatgaaatatttcaagagcagggaacttactttagctataaatgaggtcttggatccctggatctcagcaaagcagccaaaaaaagagtttgaagcatacttctcccacaattcagcatctagaaatttgctgccagaagatggtgggtctgcaaaaaaggcaaagttgctacctgatcagagtgatgaagatattcatttgtcacaagacattcttgccagtcggaaggaggacatctgttttgacgagctatgtgatgcagaaccttctgttgataatgattctctgaatcccggagcaggaaatgaaacctggggtctactaaacggccatgtgttagcaagaatcttccattttatgagggcagatgtgaaagcacttatttcttctgcagctacctgtaggagctggaatgctgctgtgaagtattacagaaacatgtgtagattcattgatctgtcttctgttggccctctttgcactgattctgtgttttgtgatattatggctggttatgagaagcaaaatattaggacccttattttagctggttgttcgaatcttagttcgcatgcccttggcagagtacttgagcagcttccacaaatatcttatgttgacatccatggttgcggtcatctaggggatctgaaaaataaatttcagcatgtaaaatggatcaggagctcattgaatccagaggagtcatatcggaaaattaaaaccttgaagcagataggtgatgggaacaactacgcatccaaagttgcaaggaacttcaccaatcatctggatggttctgatgagcttgatgggtattttgctgatatttcaaatagagagaatgctaacctttcatttggacaaggtttctataaacgatcaaaattgcttgatgctagaaagtcctctgcggttttgtcgagggatgcagaaatgaggcggttgatgcagagacaggcagagaccagttacagaaagatggaagagttcatcataaacagactgagagaaattatgaggagcaacagatttgattttttcattccaaaggtttccaagattgaaggtaggctaaaaaacgggtattatgctcgccatggctttcgtaccatcaagcatgacatccgtaccatgtgccaagatgcattgagatataaagatggcaatgattcgggagatataaagcaaattgttgtctccttcatacagctagcaaagagactagggaacccaaggtacatttctgatagatatggagcaggagcccaggacagcctggacattaatcaatattcatttgatactaaactcaaaaagaagcaaaataaaataagaggagcaaattcattggctgctggagcagataattcatctcgtgcatttgaccttgaaatcaaaagaagcctatctaaattaaagaaaaaggatgtctactctggtagcgaaacatctgatgatgatgatggctactctgaagttgatgaaactgagagcgaaactactgtttctgatactgagagtgaccttgatgtaaattctggagcctgggatttaaaaggaaacagtctaaagttaattgaacctggggaatctgtgaccgatgatcgtatattgggtgcccgcatgacaaaggccagccttgttcctccagttactaggaagtatgaagttatcgaggagtaccttattgtagcagatttggaggaagtacagcgaaaaatgagagttgctttacctgatgactattctgagaagttgctgtcacagaagaatggcaccgaaaacttggaacttccagaggttaaggattatcaaccccgaaaagtagcaggagatgaaattcttgagcaagaagtatatggcatagatccatacacacacaatctactgagtgacattatgcctgctgatcttgagttgtcacctactgacaagcatatctttattgaggagttgcttctgaatacattgaataagcaagttaggcatttcactggttcgggaaatacccctatgacttacaaccttaggcctgtcattgaagagatccaaaggtctgcagaggataatggtgatagacgaacttcaaagatgtgcttggggatgctaaagaccatgagaaatcgctctgaacagaacttcgttgcttatagaaagggtctcggtgttgtttgcaacaaaaaaggtggatttggtgtagatgactttgttgtagagttctttggggaggtttacccttcttggagatggtatgaaaagcaagatggtattaaacatatacaaaacaacagtgaagatcaagctcctgagttttacaacattatgttagaaaggccaaagggagacggagatggatatgacttggtttttgttgatgcgatgcacaaggccaactacgctagtagaatctgccactcctgcaacccaaactgcgaagcaaaagtgacagcagtgaatggtaaataccagattggagtttacacacttcgaccaattgcagaaggcgaggaaatcacttttgattacaattctgtaactgagagcaaagaagagcatgaagcatcagtctgcctctgtggaagtcaagtatgccgtggcagctatttgaatttttctggtgaaggagcctttgagaaggtattaatggaattccatggtgtgctcgataggcatagcctgctgctacaggcttgtgaaacagactctgtctctcaacaagacttaattgacttgggtagagctggtcttggtacctgtttgcttgctggtttgcctggatggcttgttgcttacacagctcacctggtgcggtttatataccttgagagacagaaactccctgatgagatcttaaggcacaatgtggatgagaagcgccagttccttatagaaataaacatggattctgagaagaatgatgctgaggttcaggcagagggagtattaaattcaagattacaacaaatagtgcatacacttgacaaggtgagatatgttatgagatgcatatttggagacccaaagaatgctcctcctcctcttgtaaggttgtctgggaaaagtctggtatctgccatctggaaaggggacagttcaatagttgctgaactcattcagtcgatggaacctcatgttgaagaagaggtacttagtgatctgaaggccaaaatccgtgctcatgatccgtcagagtctgaagatattgagggaggcatccggaattctctcttgtggctgcgtgatgaattgcgaactctttcatgcacttacaagtgccgtcatgatgctgctgcagatttgattcatttgtatgcttatacaaagtgcttcttccgagtccgggattataagacagtaaaatctccaccagttcatatcagtccgcttgacttaggccccaaatatgctgataaactgggaccaggctttcaggagtactgcaagacatacccagaaaattattgcttagcccagcttatctattggtatagccagaattcagaacctgaatctagattaacaagagctagaaaaggttgcatgtcgttgccagatgtctcatccttctatgtgaagtctgcaaaaccatcacaagagcgagcttatggaaacagaactgtgagattcatgttatcgcgcatggaaaagcaggcacaaagaccatggccaaaggataggatatgggtgttcaagagtgatccgagattctttggtagtccaatgatggacaccgtgttgaataattccccgcttgacaaggagatggtgcactggctcaagactagaccaaatgttttcctaggctagtaaaaaaggtttgtaggcagataaggtggtatttggttctttctcctttttggagattttagtctacatgattctttttccgactcacaccttggctacctgatcatggggagtttagcttttagatagcagggtagtctcaccacccccatctgtacattcctctctccctactttccttgtagagatgtatctggttaataactgatagattcgtcattgatttgatgtagtgaattttccccataggaatgctccctcttttgtttcatgtaaatgcagaacaatttcaatcttgaattcagtaatgtgttacaggcatgttgcatttctgtggttcagttcgttgtttcaatcaataaaatgttttaggggcttataggtttcattcataggaaa

SEQ ID NO: 37625 - DNA, 2298 bp, Zea Mays
gtcaagcactactactgtactagatttagtttgtcaatctggacctggatcatggccttctcgtgtttatgctcagactgcaaagtatcccatggcaaacagtgttgctcaggatatgtttggaataattccaggtgatacagattatagaatatttgctgaagacattacaaacattccaggacttgatataatttttgttctcggtggttatttctatcatacttcatatgatacattggagaatctacttcctggaagtattcaagcacgtggtgaaaatttattcaaccttgtgaaggcattcacaaatcctatgttgttaaaagagaacgagatatctaataaagctgctaaggatggaattgaagatgtgggggcggtcttttttgattatttgacttggttcatggtattttattctcgtgatatatctctgattcttcacagtctaccgatagccatttttcttcttgtaccgctgttcctgaagttcccaaacattaccttgatgtcatggtttgtaactctcctaggtttcatgagaggaatggtactccatacgtttggtgtaatccttgcaatatttattcctgctctggctgcagcattaagattattattcacaaagaatgcaatgaattggtttgctcacccttatttggcgttcctaatgtttgtccctacttcattgattggtctattgctgccaaggcttacatgggggctatcggagcaagcacacttttggggtgcttttgggttgtattctttaataactatggtctacacactagctgggctgagtggaggttttctaacatttttcatttccatgtccatgcttcttggacgatttgtctctagaatcattaggaagcagtggagccaacaatcacctaggtcgttggttgcgtatgtgctgcctatgaccccatgtctcctttacggtctttactatggtggattccttatccagttcctgattgaaaagatgggcatgatgggatctcttccaaaaccatatggatattttgtgcctgatgttattgttggagctgtagttggattagtggttggttggtgttttggtcctctatcacctgttgctagtcgttggttgtcgaagacttcaattatccatggcttcctgcaaattacagtggttgctttggctatctcatcccaactgtttccttacagcactggagcaccaaaaagagttgttcttcaacatacttttgttacagatgctaataatatcgtggattcaagctatggtttctctgtggttgattctaactcattggagttccttttcaacaatgcacctgaggccgccaaatggctgaaggataactctgagttgtcctttgaagaaaaatatcggtctgatagaagctcatggttggctttgtatcctgtcccattcttgttctctggaagtttaaaattccaggcacaaactgaagagattaaaaagtactaccagcatttccctcagttagctgttcaggagatctgggataacaatggacagcgaagggtgcatctcaaacttgcacttggttccttatcagaaatttggacctctgtgctcaatattactgggccactatcaaattggtccttcgctgataacatgctcccagctcctcaaactgtaagtggtgggccaccatcatatatttgtcgactcagtggaaagagcgatgtggattggtctttctggttggaggcaaactcttctgaaagtctgagagtcgatgtcgcagtacttgatcagtaccttgttgatagtacaaagaaactcaagagcctcttcccaagttgggcagacttgacagccttcacaacatttttctcaacgtatcatttatgaggaggtcaagtatttgatgttcaacaagtgtaaatcattttctctttgtagccctacgtttcggggctatatgtggttttgtcaccatgatcagctggacctgagccccgaggctggtgtttgtaaaatctttgtaagcgtgccttgatgtattcatgaatcacacaagattgtaagaatctcaagtcagtcataaattttttaccacttagtcattcacgattgacggtatggcatcactgatcattcgtgttctaagtttaaaaattctaaaaagaaatgttgcatcgacatagaagtactgcgtttcattttgtaatcgataccacctgaggtgaaaggttagattttttatctacagttcgcaatcccacttgaaaaaggaacacattatgcaggttcaaggttttggagtg

SEQ ID NO: 37626 - DNA, 632 bp, Zea Mays
ttcaccttgtgcgactacgagagccaaaggccccgagcgcgtccgtccagtccatccaccgcgcgtcacgcacttcgcgccacatcagacactcttctcgtgagcgcgcaccgatagaccgagggacgcgcggaggggagggatgatgtggccgtcgacggcaccgtaactcccattcctgtacccggcgccggcgtcggcgtacgtggcgacgatgtcgccggtgtcgctcatgtccatggcaaacgcgggtacgacgagagatcttggagctctacgcctctacctccccaacgacggctacgactatctggcccacctccgagagttccgcccctccctctcctcaaccggcggtgggggtcctcggccatattcctccctagctgtcgccccgcggtgaaaatcacgcgctgtttcatgtggccgaggtgcctatctcgttcgcgcgtcctgcaggcgtgggagacgagagtttctgcgttcctgccgtcctcccaagaccggaggatccaagtaaaacatcgaatctaacgactgtgatgtaaagtttttgcttttctccagtcctcccaaaaccgtaagatttaaataaaacattgaatctaacggttgtgatgtaaaaagaaaac

SEQ ID NO: 37627 - DNA, 2280 bp, Zea Mays
tttccggcgacaaccctttcgcgcgtactgtcgcatgatactgaccccagaccggcccccatcgagaggtaagccacagtggccgacctcaacagcgaccccccacccgactgccttgagaaagacgcttacctgaccgtccagatcgcgagaaaccttgtcgcgagcgcggccgctgatggtggaagccgagacggagcgacggacgacgacgacgcgaccttatctggtgtcggtcgaccagcagccgtccgcggctccgcccgacgcgatgtccccaaccggcagccgagcgcggattgccgaagcaccacactctcctcgctgattcgtgcggccgccctccgaagctccgcccgacgcgacgccaccactgcttcacgacggcaggtggcggagctcgttgcgcgccgcgcgcgtgcagacgtcggcgaacggggctcccgggacgtccgcgctggccagtcgtgtctggtctatggaagaaatagccgagcgaccagatattagatatccatctattttcctctagtcccctattgaccatgatattcttatgtctcgtttttttgaaaagagatggtgcaatgtgacgaggtgccctccgggttatttcaaggatgaaagcattgataaaattttggtgccaagaatgaagaaaatgccagtaaagatgtttagatccatcagacataccaaggattttgatatgtctctcaactatgacaaagcttatgaactgcctccaggcattccatcacacaagtttgcagagtattctgtatcgggactgacagatgccagtgaaaagtatgcacaccgtaatttatctgcacccatcaaagcaaatctacatttttctttgagcagaagtggaattatcgctcttgatagagcagaagcagtaattgagataactgaatgggttgaagttccaaagaagatattgactccagagagtaacatcaccaatcagaattcatcttctaaagtaggagtagctaatagcacgacagatattaaggaaaatttgagttctggcagtgataataattccagcactcccattaatgggagtaatgttcaagaaattattacagagaaggtgctaaagaaaagaacatttagggttccattgaaggttgtggaaaaaacaactggtggtggaacaattctttcaaaggagttgtattctgaagcaaaaaataggttagaggcactcgataagaaggatgctgagcggaggaaaactgccgaacttaagaataacctagagtcatacgtatattctatgaaggagaaggtgcaggattggttgtacatggacggtgaagatgctcaagctaatgaattcaaagaacgccttggtcaacttaaggccattggtgaaccgattcttttcagattgagtgaattaaaagcccgaccagctgcctgtgaaaatgctcgattgtatcttgatgagctgcaaaagattgtgaacaagtgggagacaaataaacaatggctccccaaaaagagagtagatgaggttgtgagtcaagcagagaaagtgaaagcttggctggaggagaaggaaaacctgcagaaaaatacccctgtctatagctcaccagttttcacatctgaacaagtttatgagaaagttctggacttacaagataaggtctcaagtgtcaacagaattccaaaaccaaaacccaaggccgagaagaaaatagcagaggaagagcctgctagcaaggggaaaaccacatcttcggaatctgcacccaacgagggtgagtacaccgaaacgtctcaggaacctaaggctcgagaaggggatcattcagcatcagccaacagtagtgatttagatcctgaatctcacgacgagttgtgagtagcagaatccatagaaacaggtaggaaagattacgcatatatagtacacaagaaggcagtttgaggataaattttggttgctcaaatttccccaatttttatttgacgaccaaaagatgaggctatgtagtagggtgccgaggaatactagatgctgtagggccgaaatgattttatcggtagtttctgattgctcattgctgtaaggcagctttatattggtgtaagttactcgcctcaaaggcgttattcaggatctagaaacgctttgttgtgctgaactcatttcatttttttgacgagtaacgctatatagattctacgccaagagtattgttgtaatgaattcatttgattttttaaacgagaaattctatatagattttacatcaa

SEQ ID NO: 37628 - DNA, 2231 bp, Zea Mays
aagcatcccacatccagcaagagtccacctcactgcctccgcccgcccctccgccacggcgcccacccaccgccactcccctaaaaccctcaccaccgccacggcgccacccccgctttctagtaccattccctaagcgccgccgctcgcccgcggcggtaccccgtcctcgcgatgtcgtcgacctccggcgctctgccgcagcctcgccgcgggcgtcccggtccctggcccccggcgccgcccccgcagccgcaggcgcagccgctctcctgggctaagcgcacaggtttccagtcccgcgtctccggcgagtcactgccttcgtcttccgcccacaactccggtcaggcccccctccctcgccctgctgaggccccttccgatctggagtcgggcccgccggcccggcccagctccaccctcccggcccctccggccgccgcgggaaatggcgagcggcagcatcccccaccgccgcctcctcaggcgaggacgaggaggagggactccgatagcggaaggccgaatgggcagatagccgcgccttcgcttccgcagctacaggaggaggaggaggcgccggagcggccggctcatgtgaagtacgagctccgtgacactccaggaatatttcctctggtggtatacggattccagcattatatttccatggtcggttcaatcatcctgattcctctcgtgatggtccctgctatgggtggctcggctgatgacatggcggcagtggtatccacagtgttgctcgtcaccggggtgactacattgctgcacatgtttgttggaacgagactgccacttgtgcagggtccatcctttgtatacctggctcctgcgcttgcgatcatcaactcaccagaattatttgggatcaatgataataattttaaacacataatgaagcacctgcagggagctataataattggaggtgcattccaagtgtttttgggatacacaggcctcatgtcactatttcttaggttgataaatccagttgttgtctcgccaacagtggcagctgttgggctttcatttttcagttatggtttcacgaaaattgggacatgtatagagatgggaattctgcagttattgatggtggttatttttgcactttacctccggaaaataaagctatttgggtacagagtgtttcttatttatgcggttcctcttggattaggaatcacatgggctgttgctttcgttctcacagcaactggagtttatagctacaaaggttgtgatgcaaatattcctgcctcaaataatgtatcagccttttgtcggaagcatgtattgaggatgagatcttgccgtgtagacacttcgcatgccttaagatcttcaccctggttcagatttccctatccattgcagtggggaactccagttttttcctggaaaatgggccttgtgatgtgtgttgtatcagttattgcttctgttgattctgtcggttcctaccatgcatcgtctttgtttgtggctacccggccaccaacctctggagttgttagcagaggcattggtgttgagggtgtatctacagtcttggctggcctttgggggacaggagttggttctgcaacaataacagagaatgtacacacaattgctgtgactaaaatgggtagtcgacgagcagttggattcggtgctattttacttatactgctttctattgttggaaaagtcggtgcattcattgcttctattcctgatgttatggttgctgctctcctttgcttcatgtgggctatgctctgtgctcttggcttgtccaatcttcgttacagtgctactggaagctccagaaacagtattatagttgggctggctttattcttgtccctatcagttccttcttacttccagcagtacggtgtacatcctagcgcaaactcatcagtgccaacttactttcaaccatacgttgttgcatctcatggacctgttcacactggatcgggcggggtgaactatgtcctcaacacgatactttcactcaacatggccattgcgtttctggttgctctggtacttgacaacacagtccctggtggtcgtcaagagcggggattgtatgtatggtcagaagcagaggcagcgatgagagaatcgactttcatgaaagactatgaacttcctttcaagatcggacgcccgttcagctctagcggcgaagggtggggcgcagctccggc

SEQ ID NO: 37629 - DNA, 375 bp, Zea Mays
gactgattccccaaacctgctaggattatgtgcaaaagggaacacgacatatgagatgggacacttactggagacaggaatgacgcccgaagagccacccacggcacgcagcggcccacgatggcattgtgcggtctggcgagaaattgccggtgactgccggttcccgcacccaatagaacactcgagcaccttccttggtccctggcgactcctcccaccctcttgcggagcccaaagcaagcccgtggcatgaggtcgagatcggcgaccaaatctcccactcacccacgcccttctctcatttccttctctctggtgaactcgtgggctctcttctcaacgacggtcatagatggggtgagcacgacctag

SEQ ID NO: 37630 - DNA, 3744 bp, Zea Mays
cttttccgtgccgttctggcactgagcacatggccacacccacgctgccgctggcctgctcagcacactagctcacacacactccccggcctcgcccaggccgccgtcctctccatcctcggaagctccagccgccgctaccattaccagtgagttgaggtgctctggtgctgggctgactgtacccgccgctaccattaccacgcgctgcaccgtagcagagcggttccaaccccgtcgaggcaaaaagccctggccgttccctggccccgtgccgccgccgccgcctccgtgcgcccaggcttctttctgtgacttcgctaaaatgggtcatgtcctcatcatcaggaccacactttcaagtcaaaattgaagataccatcttccactattccactttcatgtcaaaactcaagatgacggacatgaggcgtcactctgtggatgtcccgctgtcaagaaccttggtgcagctcaagcgattgagatcgctgcgggatccagcgacaaactcaatgggcaagttcgcatctcctgccgaccacatggtgtgggagactgcttctagcaatggggtggctctggagctcggcaggtcggcacataatcaccaggttgaagaagacgaggacgtgggagccgagcctacaatggggtcggagcggagttttcggggaccaaacgcaaggactgcgtcctacaggagatcttctgctgtcaggatcagaggcttgaacccaccaagaaacaagcaggttcatcgtgtccgccgagacggtcaccgcaagtcagtggactctagccactcgaatcatagttctatccgtcaattggcgaacaatttggtcaacaatgtggatgcagaggaggaagtgaattcttatgaaaggccaaaatttgcaatgccaggtaaatctgacgaagacgaagtgaaaatgccaggccactccaaattcaggagcaagccttcggctgcaatgagccgtgtcgggagcccctgcatgtcagctagcgaggcaagatcagggcatggaaccgaggatacacgactgaggtcaaacgatgtcgtggggtcaaattttagtggctgtggtataagctactgctggtcaggagcgtcaaagtgccgagagctttattctgacagtgatggtccagatcagcctctcttatctacagatgggactgaggcagcgttccaaggcaacgtaccatacactgagacgcccaggtgtctaagccagaaatttcgccctcgttccttcagcgaattggttggactaaacgttgttgcccagtccctcttatattcctgctgcaaaggaaaagttgccccaatgtacctgtttcatggcccccggggcacaggcaagacatccacggcaaggattttcgccgcggctctaaattgcgtgtcccttgaagagcaaaggccatgtgggttctgcaaagagtgtgtcatccttttctctgggaagggtagagatgtgaaagagcttgacgtggcgaaaatgggtcgtttaggtcgagtgaaggcgcttctcaagagcgcatccctcgtaccctactcttcgcgcttcaaggttttcataatagatgaatgccatctcttgcaagaagacgcatggtcagcaatactgaagagccttgacgagccataccggcatacggtatacattatgatcacttctgacatagaaagcctgcctcgcgcttccatcacacgttgccagaagttccattttccgaagataaaggtggcagatattgtatacaggctggagaagatctgtataggagaaggattggaattcgaccatgatgggttgtacttcattgctgcaaagtctagtggttctcttagagattctgaagtaatgcttgaccagctcagtttgcttgggaagaagatcacaatttctcttgtgcatgaacttgtaggatcagtgtctgatgacgagttgattgagttgcttgatctagcattgtcatctgacacaaccaatactgtaagacgagcccgagaacttatggggtcagcaattgatcctctgcagcttgtttctcagctggccaaccttattatggacattctctcaggacgatgtcaatctgctgtcagtgaagtcagcaaaagtttcttgggtagatatgcattatcagaggttggaataaagaaattaagacatgcactgaagatactatcagaaactgaaaaacaattgaggacatcaaggaatcaggctacttgggttacagttgcgcttttgcagtttggcaccaatgaacctaaccttattgctgaaccgaatgatatgcattcacattcagtaactggatatacagatgactgggtttccaaggtgcactcaaacaccaatttttgtcaggcatgtaacagcagcaagtccaactgttctgagagacactgtagacggcttaagcttgagaacatatggaggagagccattggaaagtgtcgatcaagatcagccaaaagtttcctcaggaaagaaggcttcttatcatcggttcatgttaccgaagagctggctatagcagaagttggcttcggacacccagatcacctatcaagagcagagaaaatgcaaagcctaatagagtgctctttacagcacgttcttgggtgcaatgtggagatcagattcaaacttgtaccttgtccagtgagaaaagatgctaggttgaagagacactcgttcagttttctcagttgctctggccggaagcaagagctgtcagattcagtagtgactgatgaagacgaagctgtgaggcctggggcaagggagacaccgcttaaaggctacacctctagccagcaggagtcaccatataccatgcaacgtgtcgattcgaaaccaacagcctatggttgcgaggatgatggtcggagcaccttgacgtcgaacagatccatgacagatgacatgacaaggacgtgcaggtccgagactaactactcaaaggggggtgtgagtgatcagggccgctttggtagcatccaggagcctgacctacagccaagctgcttctcgcgaacactgaggcttcagaagaagctgttgtcttctggcgcagcgcacaccatctgtctgaggatccagccgcataacaagatggaattcctacctaagaaggaatttgatacgtacttctgcgcgtatgagccttacgagcagtgtccaagatcagtttcaagggctacttacagttcaagagatgatgacttgtggagcaagaattcacggttcggttcaaatctactctgctggaaagccccaaaacaacccatgtaacggagagcccagagcactttcacaccagcaagctgctttcttacaagcgtaactgcgacaaccagcaccagcattgctgccggggaaaagtgaaccatggtagcagaacattggcatgctgaaaaacagtgtcaaatcattcagtttttgctaggacatttaccaatttctcccgaagctggaggcatgggcaccacctgtggggacaattttcaaaggaaatcccaggaggggtctttgtttttattgttcttggcaggcagctgaggaactattcatcagtgatgtttcttggatgtgctggtccttcaaaatgctaatgggcagttgtacatgttacgttatatgctactgaactcagaggctataatacactttttttatgtcaacacatagaaattaagatctgcttggttctatgcta

SEQ ID NO: 37631 - DNA, 1029 bp, Zea Mays
aataagctcactcacacacactcgccctgcaaacgagcgagcatcctccatgtccaggccgctctcttccttctgcctccaccggatcaggtccggcggcaccgcgtccaccgccgcgcctccatcgatatgcgccaacaaggacgacggcggcggcggcggcggcggagagagcaggtccctaaaggatggcaagcaaaaggacgagtgggaggaggctaacgagaagggcagcgcagaggccgtcgtcgtggggaggaaggtgatggtggcggcggcggacggcggcggcgaggaggcccgcacggcgctgcagtgggcgctgtcgcacgccgtccggccctgcgacacggtggtcctgctcgacgtcgccagcggcaagaacctacaggctccgtcgcgtgcttgaaaacagagggagatggctcttccttgtttttgttgcgtggtcgtctcgatcaggacgcgatccgagagggagtccgcacctggaggccttgaggagcatctgccaggccaagagaccagaggtgtgcgtggaactttcgctggcggagggcggcaaggaccgggggccggcgatagtggaggcggcgaggaagcagggcgtttcgctcctcgtcgtggggcagaagaagcggtccgtcacgtggcggctgctgtccatgtggatcgccggcgtcaagggcgggggcgggggcggctacaccagcgccgccgactactgcgtgcagcacgcggcgtgcatggcgctggccgtccggcgcaagagccggcgagggggcggctacctcatcaccaccaggcggcagagggatttctggctcctggcttgactatagtggaatagcgaacggagtggctcaggtttataggcatagtatttatgggccgcaaaaataataattaatgcagtagattgctgtgggctgtgttttgttgctgttttagaactgacatgatatcatggattgcgtttttgcaataaaaatcaagcagcataacttggagttgtgtgccatccataag

SEQ ID NO: 37632 - DNA, 1702 bp, Zea Mays
tcatggtgaccatcgccacatctctccgacggttaaatatccctcccagaacgcccatcatctgcggcgtcatccaacatgcaagggaaaacctcgatgatgggctcgaacgcgcgcccccacgcggtgctcatcccgtacccggcgcagggccacgtcacgccgctgctgcagctggccaaggtgctgcactcgaggggcttcttcgtcacctacgtcaactccgagtacaaccaccgccgcctgctccggtcccgcggcgcggactcgctggcgggcctcgacgacttccggttcgagaccatccccgacggcctgcctccgtccggcagcgacgacgacgtcacgcaggacatccccgcgctctgcgagtcgctctcccggagcggcgccgcgccgttccgtgacctcctggcgaggctcaacggcatgccgggccgtcctcctgtcacctgcgtcgtactggacaacttcatgagcttcgcgcagagggtggccagcgagatgggcatcctggcagtcgtgttctgcaccatgagcgcgtgtggcttcatggggtacctccacttcaaggagctcatggacagaggctacgtgccactgaaagatgagagctacctgaccaacgggtacctggacacggtgctcgactgggtgcccgggatgcggggcatccgtctgcgagacatgcccagcttcatccgcacgacggacccggacgagttcatggtccacttcgacagcggggaggcccagaacgcgcgccgcgcgcaggggatcatcgtcaacacgttcgacgcgctggagcaggacgtcgtgggcgcgctgcgcggcgtcttccctcgcgtctacaccatcggcccgcttctcacgttcgccagagacatggtccgtcccgacgcgtccgcgatctgcgggaacctctggaaggaggacccgagctgcctcgggtggctggatgcccaggggcccggctcggtcgtgtacgtcaacttcggcagcatcacggtcatgacgccggctcagctcgccgagttcgcgtgggggctggcgaactgcggcaggccgttcctgtgggtcatcaggccggacctcgtcacgggcgagaaggctatgctgccggaggagttctacgcggagacgagagagagagggctcttcctcagctggtgcccgcaggaacaggtcctgtcgcatccgtccaccgggctgttcctgacgcactctgggtggaactctacgctggagagcatacgcgccggcgtgccgatgatctgctggccgttcttcgcagagcagacgaccaactgccgatatgcctgcgcgaactggggcattggactggagatcgacaacaatgtcacgagggacgaggtggcacggctcatagaagaagccatggacggcgagaaaggcaaagacatgaaggcgaaggcaacagtgtggaaggagaaggccgtggcagcaacagaaagcggcgggacctcgagcgtcagcattgatcgtttggtcgagttcctgcttgaaggaaacgttcctacagctgcaggctaataatatgaacacttcacagtagaaaatatggtgtcgcatgaacatgacaatttcagaattcagagtgaagatgcaagcttgctgtcagtattttcaggtttcagcaacaaacaccacgttaaccgaaaggattacagtagcgtaccag

SEQ ID NO: 37633 - DNA, 1224 bp, Zea Mays
gtaaaattgtatttcctctggctggcgagcggaggacgacggagcagaagcagctggcctcagccgctggacagtgggcctcgactagcagcagataggaaaccgggatagagctgccttccccttccggctccgctcagtcaggcctcagatcggtcgaatccagcaccccctccagatttgcgtcaccaatcttcttcttcttccgccgccgccgccgctcccccacaaggaggcaagagaacgcacgcacaccgaccggaatagccatgatcttctgatccaatccaagatgggcctcaaggagcagcagctagacgccactgaccaaactcgtgatgccgccaactccctcgcttctgtttctgacgagcaccacgagggaccccgtgtctcaagctgcagcaccgacaaggattctggccttccaagttgccgagtctgccattgcgtggaacccgatctaagaggcgagtccgccctcggattcttgggcatcgtgcccccttcccctcccaggactgacactggggggccaaaggatgatgctgccaccagccccaagggggagatattcgtgtgcgctactgacgtcgaattgcagcagcagcaggaccatcttgtggatctagggtgttgttgcaagaacgagcttgcccttgcgcactatgcctgtgcgttgaagtggttcatcagccatggatccaccgcctgcgagatctgtggaactgttgctgcaaatgtaaggcctgacgatttcaacaaggttctcgcgtccctcaaggattaccaagctctcagggaaagtacatccacatactggtggttgcagcagcatagtggtgttgatccagacgctgttgcagcaatacgaagcatactagtgttgtggcaaacacaagatggagtttggagagtactggagtttttattgctatctgcctggttgtcattattcttgcatggttggtcgctccacatgttggcaagaaagctgctgtaatctgtcttcatatgcttcttggaggtctatgcatattgactgtagtaatatccctgagatttgttttcccgagaatccagtatgggtctatgcaatattgggcaatcttgtttgtgtcctggttccttgtgtttggtgtttgggcttcacgaacacgcggcgcgcgttcctcatgatgagatgacctccatccttgggcagatccacacgaatttgagatg

SEQ ID NO: 37634 - DNA, 764 bp, Zea Mays
gtttccgtacgtcctcccagtagcctgcgtctccatttaccatgaatcttcatgaagtctgcatccccctctcccctggccccccaggcgctccgctccaaaacgccgatgcgaccgccgcctcgacgtggctcccccccgcacagatagaaaaggaaatcctagggttacatcatctcggatctgagttcctggtgctatggaggtcgaggatacactaattcagcggttgaggctatgggggttacgatctgagttcctgctgccatggaggtcgacgacatgctaattcagcgcatgaggctctggcggttggtgccctccctttacggccatcccagctgtgatgccctctcctatcgcttccaatgctgcagagctgttccaggccgcaagcgcaaccatgttggcttgcccctttcgaggagctccatgtcctcatcaccaagaactcatcctccctttcggattactcaggtgaggagcatgctatctgctcctctcttctttgattggtgctaattctggtctacaattatcatctcgaatttttttatgaattgagcatcagattagtttatacaatcatggtcaccaagagctcgtcctccctttcggattattcaggatggaagtgtgtcgaatgcttcttcagatactatttcttggtctgttaaatatacttgacccaaatgcaagttttgctcaaatgtgacaaaaaatgattgtcacattaattgtcagcacgcctgcttccagcaaag

SEQ ID NO: 37635 - DNA, 1387 bp, Zea Mays
gggagatatagcacgctacagccgcagcccgcaggcaagcaccgcggtccgtggctaggctacacctacaccagatcttcttagctggggaccaagcaaagcaagcaaggctacccgcaaccgccaactgaccgctgtagcggagacgatggcagccgccgcgccctcctcgtcctcgtcctcgtccgcgcgggcgcgcgcgcgcgcgccgccccggccattgcatcccctcgcccgcggcggccccgagcgcgaagaaatggaggccgtcgcggcgacccaccccggcgcgccaccgatgcggcgcaaggggaggaagcagaagcagcggtgctcactcgtgccgtccggacctactacgcagctgtggcccaggaccgtgctgcggaagtggctcaacataaggtcgccggagtccgacttcagcgccgacgagggcgacaccaccggcgacgacaccgacagcgaggtcgattacgaaggaaaccaattgggggtggttccttgtggccttcgtagaaggcgcaagtcagagacccttcgtgctcagtatattgatgtcagggagctcaggatttgtgctggaacatggaatgttgcaggcagacttccacctaatgacttggatatccaagaatggttggatatggaagagccagctgatatatatgttcttggatttcaagaaattgttccactaaatgctgggaatatatttggcgctgaagacaaccgccctgtagcaatgtgggagcatattattcgtgaaactttgaataagatcagcccagataaacccaaatataaatctcacagtgatcctccttctccgtcaaggttcaagccatctgatgatgcttttgttatggaagatgaacttattagtgagtctgatagtgaaggtgatggggaggtgcacccattgaacgaacaagatttggtcgactctgttgatggcattcatggtaacaaatgtgaacctcaaacaattttacaagatgaagagttcagcaggttgccttcagtgaagacttttgacagatccaataacctaagttttaaagaatctaatttggaagagaagatctgccagaagatattaactaaaacattcagtcactcagagaggcttgggatgatttggcctgaaccaccattggatatgtttgcccagtgtcttccagacagcacaaagccatttgcttcaggaaaggttttaagatcatatttgtctttcaagtcggtaaatggagattctggtccatttgctgaggacaattcagttcctgatttttatatgagctgtgcagcagttaaaagaaaaaggccatactttgtaagaataataagcaagcagatggttggagtgtacctatcaatatgagta

SEQ ID NO: 37636 - DNA, 3089 bp, Zea Mays
caaacgagaaaaaggagaagaaagcaaaacggacgggcgccgccaccacaccacccctcccaacccaccttctgcctggctgccttctgcctccccttcggctccggtccttcctctcaagtcccacacccgtgtcccaccgcaccggccctcaagcagggcagggcagggcagctacctccaagtctccaaccccccaaccccaacagacgggacgccgcctcgtgtccggcacgccgttccctcccgtccccgctccttcccctcgctaaaacccatcgaatcgaccgacgcacgtcctgacactcctgctcccctgtcgccaccgcgtcgcgcgcgggcagaggcctctctcgccatctcgcggccgcggcaccccacagctatcctaccacccgacctcccaccaccgccgccgccgccggcctgctcccaaccacaagtccaggaggacgccccttcgatccgccgcagggaggcaggcgcccgcgcccccgccccccgccaggctccatctccggatccgatcgcccgccggctcggttcaatccgtttacttaattatactgaccttctcatatggcgttggatccgtgatgcctcctccattcctgaagctatttggaattcattgcctgaatcagtgttctgaagtgctatctaacagtcagaaatggatggatccgagcttgaaaatcctacttctagaagctcatcccagaaatctagccgacgttcgagtagtaggcgttctcaaaagtcagctggacagcattctttgaccggtgctcaagagaaaagaagcaaatcgaaatcttcaaggcagaaacacttggttattgacgacaaagaggctaaaaaagggaaaaaacatgaccacaaaattgacgtggcagatgagaggtccaattttctaggttatgaagtgtatgctggaaagctgattcttcaaaagaaaaatagaagtgcgagtgataataatcagttaccgtcaaacggaaaagctgatgcaattgatgctagactcacaagtaaagctctgatctggggcagctctgtactcctactggaggatgttgtctctgtatcatataattctggagtcaaacattttacattgcatgcatactcaactaaaaagtctttatttaaaaagacatgcagagttcagaaagatttctgctttatagcctctacccttgacgaggccattttgtgggtgacatgctttgctgaacaaagtatatatgttaacttactacctcgccttggagcatctagtatcaatcaagactcagaaaatcccctcagtgagtctttatttgaccagccaccgattaaatgcaaatctccgcaaagagtacttgttatattgaaccctcgatctggacatggtagatcaagtaaagttttccatgagaaagctgaacctatatttaagcttgcaggttttcagatggaagttgttaaaactactcatgctgggcatgcaaaatctcttgtatctacatttgatttcagtgcatgccctgatggaatcgtgtgcgtgggtggtgatggaattgtgaatgaggtgctcaatggtcttctcattaggagtgatagagcagaagctgtatcaattccagttggaataattcctgcagggtctgacaactcacttgtctggactgttttgggagttagagatcctatttctgcatcattattaattgttaagggtggtttcacagctctagatatcttggctgtcgagtgggttcaatctgggcaaatacattttggctcaactgtttcatactatggttttgttagtgatgctacttctatgaactggaatatcttccttcgccaaaggagatggccgtgaatggaaaaggtacagatcaagacaaggcccacctgtccaatgtctataccgatgtgatgcacagcagatcaaagaaagaaggaattccaagagcctccagtttgtccagtattgattctattatgactccaagtcggatgtcgcttggggatgttgatacatcaggtagtacagtggcaagcactgaaccatcagactatgtacgtggtctcgatccgaaagcaaaacgcttgtctctgggaagaagtaacattgtttcagaacctgaagaagtgctacaccctcaaccacatcatggatcattctggccaagaaccaggtccaaagcaagggctgatagaaattcagttggtataacgtctactaatgacacacggtcgtcttgggcagccccatcaatgcatgataaggaagacatttcctcaacaatatcagacccaggacctatttgggactgtgaaccaaagtgggacacagggccaaaatgggatagtgagctaacttgggagcctgaccaccccattgaacttcctggaccacaagaggacatgggaattggagcaccgatggaacttgtgccaaatttggatgagaaatgggtagttaggaaagggcactttcttggtgtcctagtatgcaaccattcatgcatgacagtgcaaagtctgagttcacaggttgttgcaccgaaggccatccatgatgacaacagcttggacttacttttagttggtggaaaaggaagatggaaattgctgagatttttcatacttctgcaattcggtcgccatctctctttgccttacgtcgaatatgtaaaggtgaagtcagttaagcttaaacctggtgcaaacactcacaatggctgtggcatagatggcgagctttgccgtgtcaagggacaggtactctgctccctgcttccggagcaatgcagactgattggccggcgatgtagacaatctatttaagcgctgtgttgaatttcatggatcctggggttctttccacttctaacaaatgtttatataactatactttctgatgggattaagcttgggttggtgttgcaaatgttgagagtttgaaccagaagcaatgttgtgaggtttctgtatatttgagcggttataggatgatatgctgattctgtttaattatgttgattttgcttatatatattcaatagagtaatttagtcccacttcggcgtggcggg

SEQ ID NO: 37637 - DNA, 2646 bp, Zea Mays
gtcccctcctcttgagtcttgacgaaagagagacagggaaagagggagaggcaagagtcgcagcctcgcagctctagacccagaccgcctccgcctccgccggtgatcgagtcgcgtcggcgctacattcaagctagaagacaataagcttcggcattcggaagccatgttcggctccaccaatccatttgggcagtcatccacaagcccatttggtaacaacaactcgtttggaactccccagggatttggccagtcttccactgctgccaacaatccctttgccccaaaaccatttggcagcccgaccacgccttttggggcacagactggaagctcgctctttgcaactacatctactggtgccttcggtcagcagcaatccgctcccgcatttggcacaacatccactggtgcctttggtcagcagcaatccactcccacgtttggcaccccatcctcctctcagttcgggagctctacaccagccttcggtgcatcccccactcctgcctttggtgccacatcctctggctcgcagacagcagcaccagcttttggacaacctcagtttgctaatcaagctggaggaaccagaataaaaccttattctcaaacaccagatgttgacagtgctactagtggtactcagcctgctgcaaaacttgattccatatcggcaatgcctgaatacaaagacaagagtcatgaagaattgaggtgggaagactaccagcgtggagataagggtggaccaaacacttctggaactcaagcagtggcacctagctttccgtcactaatacaacagaatgctccaaacccattttcgacaagcaatccattttcaacaaacaatccatttgctcctaagcctgctccaactattacttcaccattcaacacctcatttaacaatgcatcagttacaagttcgagcccattcacatcatcccctagtaccacaatgtttgggcaaacaggtgtttctacactttcagcaagtaattcgccatcattgtttggaaataccaatccagctcctgttacatcatcattatttgccacatcagtgacaaataatccaagtccattcggcactggctcattattcgctaacactcaatcagccccattatttccctcagcatttgctcaaccgacatcaagtacaccggctttctcctctggcagcctatttggctcaactaatccgggcagtctgtttagcagcagcggtccttcacttttttcaacaccaacatttcaaccatcggcccctgctcaaacttcgaacttattctccttccaacctccaattcaaccagcttctacaggtggattccctggtttttccaatactacaaaccaagccttgatgggacagccaactcctaccctgtccagtatggtcatgcagcctgctcctgtttcaaatccatttgggatgcttccagcaatgcctcacatgtccattggaaatggtggatcttcaccttcagttcaatatggaatatcaagtttgccggttgtggagaagcttcttccaagtagatcattgtccatggcgtttcctaggcatttggcacagagaaggataaaactgctgccgagaaaatataatccaatatctgatggcaaggttccattctttgctgatgatgaagaatctccagcaacaccaaaggcagacgctttttttgtccctagagagaacccaaggaatctggtaattcgtccaattgagcagtggccttcgcggagagaaactgaccgacaattgactgtgaagaatgctactgatttgaacaaatatgaagatgcttccattgaaagtgagcgtggtaagtctgcctctgccatgtcaccaagcagcaggcctcctgcagtggaaaatgacaatcagcatgaggctagggccatggctcaacatgggaatgggaatgctacttcagtcgagaggttattgcctaagcttccacgtgcagattacttcacagagcctagtatagaggagcttgcggccaaagaacgtgcggaggcaggctactgcggtcgagtgagggactttgttgtggggcgacatggctacggcagcatcatttttcttggggagacggacgtgaggtgcctggatctggagtcaatagtggagtttaacaaccgggaggtggttgtttacaaggacgacagcaagaagccccctgtgggtgaggggctgaacaaggctgcggaggtgactctactgaacatcaagtgcgtaaataagaagactggggaggagtactgtgaggggacaagggtggagaggtacagggagatgctgatgaagaaggcggaggagcagggcgcggagtttgtgtcctttgatgctgccaagggagagtggaagttcagggtgaagcatttcagcgcctatgggctcccttgttgttaagtattctgtttgttttgatggagcagtgataactaagttgcacgctttacgctcttgtcaaatagtatcatgcttgattctgttgtgctgctttgtacaatgttgctgctgttaaaatgcttgcaaattgcactgctctgctgctgagaacgtattctaattataagacgttttagtttttctaaacacatgattttttccctaaacac

SEQ ID NO: 37638 - DNA, 450 bp, Zea Mays
gctggagtcatcttccccattgcgagcgcgacgatctcaaccaccaggcgaaaatctcgggttcgctccggtcgagcatatcgaactccgcgctatatagtctgggatccgcgactgtctcacccatctggccggagcattacaagcaccaagtaccgttgtgaggttgctgtttacgccttggaaggaaagaaagtcgtcgcgcccctcgccttgcctccattgccgctcggtgctcgtcgtggggttggggtgcatggttatcgagcgtagatcacgtaccgcctggcccttggtcgccagagtcgacggtatcctgtggattgctcaccggagacccgggttcgtcgcgggttgcaccttgccggggccggggcctctttgccactaaatctgcgaggttacaaaaatcttgaagaccaagctggtacctggaaatctggagtctca

SEQ ID NO: 37639 - DNA, 1207 bp, Zea Mays
gaaacgttcaggcacacgcggcgctgcagtatacaacgaagcgagtgtggaaaagcaaggcagcgcgacgaagcggcgccgccagctccccaaaacctccccagctgccacctcctctgcctccctgcgtcccccgagcaaagcagaacaaggggggaaaaagttgacatacgcttgcagcgatggcctttgccgcccgcgccgcgctcgtgcgcgtcctccctccgcgaccatcgccgacctcccaaccgaagcagctcaagcaaggtctaggcggccgcggcgggtcctcgctcgccgttcgggcgaaggactccgatgacttcggggcccttctgtcggagaagctcgatgcgcaggcgcctgagaagcgggatgggcgggatggttttgggagggaggcgagtagcgtggaggaggagaaggaggtgcagggcgagccggcttcgtggggtgtgctcaaccagatcggcgtcgagttggactctgacaaatcatattctgctctcatatatggcacatctgctcttgttgcaatttggatatcatcaattgtggtttctgcacttgattcagtccctttggttcctcaagtgatggaagttgttggtcttggcttcacaatttggttcacatcgagatacctgatatttaaggagaaccgtgatgaacttttcacgagagtcagctccatcaagaagcaaattttggggtctcatgagaactgagcgtctctcttacgttctgttctgttaactggtgagtgtagggctgcgatgacctaaagtgcgactttctttgcatgctttgcggggcccgctgaggcggctatcaattgtgtgcgttcctctctgacccggacacccggcttctagttggtgctgaaaatgttggtttctgccgccactcaccaatcaagtatgctgtcagcagccctttctctgaatatactaaacaaaacgttccctttagtttgggtcgatacagagtattggtgttctgttgatatgttctgttgttcttggtggtgttctgttctgttcggtcaatgggatttgggatatgctccctggtacagaaaatccacaatcaggctgctcactgaaaggacgtgtagttttcctgttccagctcttacctaccgtttggtgtttgacccttgagattgcagaaagttaaggttaagcaaactgatattttgttctag

SEQ ID NO: 37640 - DNA, 248 bp, Zea Mays
cgtaaccagatcggagagaagcgagagaggagagaactctggcggccgccgcactcgactccccacctccgctgacggtcggtggtcggagaagggtcgtgagggctcaccatcgtgcaaggatcgggcagacgcggttcatcgggcgcagacatcgtctggtgtgggtgaaatcgcccgccggacttcggctctcacggccgagccaccgcgcagcgaggacgaacttcctcggagcctaatcgacg

SEQ ID NO: 37641 - DNA, 1222 bp, Zea Mays
tagcaatacgccaacaccagaatatatatgcataccatttaggtatagagctaacaatgatgaaacctctggtgacaaaactaagaaagtcgtggaagttctcatgataaattcccagagcggacctggtcttttgtttccaaaggtactgtactgtaaacatctccatctgaaatacacatgcaacaattagaaagtggacatagccttttgtttccaaaggtattactgttaacatcttcctctgaaatccattgctagttgtttacatggatgacaacttttattgcatacttattctgtttctgtgttttcacataactacatcggaaccattatataccctatagcagtgcatattattatttcaattagttcccaagtgccagtgtgtcttaagtcagcaatccaggaaatccagatgaagtaactggaatgtctgagttgccgatctggattccttgggctgtttatgggcttgtttgcaagcttagttattttcataaacctgttgtaaatgtcactgggatgccatgtagagatttttttatgtttgttttcttgttgcagggaggatgggaaaatgatgaaactgttgaagaggcagcagctcgagaagctatagaagaagccggagttcgaggtgatatagtgcattttctggggtcgtatgacttcaaaagcaagacacatcaagatgcgtgctgccctgagggtatgtgcagggctgcagtgtttgcgctgcatgtaaaggaagaggccttgctcacaggcttctctgactggcacgacaagtggagcataggtgacggcggtggcggcggtgccaactgtgtgacccggcctaactgctgatgaacccatctgcagtcgtccaatttgtccatcctcccccatttcccctaggctccgacattgcgtaacgcaataaatacagtgtacttctctcgatgctgggttggtcattgacccttggatggttatcttagttattagtgggacgaggtatatagtatttatatctgatgaagacgagaattctcacaacttttaagtgtcgattctcgtgcctgtttatttctcggtttcaggtcagctgcagcctgcaggcaggcacgcaccctgcgcactttgtaactctgctcctgattctggagatgcacatcctgtgtatgaactgaactggtataacttgaaaataactgttaagtcaaccatgcat

SEQ ID NO: 37642 - DNA, 5755 bp, Zea Mays
agactaccaccactcgctttcgtctcttccccctcttcccccaccttaccaaggcaccaacctcgctggcatgctcgccgtctctccctctccccctcctcgccttcctctcctcaccttaacccacctctgcgctttccctctcctcccacctcgacgccgcggcctctctcgcctccgcagccaccgcagtggcacccctctcgtcctgctccgcgcgcgcgcagtgcgtcacgctggtatcgtgatcgacatcgacgagatggtcgagaatgaggaccgtgacctacccgtggacgtatcgttcacgaggaggcttcctcccgcgctcactttcggtgacggcctcgacgcactgctgcgggccgccaacgaggtcaaggccaccccgcctgctggcgccaggagcggcgtgatcaggttcgaggtacttgttccacccagtacaaaggcacttaagtggtgctctcagtttagaggatcatcattgtttccccagttttatttatcaagggaactgaggtctgctccatcatgtcaacttgaaatctgtggcattggttccacaatctgctttcatggttcctacctaataaataatgaatttgatttggtatcaagatatatttcttctgattcacacttgataaaggcttatggattcgtagacatgaattatgacaaggaactaccatcaatagaggagaaacttgactcatattacttcttcatccctcaatttgagttgaacgagtttgatagttgttccatattatcatctaccctggtttgggatgattctatttctcatacgttcgaggacgcggtttctttatttaaatcttgttttgatcagatacaaaatagctatgattcttcagctagcatttcttacaaaggcttggtaccaagtcacatttctggagacgcacatttgtcagagactggaaatgctcagttggtgtatgtggatgcagaagtactagcctcaatagatgccaaaggtagtgtgcaaaagaagtttttgatatctgatcggtcatttgttagattttcgccacagttattctattattcaaacatggagttatatttgcaacacaacacgattgaatctttcatcaaagagttgctctaacataaatttggcatgggcatcccttatagttgaagaatgtgttaggctcggtttcacgtacttctgtatagctccagggtcaagatcatccccgcttgcactttctgctacaggccatcctttgacaaaatgcatatcatgttacgatgaacgttcacttggatttcatgctcttggctatgggagaggttctcgaaagccagcagtagtaatcacatcatcaggaaccgctgtatcaaatcttctcccttcggtggttgaggctagtcaagatttcataccaattatattactcacagctgaccgtcctcctgagttgcatgatgctggagctaaccaagccatcaatcaggtcaatcattttggtacctttgtaagatatttttttaacctccctccacctggagaccgaatcaatgcaagaatggtgctcactacacttgattcagcagcctactatgcaatgcaagcaccacaaggccccgtgcatataaactgtgcttttagagaaccactagattacactaatcaacattggaatgttgattgtttgctaggtttggataagtggtttaaaaatagtgaaccatatactaaatacgtaagaatgaaaacagtttctgcattgggtaattactcttgctcagtaatggaggtcctggagatcatagagaaggcagaacaagggcttcttttagtgggtgctattcatacggatgaagatatgtgggctgtagctttactagctaggcacctatcctggccagttgctacagacattctgtctggactgcgattgcggaaagttgtaaattcattaccagggcttgataagagcattttgtttatagaccacattgatcaaattctgttgtctgagtctgctaaaaactggatacgccctgatgtcattgttcagattggtagccgcattactagcaaacgagtgggaatgtttcttgagacttccttcccatcttcctacatattgatcgataggcatccatgtcgtcatgatccttcacatgttgttactcacagaatacaagctaatgtagcagaatttgctgctaggttgtgccggtgtacttttcaaaggaagagaagcagatggacagaatttttgaccattcttaattcagtggtttgtcaggagataatgtttcagatacatgcgaagtgctcacttacagaaccatatgttgctcatgtaattggggagtcactttatggtgatgctgtcatgtttgttgggaacagcatggtcatccgagacttagacatgtttggcaacggttggatggattacactacaaatggaaataatgtgatgacacatcattttccagattttgttggcactgtagtggctgggaacagaggagcaagtggtattgatggtttaatcagcacagcagtcggatttgctgttgggtcaaacaagcatgtattttgtgtggttggtgacatatcttttcttcatgatacaaatggattggcacttctcaatcaaagggcatggcggaaacctatgacaataattgttgtcaacaaccatggtggtgcaatcttcagccttctaccagttgcaaaaactacttcaccacaaattttggagaaattcttctacacctctcatgacatatcaatttccaaactatgtgctgcacacagggtaaaacattttctagttcaaacaaaagcagagcttcatgatgcgttggtgaaatccaatatggaacaggttgattgtgtggtagaaataaacaatagtattgatagcaatgccgagtttcataggttcatgagcatgttctctaactattctacaagtcagtatctgggctatcttctgggagttccacgttttaagaatgaggtagatgccatgcctgttgacagaattgatgcagtggaatacatgttgtacagaatccagctttctgcaccacgtacttcaggactatctgatggtagattcattcatgaaggatttgttctgaagcttcgtgtggaggataacattgtgggatttggtgaggttgcaccaatcgaaattcatgaagaggatctgttggatgtcgaagagcaaattagatatcttctccatagggtgaaagattctgtgctagatattattcccttactgagagggtccttttccaattggatatggacaagcctcggggttcctccttcttcgatattcccaagtgttaaatgcggtttggagatggctattcttaatttacttgcatcacaacggaaatgtagtttgttcaaagttctctctggttgtgacctgttctgccgagacgagaatgtggttgaatataatcagaacagttctgcaagcatacaaatttgtgcactcgtagattgcaatggctctccaatggaagtagcacttggtgtcgccaaactggttgctgaaggttttaccacatttaaactgaaggttgggcgccgtgaaagccccattgaggatgcaactgttcttcataaaataagagaagttgtggggtaccagatcaatatccgtgttgatgcaaatcagaaatggacatatgaacaggcagttgaatttggatccagggtacaaagtcttcatttggaatacattgaggaaccagtgagctctgtatatgatctcatcaagttctgtgaaaagaatgtcttgcctgttgcacttgatgagactattgacaaccttaggggggatgtaatttgtaagcttcatcaatttgttcatccaggaataattgctcttgttataaagcctagtgttgttggaggttttgagaatgcagctcatattgccaaatgggcgcagctacatgataagatggccgtcatcagtagcacgtatgagagttctataggtttggcatcctatatacagttagcacattatgttgaccaacagagctctatagtctccagaataagaaacaaagatacatgtagagccactgcacatggacttggaacatatcagtggttaagggaagatgtatcagaacaaaagttaaagatccatgcatccccacttggtgacggaatccgagccacagtagaagatgcccatggttatcttcaccatttaaacataaacaatgagaagataaaaagtacgtatggtgaagaaaaacataggtcatattctatccaagttgatgtggacgattgttcttatctagtcaaacttcgagaggctggtgatcatacaaatgaaaaggttgtccttttacttcatggatttcttggtacaagtgaagactgggttcccacgatgaaagctcttgcccccagtgcacgggtaattgcaattgatcttcctggtcatggcgagtcacagatactgcaacgtcacaaaaattcagaacaacctgctgtaacagttcaactagttgcagatttgttgttgaagttgatataccacataactaatggtgaggtggtggtggttggctattcaatgggtgcaaggattgcactccacatggcactaaatcaagatcacaagatccgtggagctgttacaatatcaggaagtcctggactgagagatgaagcaagcagaagacgccgtattgctattgataaatcaagagcccagttcctgatgtgttgtggacttgaatgttttcttcagacatggtactctggaaaactgtggaccagtctacgagagcatcctgagtttaattctctggtgaggacacgcagtaaacacaaaaacatcaaagctctagctaaggttcttgcagactcaagcgtggggagacaaaagtcccctgtgggaagacctgaagcacttgaagaggcctttactcgtcgttgctggtgaaaaggacgcaaagttcaaagacatctcgcagaaaatgcgcacggagataatgagccacgcagaatgcggatctgatggtcctaaagggaaggaactttgtgaagtgctcattatcccagatagcggccatgctgtgcatgttgagaaccctcttcctttggtgagagccgtgaggaagttcttactgaagctgtattgaggagaacatctgagtagaaccggtaaatggagcatcatgcaggtatattggtgtcctcacatatgcaggtgaagaaaggtttcaaattcgtgccgcccaagaagaactgaaatttggtctccgtctcgtccaatttgtcgtcgttggatcgttgcagtaactttttcccgtttggccttagtgttaatagcgtggctggtagatccaactggtgatgcctcttacgagggtttttgaaccccaatggactggcttccctttggtgattgtcagggttctgcatttcctagagataaattctcagcatgttcagacctggagtgccgtgccctttgtacaaggattccttttctagagttgtatgaaataaatgctcgctctcgagaagcggatttggtcaaaatctcactccactaccgagctgcggcgattcatcaagaagaccttcgtgccgatccctttgtgtaaataaaagtagcctcatctttctttgtcttgttgggatccgggaaccggccgactgtcgatcaagtgcgctttctgtgcgattcctgactgccaatttaag

SEQ ID NO: 37643 - DNA, 704 bp, Zea Mays
aaaagcttttctcccttgttctcgagctctagtcccagtccactacaaaggtgctggagtcctggtattcttgctggtgtgcatcctctctttcagccaccaattttgctttactccagagctgaatgccaacctcttgtttgtggtgaccaaacccaaccgttcttcacctccccgtggacaaggcttcccacaagtattcttgaccgtgtactacttgttccatgctcgacaaagaattcctagaagaagaagatgaaattcaagaagtggtttcggaagaggagtctgcttcagtgcttgctcatcaagtgatgggagccatctaactgggtatttaatagagggatttggaacctcttcattgcaataaggtgatgaggagtactctaggtgttcctaaggctggagggtgtttccagttctggaggaagattagttaggcttatgtttaagctttggagggttcctaccttcctgatattgtaataagttatgcactttgagtatatcaggacttgtaataaatgtaactgttcctatgtaataaccttccgttttagaaataaaaagaatattttgtaaagtcttccgctattatctccgaagtgtgtgtatcgaatgtgattactgtaatatgcatgtatggtgggagatccttgggatgatgagttcaagttgttgaactcgtgatagccttgtta

SEQ ID NO: 37644 - DNA, 2310 bp, Zea Mays
gcctagtcttgccttctaccaagggtgtgccacacatcaaacaccattgatagatagatactgatgactgcttccttggaacaatctcctatttaaaagctgtgtgcataccaggcactcaggcagcacaaaggtcgacgagttaggaaggatggcctttctggtgccgtttctgctgggtctttcctctgtcctcgccgcgtggatctactctgaattcctgggatacagggcatcatcgtctcatgaaaaagtccactcggatgttcacgtcggcgataaaaccatcaaagaaaatgacagggcggtcctacttgaagaaggtgaatctaaaccgccatcgacaaaggcacccaacatgtctgccagagccaaattaatacggtttattacgttggacgagtcctttcttgttggaaaccgcgccacactgagagccatagctgaattcggcattattcttgtttacttttacacctgtgatcggaccaacatatttgcagagagcaagaagaactacaaccgcgacatgtttctgtttctttacattcttcttgtcgtcgcatcaacgattacctcactcaagaagcaccctgaaaattcagtagtttcaggaaagaccgttttctatcttaatcgcaaccaaactgatgaatggagagggtggatgcaggtcttgtttctgatgtaccactatttcgctgcctcggaaatatacaatgcaatccgtgtgttcattgcttgctatgtctggatgactggatttgggaatttctcatactactacaagaagaaagatttcagtatcgcaagatttgctcagatgatgtggagggtaaatttctttgccatgtcctgttgcatggtccttgacaatgactacatgttgtactatatcgctccgatgcataccctgttcactcttatggtgtatggatcactgtttgttctcaacaagtacaatgagatcccatcagtcatggccattaagatcgcaggctgcctcttgactgtcattctgatatgggaaattcctggtgtgtttgaaattttctgggcaccatttacgtttctgctaggttacaaaaacccagagccttctaagatgaacttacccctgttacacgaatggcgcttccgctctggccttgatcgttacatatggatcattggaatgatttatgcttactttcaccccaacgttgaaagatggatggaaaagctggaagaatctgagactaaggtgagagtgttaatcaagggaaccattgttacagcttccttaatggccggctatctgtggtacgaatatatctacaagctggacaaacatacatataacaagtaccatccctacacgtcgtggattccaataactatctatgtctgcctacgcaattgcacccaacagttgaggagtacccatttgtctctttttgtttggcttggcaaaattacaatggagagttatatttctcagtttcacatttggctcaggtaagtgccggacccagctttttttatataaagaaaggttttattgaaaatcaaaacaattacatcatgatgacacaaccatcctgagctactcctggcagcaaagcaggagttcattaaactgaatctctgaaagaaaaatgttgaaatgttttttgagcttctgctgcgcagtttcagtttcttgcaccaaccaagctgtggtttcttttacaggtctagtattccgaacggacagccaaagttgcttctatctttcttaccagattatccgatgcttaactttttgcttactacgacgatatttctgtcggtatcattccgggtgtttaagctcacaaacgtactgaaagaggcatttatccccaccagggacaacaagtgtctatatcaaaattttattgctggagttgcagtctttgcatgcctatattgcagctcattattcttcaaaacctaccaacagtatagctgatacatagactctaaatcttagctatctcatgtagctcaactcagaaagcacattgtttttcctgggatggagaaattccaagtaattaagtgaacttgttaatttgtttcttttgtatgtatttccaagtaattgcgtgtttttagagacatccatagtcgtgtccttagttttggtggttttaactgcctatgtaaacaaaacaacaagtcttgtaaaatcagttctatagtagtgttctactttagttaagctttactcttacgagttcactatatttccgcttacataatatttcagttgtgtagtgctcatatgaaaatgaatctgaacgagat

SEQ ID NO: 37645 - DNA, 287 bp, Zea Mays
ggattgaccatcaacggtccagatttaaagtgatcccgatccgttcttgtacgcacgatccaagatacacggcccagatctattgcacgaagagttactctcctgcctaatcaccaccgttgattagaatccaacagcagcacgcagtcttccccaatccggtggtcacccatgcggcgcagagcgcaccgcgaaggcatcaccggcgcgttcccaatccagtgcacaggtgccatgaaacccaaatcaaacccggcttaacaaggtggtggctacgacgaacctgc

SEQ ID NO: 37646 - DNA, 3065 bp, Zea Mays
gagcccagtccgcccgggacgcgtcgcgtctacgtgggcacgcggtcagacgtgcagtgcagagaccacgaaacggatcccctcgagtcgagcgaaccgaagccgaacatacccacccatcgtctcgtctcgtcgctcgtgggcgtggcgctctctccccccacctcctcttttaagacgacgccatcgccagccggccctccctcgccgtccggcgccgtcctccttccctctcatcacagtttccacctcgcgaggggctcgcgcgcgtgcccatcccggccgatcgactcacgaattcgcgcgcgatcatattcgtgcaagggcatccccgcacgggcacggccggaagcacggaatcacttccccggccgcccccaattcccgggctcctcggcgccgatccctcgccggtgttcgctttccggcggtttccgctgcgtgtcgcgggcaggcgcaagcggcttggctcggctcggctcggttgtttcctcctcgtgccatccatggaggcgaagcagcgcccgcggcacggcggggagaggaggccgccgccggcgacggacggcggcgaggagtacgacccgtggacggcgtggctctacaagccgcgcaccatctcggtgctcctcgtcggcgcctgccttctcatctgggcaagtggagcacttgatcctgaaggtactgccgctcacagtagcgtgacatcaatcaagaggggtgtctgggctatgattgcagtcttccttgcctactgcacgcttcaggcaccttcaacgatacttattaggccccatcctgctgtctggcgcctggtacatggactggctgtcgtttacctcgttgctcttacctttcttcttttccagaaccgtgacgatgctcgccagttcatgaaacaccttcacccagatcttggagttgaattgccggagagatcttatggagcagattgccgcttgtatgttccagaaaaccctaaaaacaagttcataaatatttatgagacattgtttgatgaatttgttgttgcccatatccttgggtggtggggcaaagctgtaatgatacgaaatcaacttctactttgggtcttgtcgattggctttgagctaatggagctaacgttcagacatatgctgccaaactttaatgagtgctggtgggatagcattatcttggacatattgatctgcaattggtttggtatttgggcaggaatgcacacagtccgtcactttgatggcaaaacttatgaatgggttggactgagccgccaacgaagtatcatgggtgaaaagatcgttgagccagttcactcctgctcaatgggacaaggatcagtggcatcctttcatggggccactgcggttcatccaagtgctgttcctctgcgttgtcttcatgaccgtggagcttaacacattcttccttaagttttgcctttggatccctccaaggaaccccttggtcgtgtacagattgatcctctggtggctgatcgccatcccaaccatccgcgagtacaactcctacctgcaagacaggaaaccggtgaagaaggttggagccttctgttggctctctctagctatatgcatagtggagctgcttatctgcatgaagtttgggcatgggctgtttcatgacccgatgcctacctggctgatcatcttttggagctcggtcgggactgcactcgtgattttcttgctttcgtggtcatggaggagtcaccaaagctggaatgctctggagcggtgacttgcctgatgtagagaccctcaaagagaacatcgttgcttatttcaacatcctacagggatttcttttggtttgccacggaagcatggtcggtgctgggcctactctacacaagtccatctttgggtctgcaaaagacgtggttgactctagcttctcattgttcaagcatgctgtctctgcttatgaatctcgcagctctgaccgcaacacaactataccccaggtcacaggaactgtatgggaagcttgtgctgctctcaagaaggtgcctgcatcaaactgcattgccataggacgagccatgaccaggataggtgtgtgtctgaaagatgttctccgagaaatgaatgagctccctattggtggttctggtgatagtactgctgagaagtcttccaatggtgttgtcgacacaacgagttgttctgatagagatgagaggtctgatcttgatttagatgatgacgacgacgatgagttcactgaagaagaggttgctgttgccaagttggttattaacgtggtatctgattccttggttgtagtgaaagaggcaattcgtttcattactggtttgctcaggagctctggtaacaaagacaaagatggtgctaatgaggacagagttgagccaatggagaaattgctgagccactgcaaggagatcgcagaccaggtcaacgatcttggggcttctgtatacccaccacaagactcgtctgagatggagctcgctataaaaagactgtacaatggcatcaacgggatgcgcaaggaaatagggaacctcggtggcgcacctgagagcacctttgcagcccttgaaggattcgaaaattgccttggatctctgcgggccaggttagctgatgatgtggtgaacgagatggaaggtcttaatattagccattagcacgtactgttcagattttccatagcagtgttgtgccagtatatcttctggttttgcacgatggaaggagcttctgtggtttcagtaaatgaggcgtccggtctctgtactgatggcgttgttgcgggtcatcgattgtaaaggaagtgggcctggatttctgtaacttctctggttagtgatgccactgtttacgggtcattcattgcgcgaataagattgtttgcattatatcgttcgtgccattgcatatatatacctgtttctctcactacaatagagtttagtttatccggtcgtgagataactaaaaggatgtgaaatgactggattgacaagctagatagttgtaattttaagaggagcaaatgtgcttggtttcaca

SEQ ID NO: 37647 - DNA, 1783 bp, Zea Mays
cttcgtccagctgctgcatcaccctgagctgcttctttgcgtggtccgtcctgttcatttgaagatgaactcatccctctgcttgatgtcctagcaaacaaagtgaacgctatcaggaggcttagggaactcttgacaaccaatcttcctacaggcacatttccagtcaaggaagtcatagctgctacaatgataagaagaaagtagaggaaaaggaacagatctcgactgtaattctgcagatgaagcataccaataaaaaggcatatgaccagactctgtaacaatatctgcacatcagtaccttggcagactctccaagcaggtttgtacgatcacatatgtaaaaataaagtagataccctccaaattcggatctgaaaatataattgcaacccagttagcagaatagtgcaactagaaagcttgaatgattggaggagagcaactgtagcttacattgccctcagtgttaaacgattctccagaagcaactggtccatgaatataagtctgttgaacccaacattttctttttgtcagagacacaatgccttcggatactgatattgagaaattgtaaatttataatttatagagaacctgagtatttgtgatgtgagggaagtataagctggctttgcagccattgcttggccaccctcctccaataacattgtctggtcttctgctttgactgaactgtcatccatcactgctagattgacatctgaatgtctactgacaaagatgactgttggttgattcctcactgtgtcttgttgttgtcgtagtttcgttcaatcattaatggcacccattagtcgccaaagatgttgtcctgttacaaatattctgatgttcctgagaattagtaatcgaattacccattggtcgccattgtttgaaatatattctcacaacttctcttactgcttcattgtatgaaatattaagaaacaaactaaatgatagatatttaaatgttccagtttctaattaatatatgtggaatatattctattgttgttagcatgggttaagaccagtgttgtggttgacaccggatttccctctgaacactgatgaactcatccctctgcttgatgtcctagcaaacaaagtgaaggctatctggaggcttagtgaactcttgacaaccaaacttcctacaggcacatttccagtcaagggagatgagctcaccttggcaatggtagttaatcttattaatgcaaacaaggatgattaatttgatgtacttttctatgcctcgtggtgcccattctcacaagaatgcatttgaggaatctgcaattaggccaaggcgtcccacacaggtgtttcttccataagaagactaccgacatgggatacgtctcttcagtttgtttgtcaatattttgtaggaatcagaagaggtgttcaacatgtgggttaattttgttttcaagtgtgctcctctaatgacacccttttcttttttggagtaccttttgataataacaaatttgggttctatttttgtttctagactcaagtctagagttccatgaattaaaatattggtttatttgttgtggccacctatggtctcattatcttctctccacttagttatttgttcctgcaatttgggtttggccagtatcaaatttggtaaggaaggaggcaactagatgcttaccgaatttactctcaattttgctttccttatcgcagttttactttgacatgcactaccattccccctctaatctctaccaaccatatgcaaaattgg

SEQ ID NO: 37648 - DNA, 1896 bp, Zea Mays
gtactaggaatagagaggcgccgccgcatcccattcccattcccattcccatccggtaacggcatcccgcgtccctcggctcggatcgccgccgcccaacggagcaggagcaggagcagcgatccatcctatcctaggagccaaaccctagccagctatggagccgcccgccgcctcctcctcgtctgatccccactccccgtctccgtctccttctccctccgcctccccggccaagcgctccgcctggaagcaccccgcccccaacgacaccgccgtcatggacgccaacaactggcccgcgctctccgacgccgccaagggcaacaagctcccggactcctcggctccatcacctgcgcccgtagccgcaccatcggccgttgccaactcctccagttcgcaaaagcacggcgcccatcacggccgccacaagtccgccaggcgcattggcggtggtggcgaccactctccacgagaccatcctgaccggaacgttgccgctggttgggaccatgctgccggcggtggcgggggcaggggtgcccagaggaaccataataacggaggtggcaggaggggcaatggcgcacctgcctctgccactgggccttctcatcacggttctggtgccggtggcggcagcggcggaggctttggtgctaggcgaagaggggcatacgagccaccattctatcgtggccctccaccaccgatgggcatgggccactacatgagaggtgcgccgccgccaccgcccatgactgtcgcaccaccgttcatgggccctccaccgccaccagtttcgtccatgcgcccgtatgctggaccaatgatgttccatgacatgccatctcccatgtctcctgtatcccccatatacttttatgggccaccaccaccagaggctcttaggggactgcctcttgcgcctcctatggttggcccacctgcttatccatactttcaagcccagcctgaacctgaacctcagcctgatcctgagcctgatgcggaagaggaacgtgtcaagctgctcaagcagatagagttctacttcagcaaggagaacctatgctcagatgtgtacctgaggcagcagatggatggtcagggctgggttgatttatctcttatagctggcttcaaaaaggtccaagggctgaagaaggacctacaatatataaaagagacggtgcagtcctcatctgtactggaaatgaaggataataaaatcaggaagcacggagactgggagaaatgggtgatccctcgcgagagcaatcctgatgccccgtcaagattagcatctgtatcaagacctaatgtcaataacctgacatcacatctaggaggcatgggtctgcatgaatccgctagctctactggcgcagaggagctgaaccatcatgatgtcgtccagaacggatcgccttctggcggaggggtagggcagctggtgaagcagcagagaaggaaggcggtggttacatctggaggcgcctcagatgacatggaagactgaaaaaacaagtctattgaagactgaaaaagaagtcaattgaagactagcgtagcggccctgggcggctttgttttcacaggatggtattctggtgttgcgatgaactagtcttcatcgggatggatgttgtaggaccttcaggttttttttttattttttttatggaggagctgaaagtttctgacttgggagagtgagggagtttgacttgttttgtttttgtggtggcgttaagttaaagtaagaagaagatgttagataatgtttgctccctgttcattctgctgtgctggccttgtatggtattatggtggctgtgaatgatggagactgagattgcgtggtcctgttctgcagcagcagcagaagac

SEQ ID NO: 37649 - DNA, 1262 bp, Zea Mays
gcatttcggtccggcgtgattgaaaccctcgcactgggacccctttatatatataactaacctctcctagggtttacgcgcattgtggctcctcacttctgcgccgccacccactacaggtaaggaagaggaggagggcaggatgtcgcaccgtaagttcgagcacccgaggcacggctcagtcatttcccagggatgaccccaagaagccttgccatctcactgccttccttggctacaaggctggcatgactcacattgtccgtgaggttgagaagccaggatccaaactccataagaaggaaacttgtgaggctgttaccatcattgaaacccctcctcttgtcattgttgggctcgtggcatatgtgaagactcctcgtggcctccgcacactcaactctgtttgggcccaacatcttagcgaagaagtgaggagaaggttctacaagaactggtgcaagagcaagaagaaggctttcacaaagtatgctctcaaatatgaaaatgatgctggcaagaaggaaattcagctgcagcttgagacttcccggctggcgctggaggagatcaagctcaagttcattgacacatcgtccaaatttgggcacggtcgcttccagactaccgatgagaagcagaggttctttggtaagctcaaggcgtaaggtgctgcggtgcagcgaaagtcccatttgtcaaaatcatcaaactgtgaaacctttgtttgttaccttgctgtaccaagttttgtagcaggatgatttgggagcatgttccggtcttcaatggattgttctacgcttcagaactgcagtgactatgttttgtgctattttggttgttttaatgccctaatcactgcaagtgttttggtgtttgatgatcaacataactatttatattaattgtttgctagtgtttaaaaatatagtttggacggtgcaacgtggatttcgatgaagacatcgtggtgatcaagaaaatcatcttaaagtagtacagtagaagatttattgaagacttatgtagatcatgtaagtgtccacacaagacttctcgttggattttggcaaaaaagaaggaaataatagatctatttgggctcgtcgagaaggactacctttcgatgaagtcgtatgcggatggatgttggttagcttctcgttggagttggaaagatgatcagtgtgcggcgacagtaatcgttggatttcggcaaaaaagataataatagatctaaacgggtttgtcgagcagat

SEQ ID NO: 37650 - DNA, 2392 bp, Zea Mays
ctcagatagggcgtggtggtgatttgtgaatgattgcttgccatgtgtgggacaaccagatcctgtgctgcgcccagctcaacaatcccaaattccattactgcccacctgcatcgtcctctctgtaggctgcggtgtttgcatcgtccaaaactccaaatacatacatacaacatgctagcctagtcctcttctagtcgcctctacccagttacttgcatcgccccgtcaagcacgccgccggcacgcggccctcggtctccccgccgcgccctctgcctccgcccgaacaaagccgtctcgccgtcgcgttgccttccttaccgtccaccgcgggcagccgtcctagtactcggttggtcctcccctgctgcccttctacggtggaggagcggagatcctgccgttttccggctgatttcttctaattgcggggcaagttccgtggatagtcaatactgcttgtgctgttgagctaatattaagttcctgctgggagaacttctgcagttcctatggcaaagcctctcaatggcagtggccgtagcatgccaagatcgaatgagggaatgcggctcatattttcggcagttgtaggtgtcatgctgggttacctgtttgggatctccttccctacagtcaacataaccaagcttcacttcccttcgagtatcatctcttatatcgaagataggaactctggcatcacaacccagacattgttgaaccatgcttgggcatctgcaaacaatcataaaaagaatagttctgaatctaacactgatgaaattcccgagatttatgttcctacaaacccaaaaggtgctgagagacttccaccaggcattgtagtgtctgaaacagatctttatccccgaagactatggggtgatcctagtgaggaccttactagcgagccgaggtatcttgttacttttactgttggtattgggcaaaaggcaaatattgatgcagcggtcagaaagttttcagacaaattcaccattatgttgttccattatgatggtcggactacagagtgggatgaatttgagtggtctaaaagagcaatccatgtgagtgccaggaagcagacaaaatggtggtatgcaaaacgatttttgcatcccgatgttgttgccagatatgattacattttcatctgggatgaggatctaggtgtagagcatttcaacgcagagaagtacattgagcttgttagaaagcatgggttggaaatctctcagcctggtttgcaacctgatagaggactaacatggcaaatgactaaacggcgtggtgaccaggaagttcacaaagtaactgaggagagaccaggctggtgcactgatccacatctaccaccatgtgcagcgtagggccaaatgtttgttgtgtatttagttttcattgtctaattatcattttaaaagaagggcaggcctggtcaagtggtgagagctctcacttagtcaccatgtcccaggttcgaagcagcctctccgcatttgcgccgagaaggcttgcctcgatttatcccttctgtagaccccactcatgtttgacctccaacactaggtcttccttttttttaattatcattctaaaagttcgattttgatgtgcagatttgttgagattatggcaacagtgttctccagaaatgcatggcgctgtgtatggcatatgattcagaatgacttggtccatggatggggtcttgactttgctcttagaaaatgtgtggagccggctcatgagaaaattggagttgttgatgctcaatggattgttcatcaatcagttccttcacttggcaaccagggcaagtcagataatggaagaccaccatgggaaggggtaagagcacgctgcagaaaagaatgggggatatttcagacaaggctggctgatgcggagaaggcttattacttggagcgaggcatcacacccccgaactcaacatcagtttagatgaacacatgctcctcagatgccacggcaaggtttctgttgggggaacctgctgcaaactggcatgttcatcgaagctgctgcagcccagggcaaatccatatatttgtacattagaggtcccacgaatcgccatgattaatctttagtgtcgctcacctggttttaatgtcatttcttttgttagtgatactagctgcgatgtaagtaggaggatacagcagagaccgtgatgatacccatttgtgtattaatgacctgatgcaatatggatgttgataatcctttcctcagtttcagcatgtaaattgtttgttctagaccagctgtatgcaactgggtcaaatactacattgatgtaaggcccaaaatttgtataagaaaaaaataataaaataaatatatgaagaaataaaat

SEQ ID NO: 37651 - DNA, 1574 bp, Zea Mays
acgaaacctgtgtgtgaatgtgtgatgagggcaaaaagcaagtaacccatctatctagggttggaagcttgtacatggccacctcggtggttgtggcacgcctcgcgggcgaggcctcgcagcccaaggtcctaccttctgcgaatggagtctcatccgagagctattggcgggtagctgctacgcgccgttggcagggccgcggtgtccggtgctgcgcggccggtttccgcggtgggggcgccgacgccgacgccgtgatcgccagcgaggactttgtggggttctttcgggaggcgtggccgtacatccggggccaccgtgggagcaccttcgtggtggtcatctccagcgaggtcgtgtgcgggccgcacttctaccgcgttctgcaggacatatcacttctccatggtctggggattaaatttgttcttgttccaggaacacatattcaaattgataagctgttgtcagaaagagggaagaaggccaagtatgttggtcagtacagaattactgatgaagatgcaagaaaggctgcaatggatgcagctggtagaatacgattgacaatagaagctaaactttctcctggtcctccaatgttaaatcttcgtaggcatggtgttattggacgctggcatggtcttgtggatagcattgcaagtggcaatttccttggtgctaagagaagaggggtggttaatggtattgactacggattcaccggggaagttacgaaaatagacgtttcacggataagagaaaggcttgatagtgatagcatagttgttatcagcaacatgggcttcagttcatcgggagatgtgttaaattgcaagtatattttcttaattatttttaagttttttcgtatgattgtacaatgtatacatcaaaattgtgtagttgtatgcttgctaccaagtcaagcataatatcatatgaatgcaaataattttcgtaaaacttgttcctttgcatatattgcagctaccatactaaacaaaattgatttgtgttgtttgcaataattcagcacctacgaggttgctactgcatgtgctttagccttggaggcagataaacttatctgcgttgtagatggtcaggtatttgatgatcatggacgggccattcaatacatgtctattgaggaggctgatttgttgattagaaagcgtgctaggcaaagtgatattgctgcaagttatgtcaaggttgtggatgaggaaggcatcaattctttgcataaaggggacgacagaccatcattgagtcccaaggcttacataaatgggtatgctgcttcttttcgaaacggattgggttttaacaatggaaatggtatttattctggcgagcaagggtttgctattggtggtgaagagcggttaagcagatcaaatgctgatccttttaaaaacgggttgggttttaacaatggaaatggtatttactctggtgagcaagggttcgctattggtggtgaagagaggttaagcagatcaaatggctatctttctgagttggtcgcggcagcatatgtgtgccatgtgattatccatttgttc

SEQ ID NO: 37652 - DNA, 1148 bp, Zea Mays
atgggtaatttcctcgcctgcctccgcctgtgcctgcaagtcgtcaactgcctccgcctgcgcgcggcgggcggcatgggagcagagagtatcccaccttcgccaacgtctccggggcccacaccctccttttcctcgctgactccacgcccccgccggccccgccttcgcctcctcccgctcacgggtgctctgctcgccgaggccacaagcgcgttgttccataccaaggcagagaaaagacggaagggcgtgtggatcgagatcaacaacgacggcgacgacaaccagagcgcgaggagcagcaccgtctccaccgccccaccccgcacgccgccattgccagggctcccccaccccacccccgcacgccatgacctccacaaccccacccccgcgcgccatctcgccagggctcccccacccccgcgcgccgtctctcctgcaccagctctccctgcaatccctccagctctccctgtcgtgtcgcctccacagcgcccaccgagaagaggcgcgtttagttttctcagacagtatgacagtggattgggtgtttggcttctctttgcagtagcaattggaggcgaacaggaagacactgtagaggcactctcgcgcgctgttcaacgtagtggcagcagaggtggcatcaaggggcaccgatggcggcaacatgctatcgcagcgtgtggcggagagacagaggtcagacctggcaaacaggacagggaaggggacgtgatctccatgcaagagaacatgtctgccaggacactcacgctctctagctccacgcagcagacaattgtgcggttcgttaagctaccattggttgacaagatcaccgcttggatcttcctggaaaagttattgcgctacagtgcgacgacggccagggccaaggtgctgaaggaggtgaggaacatcgcagtaacgatctccatggagaagggtgcgatggccagaggtaaaaaggaaaacttgatgctgccaggatcgtccatcaagaaggtaccatggtggggtggtggaggtgatatgtcgttggattaaaggagttatctagacttgcagcagtaagtattcaggagcagggcttgacacacgaacatttgatatacaaccttgttggtggctgttctcaa

SEQ ID NO: 37653 - DNA, 911 bp, Zea Mays
cgaccaggcaacctctccaagcttccagatcctcacccccgcccactcggctggaggtccacagtccgatcctcatcccacttgggtgtgccgtccccgcgcacacacacatggatggatatgaagggataggaggcagaggcggcgattgcgaagatggtcgggagcatgcaggcggcggacccagcgggtcggataagcgcactgctcgcgctgcgccaactcctcgccatgctccagtcgctggccctgctcctacccgtccagtggcgcgcgtagcgggggcgttcgatgccgcggcctccgtgctgtgactagcgggaaaaggggaaggcaacggcgtcagtggttctacgtgtgctggtcgggtcgctcatggtcgccgcgcgaagggagatagccacacaccgggcgcaggaggctgggcgagagtacgagctgatccccaggacatgtgccacaatgtggtttaaaggaatggtgagatgaaggaatgctatccttcaaggtccagttcgtgcatatactgtcctgttggcttaatgcagctatgagtattccaccaacgccactaccaagctgcagttgtcgctgcacagcggccccagccgaggtcgcctctgcacccacgaaagatgtttaacaccgctgcaactactagaagctattgcggttctgcgacctgactcgacaccatgtggtttacttttctatgttgttgctgatttctccccttgtatgatggtgtgatttatatgcctaggaaacccttccatataatgcatatagcctatctaatatgttgttgtgtattatagattacctgtatggctaacactgcctcactcttgtgtacagacagcctgactatgccctaacctaaatatgctaagcttacaatgtttatttgc

SEQ ID NO: 37654 - DNA, 2492 bp, Zea Mays
gaactctccttggatgctaagaagaatgcaagcaaaggggctgatatgaaacaatcccatgaaaaatcaaaggataaaaagaagttcaaggattctcgaaaatcaaaggagctcaaggattcaagctggagcaaccagtctctcattcaccaagacagtaccgatgagggaacatcagagacatctcaaatgcttgctgattgtgatgatctgtgttgcaaatgctcgacaagtgaggattacttcaatgaacaagaggaagaacttaggcatagggtacaacttgaagcagaggaaagaaaattggaagaggctctagaatatcaacggtggatagaggaggaagcaaagcagaaacatcttgcagaacaatgtagaagtacacatgcatcttctgttattggcataaagtttggtgactttagctacaccgagaacgagaacaatttcagccagaaactcaatggaatcgagttcgactcatctgatgcacatgcattaaccagcagtgatatgagtgtttctatgttgacgttgaaaatgaatggggtttgcaataatgcacaacctataaagcctcttggtaattttggcacccaaaatcccaagagaagttctagtgaaccacaaaggtattctcaaggtcactctgcaggaatagagaagccaaattttgagaaagtggtgcaataccatcaacggatgtgtgcatcgaggatgattttgataaaaggtttcaagaagatcttgatgaagcagtgcgccaaagccttggatgcgatgcttatcctgctggtacagtaagcacttcaaatgggacagaagtgtatgggactggacttaaaaatgctgctggtgaatacaattgttttttgaatgtgattattcagtcattgtggcatataaggcggtttcgggacgagtttcttaaaacatcattactgcacaagcatgttgaagatccttgtgctgtctgcgctttatatggtatcttcattgacctgagcaaagcatccaagggacaaagagaagctgttgcacctacttcgttgaggattgctttgagcaaatcctacccaaacagcaaattctttcaggagatgaatgatgcatctgaggtactgggtgtaatctttgagtgtttgcataagtcatacacttctcgtactgtctaccatggtgtatcccacgagaaaaattctattggatcatgggattgtgcaaatatttcttgcataacacataatctttttgggatggacgtatatgaacggatgaactgtcacaattgtaagatggagtctaggcagctcaagtatacttcatttttccacaatatcaatgctagttcactccgaactgcgaagatgatgtgtccagattcttcatttgatgaacttttgaaggttgttataatgaatgatcaactagcttgtgatcaagacgttggcggctgtggaacaccgaatcatatagaccacatcctttctaattccccacatgtctttactgttgttttgggatggcagaacaacaaagagagggtggatgacatatctgcaactttggctggtatttcaactgagatagacattagcatattctaccgtggtctagatcaaggaggcaaacacaccctggggtttgttactatggccagcattaccattgttttgccttcaaggatggacggtgggtcatgtatgatgaccagacagtcaaggttattggtagttggggtgatgtgctcgtgatgtgtgaaaagggccatttgcaaccccaagtgcttttctttgaggctgcaaattaattattcttcagagtcgcaaaacgcgctacagcggttaacatgccctcaaatataggttttttccctgcggccatgaagattagaaatagggtagcagattcgttttgagcggggatatatagtactagcattcaacggtgcttttcgttgtgagtccgtaataagcagtcatctgagcattctagagcaaaaaagggagctgtttatcccccccttttttgctttaacctttggtgtaggcgctgaacttctgatctcatctgccaataaatcttcactgccgatcaagcgggtggagcattcgacttgaactgccatccaacagttgtagccgaatctgcatgaactcttcgttatacaccaatcatctatagaattttctgcttacattgggccgggcgggcgttctctctctctctgttttttttttggggtgggggtctggtataggagtgacagttttgaggccaccagatatagaatggaatgatatgggaatgggtgatgcggtgtgaactgtattttgctgtggatgatcttttgaaaagagtaaagctatctggaatatggatatggtaagaaatctgtagtacacgagtctatatatacaatgactcaatgggattatgcgagatgattataacgatgaataccaaaatctttatcacaactgttggttaca

SEQ ID NO: 37655 - DNA, 266 bp, Zea Mays
gggaggagaccttaccagtgattatgccgcagggactcccacccaccacgcagggcggaaccacagcagtgttcacacatcgttgaggaattccggtcgccctggaggttattcctgcccgagaaggtcatgagcactatcctaaagacgtcgcgaatcccctagtttaggatattggggcacgacaccggcgtacaccgtggaccgtacataggggtaccgacctaccaccgcggcgagcgcacttcctcactgtcagtccattc

SEQ ID NO: 37656 - DNA, 2225 bp, Zea Mays
cttttgttgaaacctcgaaatcagtaaaataataaaacttctgctacagcgataccttttgccgtaaaaagtactgcagaggaactcgttaccccatggaatccgacggcgacacgtcgccacctcgcccgcctacgccggcgccagtgcgtgcctgcggcgcgggccacccggcatcgcactcgctgccgacctcggcgggcggccgtgtctgcctctcctgtgtcgtggcgctcctctcctccgcgggcaacgcctccacgccatcccaccacgtcgcgcacgcgctggccaacctctccctggcgctcgccgacccggcattcctcaggccgctccgcgccgcgcacccacacctcctcgcggcgccgctcgccgaggcgctcgagggcgccgccgaacgccgcgatgccgcgctcgccgcgcaggcgtgcgacgtcgcggccgacctcgccgccgtcgtgggcgccccggctgattcagagctcgtcgcccgccttgcccgcgtcctctcctccggctcactcgtcaagcacctccatacgggcatggcccctgaggtggagcgtgtggggcggacccagagtgtcagcgcggaggttgaagtcgttgtagtaccagcattgctccttactttagcaaagaaggagccctttgatcatttgctgatcagcaaccagagttctaacaaatgcatagaagcagagtccatgcagacggattatatgtccctaaatgcttctcttgttctattcgctgaggctgtcaaaggatctctgctatctactaacctagaagttcaggcagggacattggatttgatctttcatttcctgtcatctgatgcaaatatttgtgctctacttcaaactttgatcgatgaaaatgttgctgattacatatttgaggttctcaggttatcagagataccatttcacccagtccagtcccatgttttacgacttgtttggatttgcatggccaattgttctggtatcctctcactgccccaagaagaacagatagcctgtactttgactgcaatcttgagaagaaatctcaatggtgaacttgacatgagttctgaaacttttattctggtttgctcaatattaatagagattctgaagtcacctcatgctcatgatattgagaaactaccatcatttattgaagaagcatcaaaatatgcgatatcttctacattgtcacatgggtatgattctacgatcctcagtactcattctcttcttcttctgaaagaagcacttatattctgccttgaagggagcaaatacaatattgctagaacgaaggatcttgaggatagcatcatgggaacttgtggaacaattttactgcaatggcttgaaagtgctgtggttgacggtaatgatgaagaaacattggctgagatccttcagattttccaaattattttgtcaagggcatctgacaaaaagccattaaaattcgctgaattgctagcatcatcatcatggctctgtgctaacaaccaaattctggcttctgttgagcaatacatcctcctcaatggtgggacctttccatatgaaatcaatggttccattatgcttacgcttctggtccatctttatgccttcatcagaggcctttcccatagctgcagcattccacacagtccagaagccgagaatacactattccacttaatcatacacaaggactgggatttgcttgtgattcgagtccattcggtagcaataaaatggctctttcagaagcaagaaattatggaaccactcgccttccagatgctaaagttttgtagaactttctgtgaagatgaaactgtcatgctttcaaacagcagtcagttggttgacatgcaaatgattgcggagcttgcactttctggagaaaccaccatctcgtctttgctggtgtccttgctagaccagatgctaaaggagggtacagaagatgagttattttcagttgtcagtgttatcgctgaaatcctcatgatctctccatgttcttccgatcaatttatatcatgtggtattatcggttcattccatggcatatattgcttaccatactcttcaaggagcagaacagtttgttcctatttgatctttaacatcttatgctcagcaaatgcatcaacatttggccaggaagatgaatggcttcctcttgttctaaagttattggaatttatcagttcgggtattgat

SEQ ID NO: 37657 - DNA, 3567 bp, Zea Mays
ccgatgcggatgcggatgccgatgccgatgccgaagcgcacctgtctcttctccttgccgaccctccacccccagccgaagtgaggccaccaatcacacagccgctccccccgctcgtcctcctcccctgcccctgcctccgcccccgcccccgcccccgccccgccacgccagcatttggattggattgccggcggccgagtggaggcggagatccatccggactccggtgagtccgttcccgctgccgtgcttgatccaggcacgcatgacatcacatcagttcagctagatgcctgaaggagaagttcagtagcacaccactacctcacaaaacagctcttctgctcgtgcaaaagtatccagggtccagatgggttcagacaagcagattggtagcccacgccaactcttggaaacactaaagatgggcagagttaggactatcctgacacatacatacccgtaccctcacgagcactccaggcatattatgactgcagtgattattgcctgtctcttctttatatcgtctgacaacatgcacacgctcatacataaactggataacaatatcaagtggtggtccatgtatgtttgcctcattggcttcttctatttcttctcatctccttttcttggaaggaccattcagcccagctactcaaattttaaccgctggaacgaggccaggcgtatggacaattctccagaactgtacagtaatcagcattgcatgttgtgtgttctacagtcattgtgggaatcttgctgtgcacaagagcaaatcttttggtagtagttctgatcccaatttgcttgcttttcttaaaaatgaaaacgggagtacctggatatcaaattttctccgtatgaatcagttgaaagatgagatatgttcgtcttggtttgctcctgttggatctgcaagtgactatcctattctggcaaaatgggttatctacggggagttagtttgcagcggatcctgtgctggcccatcggatgaaatctctcctttgtactcattatgggctacatttgttggcctctatatcgctaactttgttgtggagagatcaactgggtgggctcttacccacccgtcaacagatttggaggatgagaaactgaagaggcatatgaaaccagattttctggacatggtaccttggtattcagggacatcagctgatttattcaagacagcatttgatcttatggtctctgtgactctttttgttgggcgatttgacatgcgcatgatgcaggctgcaatgaaaggaccaacaggcaacactccaaatgatgacctattgtatgaccacttcaatgaaagggaagacctttggtttgactttgttgcagacaccggtgatggagggaattcatcatatacagttgcccgactgttagcccaaccatctattaggactgttatcggtggctctatgcatactcttccacgtgggaacttacttattatcggcggagatcttgcgtacccaaacccttcatcatttacatacgagaggcgcttctttaggccttttgagtatgctctgcaacctccaccttggtacagagatgaacatatagctttggataagcctgagcttcctcctggtgtatcaaagatgactgaatatgatggaccacagtgtttcataattcctggaaatcatgactggtttgatgggcttcatacttttatgagatatatatgtcataaaagctggttaggtggatggtttctgcctcagaagaagagttattttgcattgcatcttcccaagggttggtggatatttggtcttgatttatctctccatggcgatgttgatgtataccaattcaagttctttgctgatgtttgtcagaataagctgtgcaggttggagagaatgattctgtgattgtagtaacacatgagccaaactggcttcttgattggtactggaatgagactacaggcaagaatgtatcacacttaattcaggaatacctgaaaggaagatgtaaacttcgcatggcaggggatttacaccattttatgaggcactctgccactcgatcagaaaagaataattttgtgcaacacttgcttgttaatggatgtggtggtgcctttttgcacccaacacatgttttcagaaactttgagaggttctctggaaccacctatgaatgcaaggcagcttatccatcctatgatgagtctactgggattgcattgggtaacatattgaagttccgcaaaaagaattggcagtttgacatcattggcggttttatatacttcattttggtgttttcaatgttcccacagtgtaatcttgttcgtatcttaaatgaagaaacttggtctgggcgtctgaaaagcttctcaggcacaatatggagtgctttgctttatatttttgagcactcttatgtctcttcagtaggaagtcttactttattgacggcgtcatattcattcgtaccatccaaactatcaaggaggagaagagctattataggcggcctccatgttttggcccatttaactgcagcactacttttaatgttgctgctggagttgggcattgaaatttgtattcgtaaccatttattggcaacttcaggttatcacactctgtatgaatggtatcgatccatggaaagtgagcattttccagatcctactggtcttcgtgctcgtttggagcaatggactctgggactgtatccagcatgtataaaatatcttatggcagcctttgacgtccctgaggtcatggctgtgacaagaataaatatatgcaagaacggaatgatgtctctttcgcggagtgttctgatcatgtactacacttctgtgtttatctatttctggattttctcgactccagttgtttctctcatatttggtagttacctatacatctgcatcaattggttccacatacactttgatgaagccttctcgtcgctgcgcatcgcaaactacaaatccttcacaaggttccatgttaagaaggatggtgatctagaaatatttactcttgcagttgacaaggtcccaaaggactggaagttggatccgaggtgggaatcagagggacgagggcctcatcagctcagccatgaccggaagcatccaagcaagtggaggtcagcctcatcaactgaccctgtgagatctgtacgggttgttgatcatttcaccatcgaaagaacaagaaccccagatatggagccctcttcctgattgtgcagcccttactattataaggagttgctactgctgctagaaaaattaacaataactagcttcaacacacagtattgtttttgtttccacatccagccaataggtggaccgaggtgatctgcccttgtcggcgtccccgctttactgacctcacctgcagcattgtaatctgtatagaaagaaaattcacctgctgcctattgcttgtattcaatcaaaggaactctaaaaaaaagagtgttacagaagaatgttttgagaaagcaaagggatgaatcgattcatcatcatttactaaagattgattctat

SEQ ID NO: 37658 - DNA, 2935 bp, Zea Mays
acaatctgaatatctgataattttactcagatttaccatgttgatggcaaatttggcccattcacacttgtatcactgatgggtatgtggagtggggaacacacagagcgttcggaggccacagctaacgagtctgcatcattgaatggcttagtgggtgacatggttgatgatgatgttagccatcagctgcatgcagggattatgaaatcagctcgcagggttttaatcgatgaaatattcagctctatacttccagatttaattgtttccaagaagactgagaagcaacttgctgcaaaacttaagaaccaagttactaagtctggcagtgtgagcaacaagaaggattccacggctaaggtcaaagttaacacattgtctactattccaaaaaaaggaaactcctataatacatcccaggtggattgtttagcggaaattcaatctacagcagtgcatggtaaatttgctgatatagtatcagcagtttggcaaacagtctatcacgaatccatgaataatgtatgggacgaaatactgtctgaacgtgttatggactactgtgatgtatggttacagagaaattgtatattgaatctgccctctacaagtatttccgtcatctctgatgataacataaaagcccaaggcagtcatgaattgtcaccaaaggatttagatgctactgaatgtgacatggactttccacctggatttggaccatgttggaaatctcctgagagctccctctctccatccctattagaagttaatggaagtgctaagttggatgggaagtctgaatcaagtaccacattattttctggccccttagcagtagtccagaggatgctggcaaatgaactatatatctcatcgaagcaatctttatttcactattttgaggaggttattgcagacgatataacaaattgtttatgctttggacttgaaagcaatattgatcaggaacagattggtactcctatacacgcaccagaatcacccatttcagccgaaacgtctatgcatgaaacagccaattccattgagatgactggaggcgatgtactgaatattgttgaaatagccacgtccacaagaaccagtccacttgaaatgactgtagatgaaaagctgaataccgttgaagctacaagaaccagtcgaactgaaccgacttcagttgaaacatcaactgttgctgaaatggcaacagataaaatgaccacttatcatgtggaagagcacttatccatgtcgtatgcaagggtatttgaaaagatgaacatatgtaagacagcagaattggatgagaaatttgatgaagtgcctcctggaatggagactggcttagtccctttaccacttatggacaaaaatatatatcagccttcaaagtcagtgaactctattcctttgatttctagatatataacattggctctctgtcggcaaaaactacatgagaatgtcgtgagagagtggacatatctcttctcagatacaattagcaagtgcttgggctcatggtacaccaggagaaatgctgtacctaaaagcgcagacggatcatcaaaactcaaagaaaaaacatactacaggaagaggaaattcgagaaaacatgtcaagcaaaatcatcaaaaagaccagtggaaatctcaatggacgagcagctttcaaaacctctctgtcagcttgttgaccgcaagatttatgtgaaaaatatccaagaaccaaacaaatctttgacatcaaagagagtttcatttgtggacaagccctccgaaaaaggagccaaaactgtggctaatgatgcttatgatttgaatatccagcaagatctgacactcctttccagtgaggtgccaaaaagacacctacggtgaatgataatgtggcgaataatagtatgctcacgaaacatgtcaagaaaaaaaagggcaggaacatttccagtgagaccagtcagaaggtaaaaccggtgatctcatgcccagaatcagatggttgtgctagagcttccattaatggatgggagtggcgcaattgggcacggaatgctactccgtcggaaagggctcgtgtgagagggtaccatgttcggactattctttctgcctcaaatgataatgtgtggaaaaattctcaagcaaaggtttcatctgcaagaacaaatcgggttaaactgcgaaatctgttagcagccgctgaaggttctgaactgctgaaaattacccaaatgaaggcaaggaaaaagcgtttgcgttttcaaaggagcaagatccatgattggggtctggtcgcacttgagtcgatcgaagcagaagactttgtaatagaatatgttggtcaactgattcaccggcgggtatctgacatacgtgagtctcaatatgagaagagtgggattggaagcagttacctctttcgcttggatgatgattttgtggtcgatgccactaagcgtggtgggttagcaaggttcataaatcattcttgtgagccaaattgctacacaaaggtgatcactgttgatggacagaagaagattttcatttatgcaaagaggcgtatatatgccggtgaggaaatcacatataattacaaatttccattggaggaaaaaaagataccgtgccattgtggttctcggaggtaaatctgttaatcactatacaggaggcagaaggcttttcttttttgtcagctgagacctatttaataagataatgtgttgcaaatggtgttacgggtattaaatttggccacccttgtagtattattgatgttattggcactacttgcatgtctacataataaaaaaatcggagccaacataaaatgattttcgtactaaactgtttataatgcgagattataatcaaagtttttctaggtgctaggcggaatctaggcgatgacccttag

SEQ ID NO: 37659 - DNA, 2073 bp, Zea Mays
gctcgagtgaggaagggagcgatgaggaggaggaggggagcgagggatccggtgacggtgcgaggagcccgggcggctctgccagcaagtataaggcggcggagagtgaagccgaggcggaggacccatgccttcccagctgccccatttgtatggtcgtgtggaccgctgatggtgcgcatcgcgtgagttgcatcccttgtggacatgtctacggcagacattgcttagagatgtggttactgcagtacggcaagaaaaaggcaccgtgtcctcaatgtggcaagagatatacacagaacaacatcatcaacctctatgtaccagagattgttgttcccaataatgatcttgaaaatcaagtattgtccttgagagagagaaatgaatatcttgagaagcaacaagcaaaattacttgaggagataaaagagcataagaggcagattatgttgcaacaaaatgtaatatatgaatcaaacaaaaagagacagagagtggcagagcagtcatcagatggaatactaggggctgagctaattgcctcacatacaaaggacattgaccacagcaatctgtcaagttttgctctccagaatgagtttttggtcgatggagctcgggtcatgggtatagatgcatccagtcaaattatattcacttcgggaagggcacatggagttagtgctgaacacatacttacaaaggttagcatgtttcatggacatggaatggagaaaatccaccttcctcctggtactaaagctattagggatatctgtgtactgcctgggggccatgttgtttttgcatcactgggcaggaagttgtctattttcagtgtggctaccaacaatgttgtccttcaatatgatctgccggctcctggttggtcctgttcaggggattatactacttcaagtcatatttatgctgggttacagaacggcatgctattagtctttgatatccgtcaaacttcagcacctttgcattctagcatgggtctatcaacacacccagttcatacaatacactgcgctgtagatggcagtggttccaggaaggttttttctgcttcttctataggaccctgcgtttgggatgccagcgaaaacaggccgagtttggtaagtgggatggaaaaccaaggggtctgcatatctcttgcgtgcagctctccatcaagtgatgtcctggtggcttcatatcgcccgagagttgagctgccagacgctatcgccacatctcaagcgtctacaccacaatcaccggcacccaccggttcaggaaaactaggatgccacacactccttaggagaaccaccgccacatcctttgccagggaccatatctgcagtggtagcgtaagtgagttgcgaatgtcgaagtctgcaataataccctgcagagacaatcagcatctatttgcctatggagatgaatcgttgtacggagtccggacttggcggctgccttcgtttcagcggtacaccgatctcaagccccacaggcaaccggtccttgatctaaggtatgctgaaagttcaactggggagaggtaccttggttgcttaagtgccgaaaagctacaggttttcacaattaggtagcttgacagaggcattagcttggtttctggaattctggtagttgtgcttgtgcatgctaacatttgtttcttcagcagctttgctgtataagtaaaggccattgtccatccgtacagtcttcacttaaaacagcgtgtaaaaccatgctgtacatttcaaacaatctgttgtaacttgtaagaggctccagcatacaatacaccagcgggtgaaggattgcatatgctgtagtgttgtactgatgcagcattgcattttgtcatgaatcaaggaaacaaatgggtagcaatctgtcacacctttgaagcttcctgctgtgctcactcgctgatgttttcagtttgtaatcgtcattgtacttcactacaaaacgtaacgtaacatcaggcatgcacttcttcgtgtaccttatattcttctttccatgaaattgtactttcatttttcataacataacttg

SEQ ID NO: 37660 - DNA, 2221 bp, Zea Mays
cccccggcccgaacggcagtcccccgcattcccctaacgttcaatcgcgtaccgtcgctcgccgtattcccctgccgcgcacagttcactcgcgcacctctcgccccctcgctctacgacgactagtgggccgccggcgctggcgccgccttacgccaggtgccgaggtcttcgttgatctcttcgccggcgacgagcacccaccagctgggaaaaaatctatagccaaacataataatggctatgattgatgaacctctctacccgattgctgtactgattgatgaactgaaaaatgaagatattcagttgcgccttaactccatcaaaaagctttctacaattgcccgggcattgggtgaagaaagaacaaggaaagagctgattccattccttagtgaaaacaacgatgatgaagatgaggtgcttcttgcaatggcagaagagttgggcgtttttattccttatgttggaggagtagagcatgcacatgttttgcttccaccactggaaacattgtgtactgtggaggagacctgcgtcagagacaaggctgtggaatcactttgtcagataggagcacagatgaaggaaaatgatattgtggactggtttgcccatgtcgtaaagttatgtcaagacgacatgcctatggtacggagagctgctgcatccaatcttgggaagttcgctgcaacagtggaacaaagtcatttgaagacagaaatcatgtcaatgtttgatgatctaactcaagatgaccaagattcagtgcgactattggcagttgagggttgtgctgctcttgggaagttgttggagccccaagattgtgcagcacatattctcccagttattgtaaatttctctcaggataaatcttggcgtgtgcgctatatggtggcaaatcaactgtatgaactatgtgaagctgttggtactgaacccacaaggggtgatctggtgtcagcgtatgttcgccttctctgtgacaatgaggctgaagtgcggattgcagctgctggaaaagttacaaaattctgcaaaatattaaacccacaaattgcaattgaacatattcttccgtgtatcaaggaattatcatcagattcatctcagcatgttcgttcagctttggcatcggttattatgggaatggctcctgtattgggaaaggacgccactcttgaacaactgcttcccatttttctttctttgctgaaggatgagttccctgatgttcgactcaacattataagcaaacttgatcaagttaaccaggttattggaattgacttgttgtcgcaatcacttctgccagccattgtagagctctctgaagataggcactggagagttcggcttgccataattgagtacatacctttgttggccagccagttaggtgttggtttttttgatgacaagttaggggcactttgcatgcagtggttggaagataaggttttctcgatcagagatgctggtgccaataatttaaagcgtttgacagaggaatttggccctgagtgggcgatgcaacatataattcctcaggttttggagaagataaacaacccacattatctgtatcggatgaccactttgcaagctatttctttgctagctcctgtcatgggtcctgatatcacatgccaacagttgctccctgtcgtcattgcttcttcaaaggacagggttccgaacatgaaattcaatgttgctaaagtcctgcaatcacttgtaccaatccttgaccaatctgttgtggagaagacagtgaaaccatgcctagttgagctcagtgaggacccagatgtagatgtaagatactacgcacaccaagcccttcgggcgtgtgaccaaatggtgatatctagttgactagcctgtccaggaattagcaaatgagatacatattggtctattctttttgaacattttaaagtgttatgtagtcttaaaaattattgtaccaccaatgaagttgatgcatctttttattaattatgtgttttttgatttaggtttagtttagtttttggatttaatcaaccatgggaagtaggtgcacacatgatatttgtgtgattgacctgtgcatgtcttgtgctgttggtaggtcactagtgtaagcacattattttatagtctgctttgcttagcgttgtgcgcggaaactgtatgcgttgcttgttcagacatgaagtttgcgcagaaa

SEQ ID NO: 37661 - DNA, 424 bp, Zea Mays
agcaatatcataggcatgactaaatcaatcatgtgtttgtgattaccatgccttatttacatgaacacaaagatactacatagttcaaaaaatatagctcaagcaggaacactcgcaacttttgcaagtgtattgtgttgttttggacttttctataaacatgatataaagtgaaaaaaatcctgaaaaatcaacaatgtgtttgtgattctcgtatcatgataaaatcaaccaacaggtactttctagttagatctcttatcacatgcaagaatactttgggaccttatgtatacatttagggaaggtacattggatccatctaacaagaaagtaaaaactattaatcacaatgcccaaactgatactggtacaatgaaatgaactacataggtaactttgtttaaatgggacagttattgaa

SEQ ID NO: 37662 - DNA, 191 bp, Zea Mays
cttgctgtctcacaccccccataggagaagaacatgtggttcaagaggagccacacaacgaggagtttgatctgatctaggtggcgcctccaagttgactttatggcaccaaggatggactttagtttgttttataattatcttttatcctgtaagacttccgctatgtaataagtactatgattatattg

SEQ ID NO: 37663 - DNA, 2134 bp, Zea Mays
ccaccgcgccgcgtcatcttcttccttcagcgttgagcggaatcgcgaattgaaaacggaagttaccaattcacccgactcgatagacacaccggctctgctctaagcgagaatccgaggagcgctgccaagcgcctccgcgacgggatcgacgcgacttgattcgcgagtttcaacgtcgcgaggagagcagaaaattacgcaggcagagcggctgccggctgggtgttgaagctagagcggctaggagcaggttcggagcgctaccaaacaggcccttaacctaagcgctcctgcccttcggatccggaagttggaggcgcgcgaggaggcgaggcttgcaaggtctcccttgctagacggcaacggggtgacgatggcgcacgagcggggcgccgccgcatccgcccacccagcggctccaacctccgaggaagacgcgctgtttattgatttattacatgaagcgcccctgtctggtcaccgggagcctagaagcatagttggtgggaccttgtactgtatcttattggtaggttttgctgctgttgccatttcagctccatggatatttcttttcgcgccagatatgatctctccattgctatgtagctccaatgctatcctcctcgttcttacaggcatttttcaacaatattgggttcaccaggtcaggaaagtgagattgcagggctattacgattttagccagaaactgaagcgtattgctcgacttccatttgctactattgcttgtgggactgctttgatgctcttaatcatggtctggcaacctcttttacaaatactatcagtttcactgcttctcaggattgccattgtagttgaagtcacgtgtgctggatgttttatgggcttatatttatggcacatccacaaatacaactctttgaatgggcagcctgatattttgcggtcattatattctgcactccaaccatctaatactttggaagatcgaaggttctccgcttgcaagaatgcttaagcaaataccagagaactgctggaaccactcctcaggttgatcttgcccatcttttagcaactcgtgatcaagaactccgagcactcactgctgagatgaatcaagtgcactccgaacttcaacatgcccgtggtttgatcgatgaaaaggattcagagctccagcgtatccgtctgagcaacaaccagtatgttgaagaaaacgataggctcagagctattctcggtgagtggagtgctcgagccgcaaagcttgaacgtgcattggaggcagagcgggtgtcaaacgtcgaattgaggaaaaatattgcaaagtttagaggtcatttgtacaaagagcaggaggcctgacttcggtatgttatagctggttccagaattttacctaagacacctgactaaaggcacaatttttgatatagaagggtatctcggtctggatccattcgaactgagattggcacgtgattgttcgatgacgcatggaatatgcgtctagtggtttgtagaatgcgtagtttgatgtacatgtgttcgtaggtttgagcatgtagagtatggtatccctcgggaaaaaaaaggagtatggtattcatgtggttgaagactgctgagtattgtgaacatggtagtgtcttgtggggtgtggttcgcaggagacaagaggaggaggttgcagcactggtcgttcttgtaggtgtgcggcagataggattatgcgtactaactgaagaggcagctaggcaagaatcttaacacaaacaagaagaacaggatcgcccctccgactctaatcaatagagttcattacagataagcgacgcagtgcgatgaaatgtaccacctacattcacagacccagttgggcgtaccgttgaagcctcatgggccactcgcgcctgaacccagttgccactatagttttcttcttcggatttgtttgttttttcattctattttctattctattctgtgtgactttcttttctttgttgtttagggctcatttgataataattcagattggttcatatcaatgttctctaaaaaaacgttccagatgacgaatcggaattgcttaaccatttgactgtagaattagaatcacttggacccgtttctagca

SEQ ID NO: 37664 - DNA, 1747 bp, Zea Mays
cttcttgcatgcttagtttgcgcttcatatgcttaatcccttgatcataccagttggctgatcatccgtattctgcagaccacggcttgttaatatgtgtaaatacatggggatccaaccttttggcacagaccactacttgcgattcatgcttcggaagaaactacaagacattaagaatgatgataagatgattcaagctgagggtgtggagtctctttctgaatatgagcttcgacaagcatgtcgtgagcgtgggcaccttggtttgttgtcaacagaggagatgcgtcaacagagactggctggatctatcactcaatcattctgtgccatcgtctcttctaatactctcaagagcttttactgtatctggtaaaatgaaacctgaggaggccgttgtagcaaccttatcttccctgccagatgaagttgtcgatacagttgggactgtactgccttctgaagattctgtttcagagaggaagagaaaattggaatttctggagatgcaggaagagcttatcaaggaagaggagaaaaggcaagagaaagatgacaaggcaaaactggaggagccaaaggctactgaagaagatttggctttgaaggaaatgactgagcctactgttagggagaaagaggaactaaagaaagcaaaaacccacgataagaaagagcagctttgtaatatcagtcaagcattggctgtgcttgcatctgtttcttctgttaccaaggagcgacaagagtttttaagccttgtcaacaaggagatagaactatataataacatgctcgcaaaggagggtacagatggtgaagaagaagccaggagagcgtacaaggctgctagggaggaatcagaccatgctgcagaggcagctgtgggagaaaaggtctcttcagctttgattgatagggttgatgctatgcttcaaaagttagaaaaggagattgatgatgttgatgctcgaattggcaatcgctggcagctgctggatagggactgcgatggcaaggtgactcctgaagaggtagctgcagctgcaaattatctcaaagacaccataggagcagaaggcgtccaggagcttatcagcaatctttctaaagacaacgaagggaatatccttgtggaagacattgtgaagctggcgtcacaaacagaggaaaacaacgaagctgaagaaactgcacgatgatttggaatagcagccacattcttggctcttaaaactcgacggtccattccttttttaaaaggaaccgcacataataaagctagttcctggcagtctcatgcaaaaatcaccaagcaggatggtcattctttttgttctgactggcggctgcagagaaaattgtatcctgctgttgaaagatattcatttatacagttaagtcccagcacaaccgatcgttaggttaggaattctgtccgaaatggcaacttgcatttcaaacgtctgccatgaaaatgagaataaattcggcgggctctacagatttttcatctattgtctgaacaaaagtataggcatcaaataagtatctgggtaagtttatactatttgaataagaatcagctggatttgtttaaattcttaacaagaccgttttagcagtttgactatatggtcaatcaaaacactattttgtattgtatattgtactatgtgcacttttgcagtgagatttaaatatgggtatagagatagataagctactagagatagcctaaatg

SEQ ID NO: 37665 - DNA, 2585 bp, Zea Mays
ccaaaaccagcagcacgccgacacgccgccgcgccgcgccgccattctcccatccgcccccgtgcccccgccgcccttccctaacctcgccgcggaagacgtcgcgccgtgcgtagctagcagttccccgtcgcacgcgcgtcggataagaattggttttggctcttcgtctccccccatccttgggtccttcccctcccactccctcttcgcctcgtccgcggcagtaggctcaagcttaggaactcgctaccgaggatcataaatttctctagggatttggcatatccgcgagtgagcagaattagttggaggcttcgtgatggcgggcgcgaaggcggatgtagacgcagaaacaggagatggcagcggggtcggcagtggcggcggcggcctctttagcgagcagatgctgattgataagctcaacaggctcaacaactcagccactagcattgagacactttcacaatggtgcatttttcaccgcaagagggccaaaagggttgtagatacatgggaaaaacagtttactagttcaagggaggagaagaaaataccattcctctatctatcaaatgatatcctgcaaaacagtaaacgcaagggggcagactatgtggatgagttctggagggttctacctagatccctgaagcatgtttatgaaaatgggggagaggaagggaggaagcaggtggcgagattgatattaatctgggaccaacgtaaagtttttgggactcgtattggaagtatgaaaaatagcattcttggtgacaaccctcctatattggataacaatgtgaatagtttaaatcctagctctaatcccacttcaaattccaaagctgcacggaaggattctggtacagtagtaaaaaaactcactgttggcgggatgcctgaaaagattgtgtctgcataccaatcagtgtttgatcaacattttgatgaagacacagctctaaacaaatgtaagagtactgtgggccttttggagagaataaataaagatattaacgatgctagcatcaacggtaatcagccagcatcatcattgatctctgaccttcaagagcaggaaatgaccttaaaacagtgcatcgaacaacttgaaagtgcaggagtcgaagtcaataattctccgtgatcaattgcaagtcgctcgagcagaggctgaacatgccattcaacttagacaacaactgggtcgtgttcttgtcacgaacgatacacaatctacttctagtccgctcatgattactccaccagatcaaacagcagctatgatgcacggttcgggagtaagatcgacacctccccattcacaaccactgaaccctgcagtgtcacttccccctacagtcagtgcagtgggtgatgagtccaagagaacggcagcagctatggcagataagcttgcatctttgtcagctcctgtgcaggtgctgacctccattctctcatcttttgccgctgagcaagctgcttccataaacggcggatcaccttctggagaactctctggagtaccaccaggtttccatattgataagaggcctaggctggagaaaacagggcaggccgaggcgggcgctcctcccttttttgggcaagcgtcacaggtgcaacaacaggttggagcagtgcctacttcttttggaggcacacatccaccaactccaggcccattcccaccccctccaccgccattgccacctctattgccaccgctcatgcaacagtttggtcaaaatactggaggaatgatgggaatgcgaggacctttcgggatgatggctggctctatgccacctccgcctccattgtccaacattctgccggcaggttttccgggactaagtggaccacctcctccacctccacttccaccagctcagagccagccccagcagcagcagacctctcaggcgccacagcaatcaccaacatcagctggattctttcaatcatcaggcatggggttctttcctcctgtgcaggtgcagcaatctcagcctgcccaacgacagtgattcaactgtgtctatttgcactcatgggcttaaaggcagcaccttgcattaactttgtgcattaaacaatatctcaccgagtattgagcctaaacgttggctggtcctgcaagcgaggcacggccaatgacgacggattagaaagattgtagaataggcatgcacgttgtagaactatccccttttttgtccgagtagttttaactcttcctggttatgtgaagttgctagacttcgtttgtttttgatccagtctgcattgatcacccgaagcaaaagaaaacgactttggaaaactggggctgaaattgggacttcgccaactgacaggacagttttatggctgaaacagttgtagaacttactggtcttagtctcatagatatgatgtgaactgcatatttggcatgctgtttaaatctgtggattattattatcatcataccaccttttctgggtttgaaactgcagaattctttcacctggttcttacacaagggctagtttggacaaggaatcgtgatctggaaaagttgaaatgcatca

SEQ ID NO: 37666 - DNA, 3444 bp, Zea Mays
ctcacctcacataactacataagagaccgaaacatatttccctccagaatccctcaacggaacgctgcagcagtgcaggtcgctttcttccccaaaattttgaaccccgaaccctagctctgctcctcagttccccgtctccatggacatcggcggcagcggcggcatcatattgtcgcccggatcggaggatgataagtttgcgcggaggcgctcccgccgtgtgagcttcgcggacaccaccgcggtgcacgtgttcgaccgcgacgaggacttcgagacgcctcccgaggagcgcgagcccgactccacccccgcacccccttctcccaggaggtcctcggttggccgggaggttgaggacgacacggaggaggatttcaaccgcccccctgtcatcttcctccacgacgtcgactcgtcgtacccagacagcgccgctgaatccatcgcctccgccgatgatgaaaacttttttggacctgtgtcggcaagctttattcaaacaggaagaccatcagattctggaatgtcagaggatgacaaccatgatataactatggattccaggacgttctctttgcattttcgcaatattgctccaccagatgactgtacagcctactcagctgggagtctaatgacacctaatactgcatctgagggacccctgaaggaacttactgcatctaatcctgcaagagcatcaattaatggccgagatacattgactgacatgagtttgttgagtggtaaccccagaacttatggttatgataagttgtcacccacgttgaacagtatgatgaagaagataaaagggagcaagcaaacaaactctcctaaacttggtatttctgatgtaacttctgattgtgtattaaccttgtctacatctgaggaagaaagtagggaagaaaatttatgcattgacaatggtgtatcttctgatgagctggtcatggttaatacaattgcagagcacatttctatgagaaatccagtttcgaccagcacagatctgattcaagatgacaatgaaatgataattgatgtccaggagaattcaaagaactgcaaccatgatcacatggatgatgaccctggtgccaataatactgcagaacctcctgcaaagatttccccagcatataagtcattcatgattaatggtgatgtgcaatcccacctagtcgatcaatcttcgtcaaaagatcgaccatctggatcaaattgcactgcaagtgtttcctccatgtgtaatgttgacatggaaacccatcttttggatcaactacctggtaaggataacacatatgctgcccagtcgtcaagtgaagctactgccattttgctgatggatgctgagcagctgcggcagaaaaatgaggtgatggatacagaaacagttctacacactccaagaactgcaggtctgcagttgcaagttccacgaggatccatatcctccttacgctcaaaaaggcataagcttttcactaatactgtatccaatagtaaagtagcaagacaggagggttgttcttcgggtactgagtttgttcaccatgacaagagactttcttctctgaagcatcaagaattggctgcagcttcccagttacaattggttgagaagaatgaacttggtcatcgagcaagtgacatgttcagcaatactgaagatcatgattctacgttatctgtttcttctcattctgttccaaagctgaagaaaaccaatgaatcttttgtcctaggcactcctcgaagacatgggctaaatgagtctactaaggtcctagatacattatgtcatgcctttactttggatagccaacctagtcgtgaatgcaactctcatgtggatttaaatggtgttggaagaaagagaactgctgaggaaaatggttatgctgtgcaagagtgtcctgaaaaaaccactaagacagcaagaagccctagaaaatctagaaaagagattccttgtgtatctcagccttctatgattgaagaaaaacagaatggtgctcatgataatggaaagtccgtggatattgattggagcaaggtagtatgtactataactaatgccacggagcaagttttgccagcatcaataagcaagtataatctacaacagcttgacatgctaagcgataggttggatgagattcatatggctagaaaatataaaaggctttctactgctgtgaaaaaggctcaactatgtcaagatggaattcaagagtgctgctttctgaaatccaagattttgggcgctggacacatggaggattcttcacttcctgcagctactacagtcagtgctggtgatagacaggaagaacttgatatcatttctgaaaagaggcttgaactcaaaattattcaacggaaggtggagaaattaaggagttcccttgaatgttttcacaatattgaaggtggcattggtagtgatagtgttgtgaggtatgctgaagagcagttgatgatgagaaatcagcatcgcatcatccactggcaagcagggctctgcaagttgaatgacatagttaaaaggggcaacaagtgtgatatcatcctcaactatcacaatttgttgttccaaaggatcatcttaaacatcagtgatacatctagcatatttgtgaacaattcactgaatggaaaccaaattggaaagacatttccaaatttggatgcatctttggcattcaattttgttttcgaagccgaggagaaccaaagagttagtgatttacagtccttgcagaagaagacaatggtaaacttggcctccacctgtctttcatgagtttcaagagtggcaagaagattgctttcatcatcgacatgacagacttgaaccgctcggtctacccttctgaaccatctgagctcattaaggtttttgaagcacatactacgctagcacagccaagcatagacgagaccatggcttctataaggaacctgcaatctggtcgcacagcaatactaagattgtgccggatggtatcccggctgattcatggttacaatgatgacctgatcactggagtgcaagctgtaggaagtaaacatcatccggatatgtaggtagtaggcattaacagtgttggttttgtttttgtttttgcatgtaggcttaagatgtttgaatgcataaagcagtccttttcaggtggacgtgcaagcgattttggttactgcaaatccttgtaactgcccgtttattacagcaacaatgcataactggtagcttggtgcgttagagtgatggattacagtcttgcagatatgtcggcactgttgtatacgagttagtctaaaaggagccaggctaatgttttctccccgcagctgggactgttgctgaaagattgtgcattttttttacaacgactccaatatatttaattaagcattgttacgcaa

SEQ ID NO: 37667 - DNA, 1650 bp, Zea Mays
gagcgagagaccacatgttgcctcttcgacgaccatgagatgaggacacccccatggaacacggtgtaggcgaaggtggacagatgcgtgtctgtgcaacctgcttagtcggtgtagatgacgagctcgactgtgggcctcctggagatctctttgtttgcctcgatatagaggagccatcagatatcaagagggatggtataaacttgtattcaactgtgtcaataagctatcttgaagctattttgggcaccattaagaaggtcagaacagttgatggaaccaatgaccttcgaatacctccaggtacccaacctggtgatgtaattgccttagcgaagcaaggggttccatcattgaataagccgactatacgtggtgatcatctgttcactgttaaagttgcaatacccaagcgcataagtgggcgcgaaagggaattactggaggaacttgcatctttgagtaatggtggctttgttcgaacagatgccaagccaaaacctgcccagccaaaacgtgtacatctagagaaagaagttggtgctagccaagaagatacagacaaatctaaagcagcgggtgattggttgaagaaacttacacattttgctgggtcaattgctaatggtgctgcaaagtggctgaaagaaaacctgtaggctgtaaatatttactgcaggatagaagatttcttcagttaccatggtgctgtagtccaatctccaattcttagattcattggggtccccaagagctcttacatttttgttttgttttgttggagagtttcaagattttcaggctgtgagtaacaaccgagggagtgagaattgtctactaatactgtcggcatattggtcccttgtcattcttgcaaagcaattattttttatgtagttggagttattttcagtttggcaagtgcatgcagcagtctgaaagagtgaaagttcgccctgaaagttatgggatgctgctgctggtcccaaaccttgagacttagacaacactgtaaatatgtctctgttcctgattctgtacttgaggttttgggttaatcaaattcaagatcaacgggcgttctttttctgatttcttctggagctgcaaagcttgcatcgagcgatgccaaaaaaagatcattcagcagagttcaaacattttcatcttacaatgaagctatcattagaaacaagtttcagtaatctcgaattctaggtttcgtggagtcctcgcgtcgtatcactatcaatccaccgagctcgctttgagcaaagccaagactgcggctaccacgggcagggacaccatcagcagagctaccacaatgtttggcctcgtgatgtccgggagcaggatgcttccgtacttgataaccgcggcgccaccaagggacccaagcaccaatgtccacagatagccggagtcatcaccctattcatcaacacatcataacaaaggaaggaaacggactataaaattctttgcatccaaataaatgttgctatcgaactagtcgctcacaaggatgaaggatctacagccacaatggttgctgttgctgaatgttgacaagagaatgcagaggtaccttgaggatttgccccacgcccgcgtcggtcccggcctcgccggggtcgcgcccgg

SEQ ID NO: 37668 - DNA, 1510 bp, Zea Mays
tgctgtctttatcttccatggtgtttgtcgtgagctccacgtacggctccggccatcgttcctctcgtcgtgatccttttctgctcgtcctcagcatgaagccacgcccagcgcctacgtcgaccatctccctggcgcacctccctgctccatccatcagacgccagtactcatgccaagccatcctcctctctcagttcatcggacgtcgatctccattgcacttgtctccctcagtgctctccactgtacgcccagtcgtctcgaacctcatcgtcgtttctcatctacaatctcgtcagcctctgctcgacatgtgtttggtgaagctgagccaagtgttgttgctgcttccagggatttataattaaattggtaatagtactctagctcgctactcctactaattaattcgatgaatagattactaattaattcgatgaatagattggatggatattaatcgcgacgctcgaatcagatacttataatgtgctatagtaattatctgtcttttattgtatatgtttgctgttaggttatttctctacgggataggatattgtgtttcgcttatttaatcacgtccggtacgtagacttgttaggtgttcgaggaattgtcggaattagaaatcgttgctgttaacgggtgtcgagtcaaatatggtcgcaatgagctgtgtcgtttttgctgctattagaattgatgaatggatgtgtctagtattattgaattagttcgatgaatgtgatgtgattattttcatgatttagagtagtcgcgttgagtgctattgttaggtttgagatgttaattatgtgacacacggtaaattagtgaatgaagtttaaatttagtattttaaaatgtctaatcggggaaccatcgtcgccctcaaggttatcgggtcgattcgatcagggtaagctgatctattattcctgctagttaaatctagtaaaactagaaaaatcatgattgttgtgtttagtgagttatagatgtctagtgcttacgtaggattatgtcgatgtcttgccgctaaataagtgattctcttttatgtatcatccggttactttatgctcatacatgtgcattgtgcatctcatgaggtacgataattaatcacgtgaggcgaaggaaaagagttaagtcgaccccaagcgcgggctaatccgcaggatgatgctgatgaacgaaccggaagatggataatatgaacgagtgccaagccaaaggatgctcgccaagtggtcgccatctaacaaacactaacctagtgttcttccaggcaagcaccggtgcatttgcctcttccttgtgttttaaatgctttttcaccttatctgatgcattaggtgataggagttgtgtgatgaacaattgatgcattaccattccttggaaactccttaatccgggttttataaaaagaactgataatgcttagccctgcttagaaactaaaaaatcatttgttttcaaaaagaatgattgtggaaca

SEQ ID NO: 37669 - DNA, 610 bp, Zea Mays
atgtgtttttaatatatgtatgtgggctgtacatgccctaatccaccatctcactcctgattccgacgccaaccccctgccctgccgccgtctctctctaacccgcttctccacctccctcacatcggctactctccgcgcgcctaccgttccgcgccgcatcggattgggtggtcggggcctagtcgaggtttcgcgggacagcgtcggtccatggcggagcttgtgggaccgcgcgtctacagttgctgcacttgccggaaccacgtttgccttcacgacgacgtcatctccaaggcctttcaggggaggaatggccgtgcgtttctgttctctcatgccatgaacgtagttgtgggggcgaaggaggatagacacctcatgacagggctacacacagttgctgatatctactgtaatgactgccgtgaggtgttgggctggaagtatgtgagagcatatgaagagacgcagaaatacaaggaaggaaaattcatattcgagaagtcaaagattgtgaaggaaaactggcaagttgaaaatctggtgagctagtgatgacctttccatgattgaagaagggtcagggttccatgtccaaaaccttgtg

SEQ ID NO: 37670 - DNA, 905 bp, Zea Mays
acgcgccactctttctggcagccgccgccaggatgcctccactctttctccctcttctctcctccccttgctcttctctggccgccgccacttgccaggacttcctgcagcagagcgcccctgcagctccttgcacctgcatcctacgcgcgctccagccgaccacgcccaggaaccagtgcagcgctccatcatcagtaggtgactgacggcacatgcgccaccatgccaatcatccatatgatccgtctcccacatgcctgcccgccgtaggctgcaaacgggcagggtcgttgtgtctacgctgcggctgcggctaccgacggcgtcctgattggactattggagaggagaggaagccgtcgtgccgcgtgacaacaatgctgcggctggacggacgtgtcggcgagcagtccagcttgccgctgcgtgtccaaccccaaggtcaaggccggccgaggctccacaacctctcaactccataacagccagctgctcctcgtgacatgcgtgcacatgtgctgttagttgcactgcattatatgttgcatgtgatgaggaacaagtttgctaccgaggatgagtaagacaatgaagaatattgtgcttctgaagatgaggaattagatgatgaggatgatcaaatatttcattagatgcaaggtgcaaactcaccaaaatctacaaggcactttgctgaagcttcacactctaaacatgatgatctagctagctatctgtaaatgatctagttgtgaatgatattataattgtgatgcttttgtgaatatataattgtgttgcttttgtgtttatgtgatggatctatgactatggtataccgattaactgtgtgtctttatgatttgtgtataaaaaattgtgatttgtggtgcttaattaaa

SEQ ID NO: 37671 - DNA, 1079 bp, Zea Mays
atccatgtacccggaccggaccccctcaattcaaatcccccctccgtcatcatctcgtctcgtcatactcctcgccccccacctccaccccctcgtgattatctccccggattccaaatcccatctccgattcactcggccccagagccgccgccgggttcttcgcgcggacgatggcgggggctgccgagggcgccggcgcggaggcggtggagagggcgcacgggctctaccgcggcggccgccaccgggaggcgctggagctctactccgccgcgctggctgcggcgcggggccccgcgcagcgcatcgcgctccacagcaaccgcgccgcctgctacctaaagctccacgacttccacaaggcagcacaagagtgtacatctgtcctcgagttggatacggagcatgctggagctctgatgttacgtgcccagactctcgtcactctgaaggattatcagtcagctctgtttgatgtcaacaggctcgttgagataaacccgtcgtctgaagtgtatcggaacctgcaggcacgattgaagacacagctatcactggccccaattcctgagtgcgaagaggagtccctttgtcgtgaagaggaagacgaagaacttcctccacgagttcagaagaccgacacttcttctatcgctaagcctgaccaaccagcaaccaaactggtcctcgagaacaaaccttcagctggaccaattctccacagaaaacctgcaactgaacctctaaaggctgtggttccgtccacttcgccttcaaaaccccagggttgggaagccatcccaaaaccgaagagtcattcaggccttgactactcaaaatgggacaaaattgaagaggattcaagtgaagacgaggacgatgaggaagatgagctgccacagtacaagtttaaagtcagaagtgttggtgtgcggtctgtaaagtgaacagggtttatgttttgtccaaatgatgtggtggtcaaaagagagcaaaattatatatttcttaagacatggagatggataggatgataaagtcaacggtgcacaaagatctaagttaacactatagtc

SEQ ID NO: 37672 - DNA, 2513 bp, Zea Mays
gcggtagttcgcctccgggttggccgcgagccgggaaagcgaccgcccctcctcttctcctccctttctctcgtctcgtcggctcctagctcctcctcctcgctcgccaagggagacgcacccggtccattcgtcctctcctcctatcgcctccccctctcctccccggagatccccgctaccgaaggattatcccgtgcagaggtgaaacgcttatctactactgtctgccccgtgccccgccgacgctgaggcccgacctcagttccaaaatccgtactcggctcggcgtgcctgtccttcggaggattggagtccactgtgctggcggctggcctcgtgcgtcgcttcctggttcgtggctgcgtgtgattgggactggatccaggcagcgagcctctcgtggatttggcccactagtatatcagcttggagttgaggagaatggctgttggtgggactcaaccagtccttaggaagtacctaggcgccctcaaggacacgacgactgtgagcttggcaaaagtgaacagtgattataaggaattggacattgcaatcgtcaaggccacaaaccatgttgagcgcccatcgaaggagaagtacataagagaaattttccattccatttctgctgctaggccacgggcagatgtagcctattgcattcatgcccttgctagacgtctttcgaagacgcgcaactgggcggttgcgctcaagacattgattgtcattcatcgcgcccttcgggaagttgatcccacttttcgtgaagagcttattagttatggcagatctaggtcccatatgttgaacatggcctactttaaggatgactctagtgcagaagcttgggattattctgcatgggtgcgcatttatgctttatatttagaggagaggctcgaatgtttccgagtgttgaagtatgatgtagaaacagatcctccgagaactaaggatcttgatactgttgctttgcttgatcatctaccatcattgcagcaactccttttccgtcttcttgcttgccagccacaaggagcgtcgtcttacaatgttataatccagcatgcactctcaatggttgctttagagagtattaagatctacactgcgattagtgatggaacaatcaatctagttgacaagttcttcgagatgcaaagaaatgatgctgttagggcacttgatgtatacaaaagagcaactaaccaggctgaacgactttcagagttttatgaagtgtgcaaaactatacacattgggcgtggtgagaaattcctgaaaatcgagcagcctccagcatcattcctgaataccatggaggagtatgttagagatgctccaacaggtcaaaaagagaaggctatactagcgatagaatacaaaaaagagccagaggaggaagaaaaaccgtcctcacctcctgcggctccagaaccagaaccggaacaagtgcctgagccagaacccgagccagtgaaagaggaagcaccagaagctgaaccagatttgctgggtctgaacgaacccaaccctgctgcaactgcgatagaagagcagaatgctttggcgctagccattgttccgatagatgatgctccgaaagctgctcccacttttggaaatggagtcactggctgggaactggcccttgtgacagcaccaagttcaaatgagaccgccgttgccccaagcaagaaactggccggtggtctggacttgctgacccttgacagcctgtacgacgaggcgaaccggagagcgagccagccagcaagctacaacccctgggaggcgacccccgccgcgcctgccccgatgatgaccatggcgccggtgatgcacgacccgttctacgcctcgaacgggtacgctgcgccgcacggcgtgcagatggcggcgatggcgcagcagcagcaggccttcatgctgcagcagcagcagatgatgacgatggccccggcgcagccggtggtccaccacccgatgcagatgcagcagaaccccgcgaacccgttcggcaaccccttcgcggccgccggcatgccgctccacgccgggcccggcaacgtgtacacggggctgatctgatccggtccggcggtccatttcttggtctgcattagcgctgctgttaccacatcattcattcttttttgcccgagttttcttgttgccattgtgagaaggaaatttgtagcacagacacagacacaggtagagtgtattatagcgtcggtcggagtgtatagcaagcagggggtcgtcatcagtggtatcccgtacgtagaaggtgattgcatgtatattatacacacagagtttggtcacctgttcatgtgcagttgagagtccattcttgcggcgaggagacgcggcacggcgccacgtcgagattgagattggattattcttaacattggatacggttgaataatgcagcagccattctttttagcacatgacactgttcgatggaatggaacaggacggttgagatcgac

SEQ ID NO: 37673 - DNA, 512 bp, Zea Mays
catcatttctacttgtcttccgaactcccacccttgcaggccggcccactagaccgccacccggccaccccttccgccctacctaacctggcgtttgcccctcagggaactgcacggcggcggcggcgcgtgccgcgcgcggcaagctgcaacgctgcagcagcacgggccacgacggcgcgacaagctgcaaggccaatcagggcgcggcacgtcaacacggtgggaggcggtcgggcggcgggggacgaccagcgggcgatccggtgatgccaactgagctgagcccaggactccactctccagtcactccccaggacgacagaggaagtgaggattcagtgatttacgaatacaagctgcgacgttcacttgttctctagtttgcagctagaagtccagaaagcaaatgtttacacttattgctattgatttgcaagataaagaacagatcgtttgattcgtgggacatagtagcaaacatatatataaatatatattcttccataaag

SEQ ID NO: 37674 - DNA, 2576 bp, Zea Mays
gggcttgggccgggccggaccgggcggcccgaatgtacacctatagttcttttctatgccatggttgatgctttaccgattttgtccactaggccatcaacttgtgctgctgtagtatcgggagttgcgtgtgcataaatttactatgcacaagtaatcaaaattagttatatacccactcgatctgtatattttctaacacaatgcccatttatggactcttctatctactccctctctctaaaaaaagaatgcaattgtcattttttagaagtcaaacacttaaaagtatggttatttcaaacaattttcataatcttgtcgattgcatttataagctcgtaatctttgcagccaaatattttgtaatcttgtaataaatatatttggctgctagataaactccaatataaaaaaaggtttaaatcttatcaagcactatacatgtggtataagatgtctatctattcaagttatttgaaaatgcaaaaaaaatcaaaaatatatcaatttaatttttttaagactttacatgttttaaatacaaacttatcaataataaacatgtagatcagatctgtcgctctctagggtaggcattcggttttttttaaaacatcagttcagtttttcagttttaagaaactttcattttatagacattagaaaccggtcggtttattagaaaatgaaaaatcgagaagattggtttcaatctttacattagtttttttggtaaaaatcgaacaccaaacttggttacaagacaacatttacaataagtttatatgatagattatatataatttaaaatataaaaattatataggtacaaagacttatagatacatcataaatcgcatacaaaataagtgaataacaatttcattgcatcatatatttagttcacataatcgaatattccaatttcataatgataaagtttggtatttcggttttttgggcatttcggtttttaggtattacggttcggtgtacggtgaaaaccgattacgataccgaatattgaacttcttagatacaaaaaatgtaatcgaacccaacggttcagctcaattttcaattcatggtaaaaaaaagggcctacccctgctcgctctagctttggtattaatcgtgtgaacattaaaggttgtttgttcaaaaaattgataagcttagaacatatatttaggacgttaaatggattcaaatagaacaattttcagctataacgttgcagattgtattgacaccaaatggttttgatatagatcgatgtcaacacccaaggttgtttgaaagttttaaatttcaaaacatatggatttagaataatttgtcgggactctaagcatatagtttcgaatataaatatttcaactacagagtcaggcatcacatctagaactacaattttgatataaagtttatcatagacgaaaaaaaagatacgaactattttttcttttgttgcagctatttatagtgacggacacttgtagagacaggcgttcagaacatccgcctctgtattttcatactttgcatgataaagacgcggttttttatcatgtaactgaatacctgcatcttcatcatgccatctgtgctccctccccctcccctacgattttccaccacaatccgtaccgcacgttacatgagaaaagccagtgtatttttatttatttttttttaaaaaaagaaaggctgagcaggatgctaagataatcgggagaggtgacccgctataatactcgacaagctcgggtgtgtgtcccgcaattctgccggccatccactgattcgatcaggaaagcgggaagcggccggaagccggggccttgagaagaaggtcggccgggacccgatggggggaagaaaatgatgatgatggatgggatgggggagctgtagaagaggctgtcaatggcatgtagccccatatagagaggtggagtggggacgacactcaccatacgaccctaccctaccttgcccgttggtgtgtgacccacgtgtgctgttggcatggacgtgggcgatggcgccatcggtggaggtggacgccgcagcagcgccatcccgggcgggcgggcgttcgtgctctccttcattttcgctcggccggactgattggccgaactaggaagaagctgcctctgcctgcccccgaggccgagcggcgccggaccccgggacgccggatcggatcggtcacttgagctgctgcgaatgcgcgcccgcggcggccgtggtcctcgtcgccccccatcttttcgctgcttgtaactgacgattcctggagatcggcgaagtttctggacttgagctggcgacttccggtccggagcagggcgtgctcgtggtcgtggtcccaccggtcagtgagcacgcaccgtccgtcaaagcatgcgtggcttcgtcgtgggatccccgaacaggtcccctcggtgctagatcttttggtgtatagagcaagtgatggcgctggatccatggacggatggatgatggatcggtctgtccgtgtatgcgccggccagtggtggtgctcgatcgacgcatctccc

SEQ ID NO: 37675 - DNA, 1298 bp, Zea Mays
acattcgtatgttctccgcaagtccgcagcaagtgacttggtctagggatctctcgagcgcttcgagaaagtttcaggccctccgcccctgcaagcgtccactgaccagacctggccagcccaggcgtggaggtgctcgtctcctccgccgcgccgggaccggcgatgaacggcgggctccctggattccacaatgcgccggcgtcaaaggccgtggtcgtcgccgcaggtctcttctccgtcgcctttggcttccgcggccactccctcaacctcggccttgcctaccagagtgtttatgaaaagctgagtgtatggagactgatcacctcattgtttgctttttcgtcaacccccgagctgatctttggagcagccctgctgtactactttagagtgttcgaacgccaaataggttctaacaagtatgctgtcttcattatcttctcaaccatggtgtcagtactgcttcagatcctttctttaggttacatgaaagaattgcagatccttctctaaatcctttgacatcaggaccatatggcctcatctttgcatcttatgtgccattcttctttgacattccaatctcaatgaagtttcgcatatttggactgagcttcagtgataagtcattcgtatatttggcaggactccagcttcttttctcatctggaagacgttccattgtgcctggactttctggcatactggctgggcttctgtatcgcctgaatacatttggcgtccgtaggttgaagttcccagagttggcaacatctctcttctcgcagttgtcattgcccttttcaagcaatccatatcaagggttaccgatcacagaaaatgatggaagcatcccttctcatcaggcacatcaaattgaggatgcacgcgcagctacccaagatcctacggagtcttctattgccgcactggtgactatgggctttgatcgcagtgcagcaattcaggcgcttgcattgaccaactacgatgtcaatttggcgtcgaacattctgcttgaagcacaagctctacagcaatgataccctggcatcgagtcacaaaagacgggcagatgcactgtacattaatgagcgttaagtgtttgatactccgattcattcttctgttctagattttatcacaggtttccttgaaacaagccactgtatatgaacgtgaactatgggaacgaaagacaattgatgcaggagctttctcaatttgcttgcagcgattctgaatggtggttgactagtgaatgtctggcagtgtgcattggcaatagcgtt

SEQ ID NO: 37676 - DNA, 1395 bp, Zea Mays
tacacaatgaaggaccaacgtgcaaaacacagttccatccttatccgttctactttgtcacttgccgacccctctgctttatataagctcgaaatttcgctgacgcgaaaaaaaatcaactgattcgctgaaaaacggagaatcgaaagcgaatgctgtctcccaccacactgcggccgctggttccggcggcggcgccagcgcaccttaccgcctgcttcttgcccgcgtcggggcggcgtgcgccggcggcggcggtgcgcgcggtgcggaactacgactccatcccgaagcgggagcccttcacctccaaccgcagcaccctcgacgagttcctccggctggacaagccgctcgtccagcgtaccaaggaccagatcacagaatgttctggtgaacgagcacaagaagaaaatgttctggtcagagtgctgtccattgtttcagaggcacaaagcatttgcagcgattattgcatgaccgtcgaaggtgacgaatgttgcagctgttgggatgcttactttgaactgaataaacttgagcgagagctgcccaaagaggaaatctcaaggatggtgaaggactcagagggtgacgtgaggtacctgatcgagagcatccatcatcgctcagatttgcggaagaagatagcagagaaatctcgtaattcagtaccatcaggctcccaggggcaaactgcaaagccaaggccgttccccgtgcctgatgggataccgaaaacacaggaagagctcaccgaagaagaggaggcgttgatgccagagtctccatacacaaggttgctgagaaggatgggtagataccctgaatggtacaccccacgccctgatcatgagactgactgaatcaagtcatctaccatccaggtgtcccttttggaagttttgcagcatgataatctgaagctgaagctcgttttatggtatgtggtaatattttagtgttgcacctatgctgctatgcagattagacttgtccttttctacttattaatgaaaaccggtgtgtgcggtttatgctgtaaatacctggagtgttcagaatatgttttgttcgaggttctgtgtactgaagtacggagtactaatgaatttccttgtacataacatcgaataaaatcactgggttttactttggtttctggtcattatagttgtgtgtgttgggggaggggggggtttgcatttgacatcacacgttctgcgttctggtggcaattctgcttatacatctctcaactgtttgtttttttttcattaatttgatctgttgcaaaaccggtcgttgtccccgttcggctgcctaaagccttgttcgtttatgtcggattgcacccgaaatcgttcagctaatcaaaatttatataaattaaag

SEQ ID NO: 37677 - DNA, 577 bp, Zea Mays
attaacatcctcagggcggcatgtcaaatgagatgtacagcaccattgccagagtgacagatggtatttatgaaggaattgcaattggaggggatgttttccctggatcaactctgtcagaccacattctgcgttttaataacataccacaggttaaaatgatggttgttcttggggagcttggtggaaaagatgagtattcactagtggaagcattgaaacaaggaaaggttgagaaaccagttgttgcatgggtcagtgggacatgtgcacgtctattcaaatcagaagtgcagtttggtcatgctggtgccaagagtggtggtgagttggaatcagcacaagctaagaatcaggcactaagggaagctggtgcagttgtgcctacatcatatgaagctctagagagtgcaattaaggaggttgaggaaggaaaaatttctcctgtgactgaaattacacctcctcccattcccgaggaccttaaaactgcaattaagagtgggaaggtccgagctcctacccacatcatttccaccatctccgatgacagaggttaggttgctggcggcatgtt

SEQ ID NO: 37678 - DNA, 3145 bp, Zea Mays
ttcggtgtggacctccctccgtctcccgggcggaagcggaagtaagcgaacggggcatccacgtccgccatccatggctgccacagccgcgacggctcacagcggcggccaccgaagcctcctcctacaacctaccatctcgctcctcaccggaggcgccggagaccaggcagatacgcctggagacggagtcagcactggagtggggcggcgtgtgcgagcggctggcccacttcaccgccactgctgcgggccgcgccgcctgcgagggagggcgcgtccccgtcgggcggagccgggaggagagcgagaggctgatcgaccagacggcggcggcggtgctgcttccgacgccgctcgatttcggcggcgtcgaggacgtgtccgcgctcgtcgctgcggcggtcgcgggccgcgcgctggcggtgagggagctttgcgcagttgggcgcagcatccgtgccgtgcgggcagtgttccaccagttgaagaggcttgccgatgaaatgccggatggaaggtactcttctcttgtagatatactacaaggttgtgacttcttaactgagcttgttcaaaggatagagttttgccttgattccaccctttctcttgtcctggatcgggcaagcaaaaaactagagataatccgccgagaaaggaggaggaacatcgaaatgttagaatctctactaaaagatacagctgcaaagatttttctagcaggtgggattgataaccctctggtcaccaagcgccgttctaggatgtgtgttggtgtgaaagcttcacacaagcatttgatgcctggtggaatcgttctaagttccagtggctctggcgcaacatactttatggagccacaggatgctgttgagctcaacaacagggaagttaaactctcaggagaggagagagcagaggaactggtagtattgagcttgcttacctcaatgattgcagactcccaactgaagatcagaaatttgatggacaatgttttggaattggaccttgcttgtgctagagggtcgtatgccctatggacaaacagtgtcagaccaaccttcactgatagttataccattagccaatcagaccagtgcaatgactattcaatttatattgagggcattcgccatcctcttctacttgaacagtctcttatggcagaagaatcaactacagaagcatctgaaatgcctgttccattggacatgtgggtaaaaaagaatgcaaggatagttgtgatctctggacctaacactggaggcaaaactgccactatgaagaccttggggctgtcctcgcttatgtcaaaagctggtatattcttcccagccaaaggaaggcctaggattccatggttcgatcaggttcttgcagatattggtgatcaccagtcgctggagcacagcctctctacattcagtgggcacatatcacgtctgcgcaagattgtagaaatggtatcaaaagattctctagttctaattgatgagattggcagcggcactgatccagctgaaggtgtagctctttcaaccagcattttgaagtatcttgcaagtagagtgaatttagcaattgtgacaactcattatgctgatctaagtcggctccagtcagttgacaaccgattcgagaatgctgcaatggaattttgtgtagaaactctacaaccaacataccgaatcttatggggcagtactggtaattccaatgcacttagcattgcaaagtcaattggttttgatcaaaaagtgcttgatcgcgcacaagaatgggttgagaaactactgcctgataagcaaaaggagcggcaaggtttactttatgattctctcgttgatgaaaaagaacttttggaatcccaggcaaatgaagctgcatctgttctttcacaggttgaggggttgtacaatgagattcgcttggaagctgatgatctcgaaagcagagtagctgcattgagagcaagagagacccaaaaggtacaacaggaattgaaggttgtgaagtatcggatggacaccataatcaagaactttgaagctcagctaaagaattcaaaacttgaacaatacaattcgctaatgaggaaagcagaggctgccactgcttccgtggttgccgctcatcagccaagcgaaatagctttcgatgatgacgatgaaaaccggatctcgttcgtctcacaagttggagacaaagtgtatgttcaagggctgggaggagaaacgatggctaccgttgtcgaaactctcggagaagatgagagttgtatggttcaatacggaaagataaaggttcgagtcaagagaagcaggataaaactggttcaaagaggcacaaataacgaggcaacaacttcctcttctgtaaaagcaaagggccgaacaccgaagcagcgatcggcaacgacgacggacgtctccttcggccccgtggtgcagacgtccaagaacacggtggatctgcgcggtaagcgggtcagcgaggcggccttcgagctccgcatggccgtcgacgcgtgcaggccgtaccaggtgctgttcgtggtccatggcatgggcaccggggcggtgaaggactgcgccattgacgtcctccggaagcaccctcgcgtggccaggttcgaggacgagagccctctcaactacggctgcaccgtcgcctacatccagtgaacggctcccagcgtgtccttgtcacagactcacagttgcggaatgccagttgggtgagctttttgctagtagctgatctgcgggtggatcggataaatggccttggcagttgtgatcagttcggccggcgtcctatgcattggcatcgcaaaatcaccagcggaagcaaggtgtgcgtgcacatgcgcgcctcttctttccagcaggattttgtgtggcgagggctgatgtggccaggttcgagccacgagagacaaaatacttgtggctcgtcaactcgttctcgacttgttttagttttgtcacaagttaagctagtatcttggctcggtttgttacaagccagctcgagttaagcttgttagctcgaatgatctagcatttgtaagcaaaacaaaaggcattcacagatgaactaataagtgataaactgtattaattagatgttgtattca

SEQ ID NO: 37679 - DNA, 255 bp, Zea Mays
tatcaggccgtgcattctagggttccggtatatgcttgtccccgtgacatgtcaaggttcgattcaatgatcaattgatcgcaagaaaaaaaaaaccctcctttgttggcttccgtgaagtccacaagatagaagatactgggctccgctctctggtctcgccgcaaaaccatccgtccccagacaggccgatcgacaccgacgttgcgcgcgcttttctcaggtccacgcctcaccgctcaccggccaccgcgc

SEQ ID NO: 37680 - DNA, 4245 bp, Zea Mays
ctcctctcgagcccgagcccatctgatcctccgattcagttcttctccccctaccaaaaggccgagcccccctcaggcctcagctccgcctccgcgctgccaaccatactcgtcaagccgtcacactttgtctctctcgtgccccgatactctttttctttttttttcttttcttttttttttttttttgcttccgggagcagcaaccgtcgccgtggccccgccttggatattccatcagttttcgggttcttggataggagaaagcggggcgctcaattccccccctcctgatccttgttccttgatcgccgccatgagcaacacgctgcttcgagtctacccttccgacctgaagatgccattcgagctcaggaagcagaactcagcgtgtcttgagctcgtcaacaagaccgaccggtgggtggctttcaaggtcaagacgacgaaccctaggaagtactcggtgcgctctgcctccggtgtcgtgccgcccaggggatcctgtggcatcacaataacgatgcaagcgcccaaggagatgcccccggactaccactgcaaggacaagtttcttgttcagagcattgctgtggaggaggggacgacgcagaaggacattgtccctgacatgttcagtaaagcaccaggtaagttagttgaggagttcaagctgagggtggtctatgtccctgccaatcctccctcaccagtgcctgaggaaacagaggaagaggatggatctcttgattcagatgtggaccatgaagtatccacgtccaactctgcaacaggacaagggaatacatgtagatcacaaacatcagatgatgaggatgattctacatccaagttggaactggaaagaagatatgcagaggaaaacaagaagattcagaaagagctggatctcctccggaaaacaaaggcgtctcctcggggcttctctgcgtttgtgctgcttgtcttcttgttatcctcacttcttggatacctgatgttcggaagcagagcttagcaagttagcagctaatggctgcacatcatttgcggcaccggcagcggcacggctcttttagtacagtgtacagatatatacattaatagcgaagtagtcagtacataacagatatatagggctttcttgggtttcaagtgtccataggaatatatcttcagttttgaaatatgtcctttaattggcactcaaagttcaagatagcttgctgtagaccatcggctgcacagatgattgatgatgaggtcaactttggtaatatctttgatgcctcagaagaagttcaggttactgcaaagtttggtcccaagcaacggcccaaaacccgaaaaacagctctatcatccagatctgcagcgcctaatcctactgaagaaaccggagataggaaagtaggaaccttcagtcaagtcaattcttctaaagagcttaccagccaagaaaggacatccttgatgtgccctagtactgagtcagttgatattatcgctggttctcatagtattctcgatacaccattggaagatgcattgacagttccccagggttctctgtctggtgcttctgctgcagataggacttctcaatatggtgagcacaatgatgatccttctaagttagctacacaccaagaaaacttggtggtttcagatatcaacgtcccacctaacagttcatgtagcaaggctattgatgatatagttgaatttggggacatgtgtgatgtgcaaattgaagaggaaagagttacaaagttccaaccaaaggtgcaaacgaagctccttaaggaaatagccaaatctcggaagactaaccaaaaggtggaaacttccactgtagatgtggttacacaaaatggaaagggcaataatattcagacaaggctccatggcgatccggtacaggatcctaaaagtcatgaaagtgtgcagatcccagattctgaaggattattagcaactgataatagtaaaggttgcaatttagctaacctcaacaatctccttgaggagtcagtccaagaggaaacaatagctaagtttcgttctgatttgcaaccaaatctcgggaaggcttcatcccaggttgctgcgattaaaattaatgttgttgctgttgctccaatagttggagtttgtgacagcaacaatgacatgtacaaagaacctaaagatcaagaaaccatcactggtccagtggcttggtcaccacaggctgtgcatgctgatgttgatttagacaatcacaatgaaccaattaatcctcctattgatggtactcaatcaatgtttggcgaagtcccaggtacagcttttacaggaagagaaaagggaaaatcaaaatctgtatcttttgctctatcggatgtttctgggatagctagccctatagataccaattctgagatgggtaacatcggcgattcctgtagtgacaaattgactgatgaaaatttaagtaactcatctcgtcatatcgctgaaaagcattctattaccaaggaccaatattcaaatgagcaggaccatgagcgggagccactagatcatgctgttcaacagcaaccaaaatcggatgttggagaaagagcatcatctatgaaacgacgttgcaggaaaaaggtgcaaaaagttgggacacctaatcacactgttgatgattattttggtgaagactgtgtcgaaccttcattagctgaagaagataacgatactggtgatcattacactactggtaataagcataaggctaggaaaaagtcaaggggtggtgtagaagagtcacagcagcagaaagctcaaaaaaataaaagcaaggtgtcttcacggggccgcaaacggaccttgaaggatgaatcgacagagaagcctgagaagaagctaacccacagaatacgtcagaggataccaaaagaggttaaggctttactggaaacacctcgtgagcagataaaacccatgaagctttgtgcatcacatctcaggttgttacaagaagctagagagcgtgttgatccaaaagggattccatccgggccatcctctaatacaagaaactttcaactagatgatatggatgatttgggctacagagatgaggaagctaggttctttgacaacgatataacagaggagcatgtacaaaatgcaacaaaattgaactaccattcctacatgaacaaaccagcccggggaaaatggtcaaaatcagataccgacttgttttatgagggtcttcgacaatttggtagcgattttgcaatgatacaacaattattccctgataagactcgccatcaggtgcggcagaaatttaaatctgaggagagaaaaaatccattgctagtccatgatgctatagttcatcgctcaggagatagtttgtatttcaaaaaggtaattaagcagctgaacattgaagatgttgtgctgccagatattaaaagtacacaaaacaagatggtgcatcaagtgaaagaggccctggaaatgagaatgtactggatgatttaaacgaggaggaaaatagttcaaattggttgaacgaagagcatgacgtacagatggccgatgtggaagaagagcatggcgaacagatggatgatgtggaagaagagcgtgatcttggaaatgatggtggtgatgatgatcttggggatgtttttgattggtactagtttatgttaaacacggatgcgagcgtgaatatgagttggtctagctctgcataacaggggtagtttttaggaaaaaaattctttgcatccggaatgcaaagaatcccttttatgactgatttggtgactaggtatcacagagagattggagtggattgagagcctctaatctctccgtgatcctcttacagcctctaacatccaccacctcgtggtccatataagggcttattcggttattcttgtcccatgtggatttgatgagattggaaaaaatatgaaggattttaacttgttcgagatttaaatctatcaaatctcatcaaatccatatggattgagaggaaagcaaacaagccctaaatagaagaaaaacaaattactattggattaagttataaattttgatctgtttttgtggaccttcaagtggtgtatgtgagtggctgtaaaagagtgtgtttgcatctgggatatacagattttttaccctagtttttagatgttgccacagttgtacggttagaattgttcggctggactatcgctt

SEQ ID NO: 37681 - DNA, 2744 bp, Zea Mays
cctgcgtttcctccgacgtctgctctcccggcgaaggaagggaaggagccacgcgaaagaaagctgacgcccacgcgcccaggagcaccaccggtgacgcgtgatcatattcgagcaccaatcccctcatcctccccagcccccggcgctaaaatctacacaaagcctcgctaaaccggcctgattcgcgctcccgatctcgcgttcgatcccagcccaccgtgaggtcctccagcctcccgcctcccgccagatctcggtgtcgttcgttcggtttcgatttggtggtggaagggaagggatgagcgggatgagcgcacggataaaggagatggtgcgtgtggccacggcgcggctgggcggtgagcaggcggggggtggcggggcttcctcctcaggcttcgcgcgccgggagtccacggcgcggctcggcggcgggggcaccagcctccggaggcagccgcagccgatggcaccctccgtgcgcaccgtctgttgcaacgaccgcgaggccaacgcccctgtcgggtacaagggaaattctgtgtcgactacgaagtacaacatcctaactttcttacctaaaggattattcgagcagttcaggcgggttgcaaatctttactttctcatgatctcaatcatgtcaactacacctatcagtccagttcatcctgtcactaatgttgttcccctaagtcttgtgcttctggtgtctctcatcaaggaagcttttgaggattggaagcgttttcagaatgatatgtcaattaacaatgcacatgtcgatgtattgcaaggtcaatgttgggaaagtactccatggaaacgactgcaggttggagatattgtgaggatcaagcaagatggttatttccctgctgacttgctcttcctatcaagtacaaaccctgatggtgtttgctacatcgagacagcaaatcttgatggggaaacaaatctgaaaataaggaaggctttggagaagacttgggactatgtaattcctgaaaaggcttctgagttcaaaggtgaagtgcagtgtgaacaaccaaacaattccctttatacgtttactggcaatcttatcatggacaagcagactatacctctctcaccgaaccagttactcctaagaggatgcagccttcgtaatacagaatacattgttggtgttgtcatattcaccgggcacgagacaaaagttatgatgaattccatgaatgttccctccaaaagaagtacattggagaaaaagctagacaagcttatccttgccctttttgcaaccctcttcacaatgtgtgttattggtgccattggaagtggtgtgtttattaatgaaaaatacttttatcttggattgcgtgggcatgtggaggaccagttcaatccccaaaacaaatttgtggtgaccattttaaccatgtttactctaataactctatactcaaccatcatcccaatttctctttatgtgtccattgagatgatcaaattcatacagtgcacaaaattcattaataacgatcttcatatgtaccatgctgagagtaacacccctgctttggcgcggacttctaatcttaatgaggaacttgggcaggttgaatatatattttctgacaaaactggaacgcttacaagaaacctgatggaattctttaaatgctcgattggtggagaaatgtatggaactggcatcacagagattgagaaaggaggagcagagcgggctggaattaaaattgatgatgatgagggtaaaaggtctgccaatgcagtccatgaaaaaggattcaattttgatgacgctagaatcatgcgtggtgcatggagaaatgaacctaatcttgaggcttgcaaggaattctttagatgccttgcaatctgtcatacagttcttccagagggtgaggaaactccggaaaagataagttaccaggctgcctcacctgatgaggctgcacttgtggctgctgctaagaattttggtttcttcttttacaggcgtacacccaccacagttatggttcgtgagtcacatgttgaaaggatggggagtatacaagatgttccatatgaaattctgaatgttctggaattcaacagcacgagaaagcgacaatcggtggtttgccgtttcccaaatggaagattagttctctattgcaagggtgctgataatgtcgtatatgaacgattggctgatggaaatcatgatatgaaaaagacaagcagagaacatctagagcaatttggttctgctggcttgcgtactctttgtcttgcctatcgggatcttagcagggagcaatacgaaagctggaatgaaaagtttgtacaagcaaagtcatctttacgagatcgtgataagaagctcgatgaggtggctgagttgattgaaaaagaccttatattagttgggtgcacagctatagaggacaaactgcaagaaggcgtgccaacctgcattgaaactctctctgcagctggcataaaaatttgggtgttaacgggagataagatggaaacagcaattaacattgcatatgcatgcagcttggtaaacaatgacaccaaacagttcatcattagttcagagacagacactattagggaggctgaagaccgggttacaagtttagttaggaagggcgctcagaaaataactctcagcattggtgacggtgctaatgatgtgagtatgattcaagctgctcatgttgggattggcatcagtg

SEQ ID NO: 37682 - DNA, 677 bp, Zea Mays
cggcaccccgaagctccctacccccgcatagctatcaattcaacaatccgagggcgaggctcacacaatggtagctgactcaccgacgagggagacgtggtgaagacggctatggcgtgtggtagttcctcagcaccggcgaggtctccccagctgtccggttaccctcagtgccatacagagccacgaacgggcacggtggttctctggagatcgccccgccgacactctctcaggcttgctgacggcgtagacacgcggtggcttcctccttctctctcaatctctcctggaccaatggcggcactggatcattagctctcggcgtgggtgtaggttgcagatttccgacggccaagagggcggtgtcccggcgcctgcatgtatactcaggtcggcaaggatatcacaaggttgttgcgcgtcaaacacggtgtgtccgtgcggattttcaggctgagcccatggcgttcctgtgaaggggataaacctgacacgatgggcccacacgacggtgagaagaagacacggcacacgtgcggctatagaggctgaccgagcgggcctacgcgtaagtggctcaggcgggcattggcggaagaagtggaggtgggccgggcagcggcccacgcgggcgaggggagggaaaacagaaatgggccatgggtaaagatttc

SEQ ID NO: 37683 - DNA, 4038 bp, Zea Mays
cggggatgttccagcgcgtcgtcgtcgtccgattctgtctccctcaggtcgagattcgagagttcccgtgttcgtccatccgcgctgtgaggttctccgatggccgagaagtcacccagctccgcgccgcagggtggttctggtgggaatgaatcattcgataatcttgtaattcaagctccacagcttatgagggaggattacatacagaatgctgtgaagtttctttcacatccgaaagtgaagggttctccagtatttcacaggcgttccttcctggaaaagaaaggccttacaagtgaagaaattgatgaggccttttgtagagttcctgaccctaagccaaatggaacagatgctgtagctgctggtaggcaacaagcaaacaatcccagtcaatctgttgtgctgcaaccttatacagaagttcaaccacaagcagctactgcctctgccactgctggaccaattgttccacatacaaaggcacagttgagctgggtaaacacactccttggtgcaggtctttttcttggtttaggggctagtgctgccataaccctaaagaaattggtcatccctagtctgaaatcttggactcgtagagtcgttgctgaaggagatgaaaatgcaaagagtgaacatacttccaaactttgtgaagaaattagggaagccataaaagtttctgcatcagccttttctgatattgctaaaataaaccaagaagtgcttgcttcaaaagatgaagataggaaggtactcatgaagttaacagaagcattcgagtcacaagaaaatgtgtttaaatcattgagtgagaccttaaatcgtatcagggagaatcagctttcggattgcaatttcagaaattttgggctgctcaattcagccctcattacccttttgccaaagcttgagggtgcagcccttgtgaaggacttccgtccgatcagcctcatacatagcttcgccaagctggtaacaaagatgatggcaaataggctggctggacacttgggtgcaatggtttcacccaatcagacggcttttatcaaaaaaaggttcattcttgacaacttcatattggtgcagcgtacggccagatatctccatcaacaaagacaggctcgtatcctcttcaagttagacatttctaaggcttttgattcggtgtcatggccgtttctcattgaggttttgaggaaaatggggtttgggcagatttggtgtgatgttgtgtgtggactgttggcttcttcctccacaagaattttgctaaatggcgttcctggggagatcatttcacaccagaggggccttaggcaaggagacccactatcccctttgttgttcattttggttatggatgttctgaacttgctcattcaaaaggcttccgatgaagggttacttcagcagctatcttctgggactttacatcacaggctttctctctacgcggatgacgcggtggtttttcttaggccggtggcttcagacatcagcttggtcctggagatccttcggctttttggggaagcctcggggctcaagaccaatgtcctgaaaagtagtgtgttccccattcgttgtaccgaagatgatttgatgcgggtccaagcttctctcccctgccccatttctgattttccgtgtcaatatcttggactgcccctgtccttgggaaagctttcaaaggcccagttacaggcattggtggacaaggcagctagtgttctcccaggttggaaggccgacctgatgacaaaggcgggtcgtgctgtttatgttcagtttgttctcacggcaaaaatgatttatgctgcgatggctttggacctccctatttggaccatcaaagctattgacaagataagaagaggtttcctttggaaaggaagaaaacaagccaatggtggtcactgtttagtggcgtggggcaaggtcactaggcctaaagttctgggcggccttgggatcactgatctttggcttttgagcgtggcgcttcgagctaggtggccttggctccagagaaccgatcactctaagccttggtcggttctccctgttcaggcatgtggtgcggtggaagccttgatcaatgttgcagttgtgtctcaattgggtgatggacaggatatcctcttttggaaggatcggtggctgaatggtagaagaatcagtgaggtggcacctgaggttcttgagcatgtacctaagtgtgttgtttccaaaaggctggtaaaagatgctttaacaaatctgaattgggtggctgatataaggggtgcgctttcagttagggcgcttgcacaggttttggatctctgtgacttgctggagggcttagttcttcaacctgggattcctgataagcattcttggaagttcagcgcgtcgggggattactcctctagttctgcctaccaggttcttctccttggagctgttgaatttaggccggctgaacggatttggaagacctgggcaccaaggaaatgcaaattttttatgtggctggttgtgcatgatagatgttggacagctgacaggttggcaaaaaggggaatggatcatcccgtctgctgtccgctttgtgaccaggcggatgaaactattaatcacttattggtcgagtgcagctttgcgaagcagttttggttccttttccttcggtctggggacttccaggtgctctgtccctctacaggggatggctgctttgactcttggtgggagaagagtgccgaggtggtgggcaagcctttgtcgggtggtttcaactcgctggtcatattgggtgcgtggtcgatctggaaacacaggaataggtgtgtgtttgatggttgtagcccgaatgttgaggtcgccctttcggcagctagggaggagttgatgtgctggcgtttggctggcgctaaaactctctctttcttccatttagaggagctgtcttaggcgttaatggtggtgtgagtttgtaaaactgttgtttctgttttggggttccccccttttttcttcttaatataaaaatacgcagacctcctgcgtattcaagaaaaaaacaacacagcctattggaagagcatgttcagccttcatcatggaacgggccaattgactatcaagggagagcttttcagcaaactaatatgtatgcaacaccaccaaacaacagttttgacacagggaggaactcattcatgccattagctgctgaatcttcttatggaccatttccaggatcctactctgagcgggtgcagaggcctggtggatacggattccagcaacagacaagcagcgaccgattgaatgttgttggcccacggagcagctaccaagggggttcttctaatcaccatgctggtagtaatgccatggatgacccggcagcggttgcagcagaattgcagcgccgctgggttcccccacagccaccaggcgtcatcatgccagaggctgcggccgccatccgacaggccaggtcggttccgaggcagctgccaagcggcgatgggcgcctgggcgctgatgtcccgagacagcctgagcctgccattgccatggcgacaacagagcacgtgaacgttgcccctgaagcacctggcggggagttgccaagcgatggtggtggtgccatgactgctgatgccagcaacggtggtgggagtggagagcagcaggagcaggaagcctcttgagtgaagctttttggacgccctttgatttggttctttgagaggatctagcttgcacctgtacctgtgtgtgtagcatatgcatatgcatctgcataggtttgtgacataatgtgcctcgtgttcgaaactgcagctgtattgtagatatataaactgatcaactttacacgtgtgttacctgtgtgttctgtcataagtgtatcagctatgaggacgtatttgcttcggcccatgctaaaatattcgcaaagtttgggccaagcatgggctgaactgagcattctaatcagcaatggcccaattttgagccatgtgctttcagata

SEQ ID NO: 37684 - DNA, 694 bp, Zea Mays
ctcgtcctgtccgtggagatctttgtgagcaccgtagaacccgccaacaattcatcgtcgatctccgaccattgcgagtgtcccacgggtatttatgccaaccctctcgaccccctttgcaccctgtcgaactaccaatccctggcgccaaataccaccgcaatggcgtgcgccatggtgggaattgcagagggcgtgcggagccgccacataggtgcttcaagtcctcggatactggcctggggggcatcgtcggtgtgcgcgagatctcctcagggtgtctccacatgtggatactgactggagctcgcgagattcgtcatcggagcttgaagcacgccgtgattccgccctacgccgtgactatatcgattaccatcaccttttcgggtaagaagcacagaacaagtctctccatcacctttggtatgtatagcaccacttgagtcgaagctataagcataagatctggggactatgaacttcggccatggctccgctgtgtggatcggtggcgccgcctcgtttagccggtgtgaggtggtgacgctcattggccgccgatcttgggatgtgcggctggggattagatcaggcccataccggttcggggttagatttcaaccatcgatcattgatctggtggactaaagcacgttgcagtccgtggccatgtgtgggtcgttgatttcag

SEQ ID NO: 37685 - DNA, 480 bp, Zea Mays
gccgggatgagcggttggattcgcatcggacggtgacgatcatatctgttttaattaaacccagactaccagatcttggatggacgtccgagatccgtcggtcagcatggtcgggatggagggtccttggcacgatggcgccgctcgacctcgcggcgggatctcgccggagacgaggggattggccacgacacgacgctaggtgcttggggaatagctcaggtgcgatcagggcgaccctgcaaactgagtgttaggcacaataccagcgcgggggcactagagagcgcggaacacggcgaagcaggctaacggtggcgcggatcaactctggcaaggaattgtgcgggcactagggcagtaacgaacgaattaagtgcatagggaggttgctgaccatgagtgcgaacccgggagcacctggaggacgacggggaggcggtgaagtctcgggtcgacggcggctgtcacacctggaat

SEQ ID NO: 37686 - DNA, 2130 bp, Zea Mays
tgggtagtgggtactcaggcttgccttggagcctatgctaattgaatttcaatctcccagcaaatttgcaaaatcatccatttacaatgaatacagacaattggtggaaaaaggtttgacctgtactttaggaaaaatccatttggtggggaattcactgtttttgctggccttgaggagtgcatcaaatttattgcgaattttaagttcacagaacatgacatttctttcctgcaatcagtcatgccaatgtgtgagggtgcgttcttcaattatctcagggaagttgactgctctgatgtagaggtgtactccattcctgagggatcagtagtttttccaaaagtgcccttgatgagagttgagggtccagttgctgtggttcaacttctggagactccatttgtgaatcttatcaattatgcctctttggtaactactaatgctgcgcgtcatcgtcatgttgctggaaagtcaaaggttctgttagaatttggtttaagacgggcacagggacctgatggagcaataagtgcctcaaaatattgttttatgggaggttttgacgcaaccagtaatgttttggctgggaatttgtttggcataccacttcgtggaacacattctcatgcttttgttagctcatacatgagccttgatgagataccagacaaggccctcaagagcaaagatggctcaagactttgccaggattttgttagtttagtgcaagagtggcttcaaaagattcaggcagcaaattcattaggtggtgtatttggtgatacaaataaaagtgagctggctgcatttgcatcctacgcattggcttttccaagcaacttccttgctcttgtggacacatatgacgttatgcgaagtggtattccgaatttctgtgcagtggctctagcacttcatgacttagggtacaaggcatctggtattagattagattctggtgatctggcctatttgtccattgaagcacgaaaagtgtttagtgcagtagagaaggaatataatgtacctggttttgcaaagatgctcattactgctagcaacgacctgaatgaagaaacaattgatgccctcaacaaacagggtcatgaggttgatgcctttggaattggaacttaccttgtgacgtgttattcccaggctgctcttggctgtgtctttaagctagttgagataaataataaacctcgtattaagctttctgaggatgtggcaaaagtttccattccatgcaaaaagagatgcttcagactgtatgggaaagaaggctacccactggtagatatcatgattcgcgaaagtgaaccatcgcctaaggcaggagaaagaatcctctgccgccatccattcattgaatcaaagagagcatatgttgtcccccagcatgttgaggagcttctacagtgctattggcctgggacatcagataaacctagagcagagctgccctccttggagaagatcagaagccgctgcatgcagcagcttgaaatgctgcgcccggatcacatccggcggctaaatccaacgccctacaaggtgagcgtgagcaccaagctgtacgatttcatccaccgcctatggctgaacgaggcgccagtaggtgaactgcagtagatgatgatcatataaaagaagttttgggtcatctgcgatacagcagcaattcatcgaagaaaattagagctcttctgcacaacatcaacagttgagcccatggcaggattttgctccccaaattttcatctctagtcaccggtatagaggcaggttaatcaggttgtctagtttatacgtcccttaattggtgggatgctatacacatcatcatcagaaaagaaccgaaatcatatggagccaaaaatgttactaggtcgtccggtgtttgtgctcgacggtgtcacatttgtttttctagccgatcgtgcatatggtcatataaaacactgcactgttgattgtactgtttatatagtgaaatttgaaatgatagatgaaataggagatagaatgagtaaacgatccaactgaccaggcacgctgcgctagcgaggcttgaattgctgctctctgcgttgcctgttctccttgaattatgcaaggatcgag

SEQ ID NO: 37687 - DNA, 1541 bp, Zea Mays
tttttttcaccaaaccagcgaggcagctaccgttttgtcgccatagcactcccgccgaccccctcgccgccgccgggaatggagaccagcaccaagaagcttagcagccttcgtatcacctccctggacgacgatgacgacgagaccgagatcccgcaccagccccctcaagcaggcctctccaccgctgaagcggattatgaggacgacgacgatgaggaggaagaagccgaagtgactcttggtgtccttagcaaaccgaagcacccaggcctcctcctccgccacttgttccccagcaaggccggtggcatcccggcgtggctagacccggtgaacttgccgtcgggaaagtccagctactgtggtttctgtggcgagcctctgcagttcgtcctccagatttatgcaccaattgaagataatgtagcagccttccaccgaacgctgttcatgttcatgtgcccatccatggcatgcttgcttcgagatcaacatgaacaatggaagcacaagtacgggaatccatgtagaagcgtgaagattttccggtgccaattgccacggaataatgccttctactcagctcaacctccaaagcatgatggctctgacaaaccactctgtccaggagctcctgtatgccactggtgtggtacctggaaaggtgataaaatatgtagtagctgcaagaaaagcaaggtactgttctgagaaacatcaggcactgcattggcgaactggtcataaaaatgattgcctccagataataagttctgctgcttcaaattcagttctgccagctgtaggaatagttcctgctagcatttcttggccagaatttgagataaaaatagactacgaaggtacttttgattctgatagtggtgatgaaaacaactcgaagtcattggtgatgcaaagacatgggaaacttgatgctatgatgcagtcgtggatggaccatttcgaggctgatgctgacaacaaatgctgggcgtcttttcaagaacgggtctcaagagcaccaaatcaagtgttgaggtattgtcgagaaccaaatgctaaacctctatgggccttatctttcgggtgcccgtcagatgctgatatcccatcatgtagctactgtagaggtccattatgctatgaatttcaggtaatgccacaattgctttatttctttggtgttggaaatcaaccagactcgcttgattgggcaacaattgttgtctacacatgtcaagggtcatgtgaccaaactgttagctacaaagaggaatttgcttgggttcagttgtaccctacaacaaccacgaggcggtaataatgtttacctattcctcggagtaactactgtccaattctgcaggtgtaaaaagatttgcagaaagtcagaaaaacaattcagtaaatacacccactggtagaattggagattgggatgctcagggcagtgagtactgagagcttctcgagtcccattgttgcacctatgccttgacaattatgggtaaccatactagcagagaatagttgcg

SEQ ID NO: 37688 - DNA, 10402 bp, Zea Mays
  misc_feature (1)..(1): n is a, c, g, or t
natttcaatatatcttatcataacatgttcacctagtaaatagataaaagctccttagtacaacaagaaagaacaatattgctattggttagaaggggcgggttttattggctgtgtgttggtcagggaatgggaatggcagtgggcgcgagagagacaggacggggaatgggaaaggaagggaatgggaacggcagctagcgcctgagaggacggggaatgagaatgaaaaagggagaacatagaatgggaatgggctgaaccaggaatggcagaaccagaaatgacaggctactcttgcagtcttaataagtagtagagataagaatgacaaatataaaaatggcttataagatgaaaaatacaaggatgcaaagaacacatgagatcaacatataagaggctaaaagggcttaaatgacgtcaattgatagtggaatctttgcatagcttaacattaaataaaaggacatctggacattgaacacccaagtatgtggctggaatttcttgaaagctctccttgagctattagtgttatgaccggcagcccagcagcccagcagccctagccctaataaattcagttagtttgttagatggataaatatcagttagtttatttagatggataagtattagttagtttgtttagatggataagcattagtttagaactcctgtatatagttggttagtttgttagggggctgctatcacaacctatatattgtaccctttggttaaggaagaaatcaagcatgcaatacttgcccgtgcttcccccaacccatctactgttcacccgcatacaattcatctgagggactgttcatacgcgacactattcatctacgatcactattcgataattcctagctccgccactgcttaggcatcatacatgaaataggaacaagtagaattattatatttaattacgctaaccaaaatttggactcgaggcctatggctctgataccatattgagatgcatgcaccaactaattcaaccaaaaagttttaaccgatggaaagggatggacaattcacttatatttctataatgaaaagaggcgcagtaagaacaagatttgtgaatgcttattataaatagaggtgattaacctagaattcaattgcgcattctctactttacagtgccaactttaaagatttctttgtttatttgtgtctgatatcataggaacatatttcgtctatatctgtaatgtatcatagctgggtgcaaatgtgagctgaaatgatcatgactcatgagtgttagactattagccgccgcccggtttccctagccgctaccactactgccagagccatggctagtggtcccccctctagctcctctccaccctcaccccttcctctccactgagccaccgtcgttgcccttgctgccccttcctccagccaccggcgcaacgacctctttagctgttgttgctggcacgactgccatagccggtgcctgcctatcgctgcctctgctcggcgcggggcctgggcaacccatgtcgcctctgtctttcctagtaggcccgtagacccccctcccgcggatctccctgtatcggccaccgccgctgtagccctagccaccgcctgggcgtagtgtgctagggctatggcctggccattgccggcctggctgcccctggcctagctacccttggtctaggcgtggctggccagggcctcgctactatcagcttggtcatcgttgcatggcttcgggcagcctggacgccgctccctccatctcgaacatctactttaggccctctctatccttcgtacctttgtcggatgctctgccacccatcgacgttgtggctgcccaatccagctttgtcatggccctcatgactgctaaggcagtagtggctgccgcctgggagcacgaacgcgtcgttgctctcgcctggaagcatgaacgcactgttgccgataccctcgccagtcatacgtccgctgtgcgaccttatcctcctcatcctgcaacactatgccctggaagaccatgtcctcattgacataacgtccctcactatcccctcctggcgacggatgcataatgggggggggggtcctcttctagatccattggacattcacttttgagctgcaggatgtcgttcgcgagtgtggcggcactgcccgcagaccttggttgccattgaggagcaattctttggcaattgtggggctcatgctcttcacctcaacgtcgcctttcagacctttgtctaggaggacctctccatcatcgagtattgtcgccagatgaaaggctggcaacctccctttgtgacctcggggagcctgtctccgatcgcacacatgtccttaacctcctccgtggcttcaatgagcgctacaattacctctagatttggatcactcgctcggtcccatttcccttgtttccacaaggtttgcaatgacttcatcctcgaggagatcaccaaggggcgcctcctcgcttcgacaccgctatcgctctctacagctccacccatgagtgccagtccttgcgcccgtcctcttctactcctaccttggggggcttgtcttcacgctcgtctgtcccctttggccgtgggctccacgcccctccctcctagcccaggcccggggcagggcgagttttaggtgggtctttgctatcagatgaagggtgactatgggggtgggggtggctagagggatgccccttcgccctttccctacaacccatggaccggctgcatctctatgtggcctggcttggcctgtccttgggtggaccttcattgcatctgcctccaccctagacggctaacctgacaataccccgctcaaggtatcctctcgaccctctcgccaccagcaccttagcccgctactacccctaccaccccacatcgttcctagaaccgatggttttagtgggtgggatttgcagtcacttactagctcgttcagcacgattattctaacttcttctatcattgactgggttgctgattccggtgcgtcctaccacatcgctctggatgctggtatactttcttcttctcacccaccgcttctgtctcatccttcatctatcataggaacattctcccggtcacctctgtaggtgatttggttcttctcggacctttctatcttcgcaatgttcttgtggcccctatatcattcaaaatattttatttgttcgtcagtttaccattgataactcttgctctattgagttttatccttttgtattgtccgtgaaggatctttctacccggagccttctcgcctactatgatagctctggcccctgtacaccttgcgactgcctgcgtccacttctccacctaccgcttccactacacatcgcttttgtcctcgccgcagtcgcacacactgactacttccactacctccagcacttggcatcgttgatctggtcatcctagccctgacgtgttgtccaaattgtgtagtagttcagttgtctcttgtactaggggcacctctgagcatctatgccacacatgtcagctaggtcatcatatttgacttcctttctctagctcctcttagcatgtgcatgattttgatctcatacactgatttgtggacctctcatgttatcagtgtttctggttataaatattatctagtggttattgacgattgctctcattattcgtggacttctcccttgcgttcgaagtccaacacatttgcgtctcttttgcacttcatcacttgggtttctacttagtttggccacactattaaggttgtccagtgtaacaatggccgtgagtttgataactcctctcgatcattcttctcccatggtgtctggctccagatgtcttacccctatacttctcttcaagcaaggttgagcacatgattcgcattattaacaacatcatgtgttccttgctctttgatgcatccgttcctgctcgctattaggccaagagcctccacaccgccacctattttcttaatcgccttactactaaggcagcttgcgcttcaacacccctctctgctctttttggcaccactccatcctatgatcatctttgcgtctttgggtgtgcatgcttcccaacctttttgctactgcttcccataagctttcccctcactccacccattgtgtcttcctcgattactcccctgatcacaaagggtaccggtgtcctgacctcaccactcatcatttcttgatctctaatcacgtcatcttcgccaggacaaatttccccttatcaacccctcccggcccacgatcgactctcttctcgagtaagactttcttcttgaacttgatctcgtggctccctttggtcagccaccctttatttttttcactgcaggttcatccctgttgccgccgcccgcgacacgtgttcccctggattccttccgggctatcctaccgcctaggtcggactgtgagcccctagatggcctctgctagactgccggtagcaccgttggccccgcctttgccctcaccttctctgacctcgcccacggcattacgaatctcccaggtgccctagctggccctagccccttctcgctacgccaaccctatgcatgtctatcagggacatgcacgggtgggtgaaccaccccgctcccgggcagagccgacagtgtatcatccccccttcttcattgtgaccctcgccgtgcccacctgatggtggcttgatagactgctagggttcttcgccctgtcaactgtcttgtcctctccacgatctccttcctatcagtctcccccgtgtcgtcttttgttcatagtgccctcatcgatcctcactaaagtcatgctatggaggaagagtgtcacacccggatttaaggaacaaagccgggtgcatctcatatatacaccagggaagacaacacatataataacagagtgcatagagataaatgtcataaatatcataaatgtacttgttacatagcggaagtcttacaaaataaatgataaaataaaacgagctaactattattccctggcgccacaaagctgcctgggagacaccacctagatcaagtcgaaagcctcagagttaggtggctcctcttcgaccacctgttcttctcctgtggggggtgtgagacagcaagagtgagctcacatatcttcatagctcaacaagtcgtggggaataatgtgcatgaactcaccaaaggtgggagttcatgtgaaatgtaaggctaatcaacaaaataaaggctgaagctgagcattgcttttataagttggtcaaaattttattagcagttactaagtgtaagtaaataccaaaccttagtcataataaataaaagtaacaataaaataatcccaatgcgatgcaaatgacaaattgagttttaattccatagattaatcatgtgagggtccgagctgctcatgactgtaagcacggctagtataccagttttacactctgcagaggttgcgcatctttacccacaagtcatgttacccatctgccaagagacgaccaatcccgtacacctctaccgaggaggcgaggcagggtaacactacgaggcctttacaaagttccactagcttcagaaaacccgctacagtttataggaagctccagtgcaggaatccctcgcctgaccgccatcgcagcaaaatcaacccagtgacctccctacactgaccactcccgtactgcccttgcccttttcgggtaaggaagtcatccactagctttcctagttaatcagccaaggacatcccatactacccttatggtagcactgttttcccggatggtcgctccatgttcccattaacataatgatcttaacatgaacagtaataataaataaagaataaaagtataatcatgaataatgtatctccatacccaaatccacataaagcaatagcaagtactacccaaaaatatttcagtagtaaaacaaggtataaagataaccaaaactggggtaacctattggatcccatcaaaattaacctatgcagatcattatgaataataagaacatggctgggtaaaaataagtgatcaagggcacaacttgccttcaatgagctcctgctcagcaacttctatctgctgaacctcaggatccacagtagcttgctcgtctactcgcatcaacacaatacatacatagtatagcaaaaattaacatcacaccaaacatgtaaatagaatacacagtaaaaatctacacattaaaataagaacctaggaacataaatcattaattttggagttatggattttaagttatgaatttccaaaggttttatgtgcttgaaatatgattaaatgagaaattaattttcttactgtttttctgtcaaaacagagacactagatgacaaacaataatattataaaattttagaaattggaatgaatcaatttggactaaaaatgatttttctatgcattttacaagtttctgcaattaatttaatactaaaattcattttctaattgattttatgaatattattctctgtctaggctgtgcctcaatatccaggaaagacatgagcttcattataagcttcccgagacacaatcaacagtgccactggaccacgagtttatttcagtgtttggcgggggctctttaacaaaatgtacccgcgaaggggtatggccagatactggccgttcgatctaacatgagcgctcagattagatttggaactccccgaaccggtaacaagtcgcagccgtccgatcatcaaggaacacaccagatttaaaataacctaactagactaagcgccgcgcgatccagatccaacggtccccaagcccgatctgttctcgcccgcacactagctgatctctggcccagatttatttggccgaagcgttacacaaccaactaatcttcgtcgtccaaaaccggatcaacggtcagcgcacgtcttctcaactctgtctctctcaccgacggcgaacaggacccgacggcggtgccattgctgtgggcaattatctagcacgcgaagacctaagaccctcatctgaacgactctacacgacgctaggaagatatagaatccgatcgaaggccttaccagagactgggattggccgaagacgctggccacggagaatggcgggtccgcggcagagtgtgtacgacggcgagaaattccttccctgcggtccaccaaccgcgccagccgtgggcaccacaagcaccagaacgccacaacgaaggccccgaccgcaaccgaggccaaagcgacgaccaagtcgtgtattcacggtggcggcggcaccctcgccgcgagtcagcgcacggcgaggaaattggaagggcacatgcggtgcgagttggggagttgtgagggtagaacgaaggggagagggagacgaacccggttgtgctcctttaaggacgcggacgtggccgaggtgcctcaacggattgcgcgagatctccgcgctccgccatgctcggcacatccgttgacgggaaggcgagatgacaggcgggtcccagggcgcagcgagtcaccagggtcgcgtcgcgcgcgcggaggagcgacagacaagcgggccctgagcgcagcgaatcgcccggttcgcctgggcgcgggttggcggcatatgacgcgcgggcccgacttgtcagtgcccggttgggcgcgcgcgtgaagggagtctagggcctcgcggagtcaggctggctgggccgccatccgaattcggcccatgcaaccgaatttgtttctattcctttttcttttttcctactttcaaatctagaatctaaattcaaatcttgtgtccaatttttcctcaacttatattgtgtaatcataagtaataattttggggatatttttagatatatatatatatatatatttatatcattttttcttattctcaaacccaaatttctctgattttatttaatgttcaaattttgaattcaaatctagacttgccttaatcataatttttgttttgatgcacaaacaagaaaaagtccagcatgatgcacatattatttatgtgtttttggttatttaattacttaaataagggtgtttacatgtgatatcaacatagaaaaattttatataggaaaaccattcctttttatttggtttacaatgtcgggtattacaaagagtactaggccctccttgccaatcatacctaggatttggtgccccattctccaggtcgcaacgtggtgagtgcctgagtggtgactgggaagtgggtctagacacatgcgcgaaagtccaatagttctctggataggtacaaggcctgctaggttctctagggctttactcaacgtcccggggttgacgacgatgagacgttcaatctagtggtgaagcatgctactgtttgtgctggtgtctcattggatctctcgtttttggcctattcatcagctagatgtcaagagtgccttcctccataggactcttacatagactgtctattgtagtaaatctgtcggctttgttgactctgctcatcctgacatggtctacaagctcaacaagttctctatggtatgaagcaccccccgcacgcttggtatagcaagtttgctacatatccgctctccctaagctttgttgtggctaagtcggacatctttgtgcatctcttggcatagcagtgccactatgtacctcctcctgtatgttgatgacattgtgctcactacctcttcttcggtcatgttgcaccgtatcatcatagcaagaagtcacaatgaaggatctgggtcctcttcatcatttcctggggatgtcgttgagcgtcgctcgaatctttagcaatgttagtacaccctagatgtcctagagcgcactggcatgctagattgcaagccatgtgcgacattggtggacacacatgccaaggtctttggtgatggtgcctctgtcaacgacccactgtctaatgcagtcttgtcggcactctgtctccggttgtacggtgtttcttaggccaagctcatatcttggtcctccaagcgttaggttgtggtctcctgcttcagtgctgaggctgagtaccgggctgtcgctagtgtggtgtctgagacgagctagttgcgccatctccttcaggagtttcatagccctcaccaggagcatgcttgtctattgcgacaacgtcagcaccgtctacctcttcgtcaacctcgcccaacaccagcatacaaagcatgttgagattcatcttcacttcatccatgagcatgttgctgtcggagacgtccacgttcatcacatcccgatgagttcgtagtttgccttatttgatctttccttcttgttgctctcgaaatttctgttcagtttcaatatctgtcatggctagagtttcgactgcggggatgttaaattatttcatttctgtcgaagtgctatgggcctagagcccccgcccatgtaatatataatattgagctcactttttactccttccaacaatagcccactttttactccttcgaacaatgatattttgcatattctcttatttgatttagtacctctgtcccttttgttgcagcacacgtcattgagccctgatggaaagcttgttattattgttggtgatgacacagatgctttacttattgatgctaattcaggaaagactattcattccatgaaaggtcacttggatttctcctttgcttcggcttggagcccagatggcctgacattcgccacaggtaaccaagacaaaacttgtcggatttgggatgccaggaatctcaccgagtctgtccatgtcttgagaggcaacgttggagcaataagatctattcgttttacatccgacgggcacttcttgtcgatggcagaagcagcagactttgtccacatctttgacatcaaaagtgactacaataagagacaggaattggatttctttggcgaggtatccggtatgtccttcagccccgacacggacacactttatgttggaatctcggacaggacatatggcagcctacttcagtttggccgcctctacaattattcatacctcgactcactactatgaaggagcggcctcattgtggcgcttcccgacacatgggttctaggtggaagtgagataaataggagatgggggttgtaccaaacgccttttgttcttagatccatggtggagtggagatactccacggtgaatctaggtgaatgtcagatctaaattcactttttttattattgaagctctaccaaacaagctcttaggtatgatttggtggatttttagctagttggctctttcatctactatagcaagaaactgttttttatctctatccttaaaatgaagaatta

SEQ ID NO: 37689 - DNA, 1022 bp, Zea Mays
agcggcaggcacaatctccttctggtagcccgtacgcttcttctacaggcccttgcctgcccccctgtcccactgcctccacacaccattgtcatggactcatggtcaccaccaccacaccaccacacttcactcgactccacagcctccagtttatccgtttgctcgacaccattgctattatctcctcgctcgcgtaatccatcgttttccgccgcgatcagttgttcctgatcaatcctgtcgaactactactctactactctgcgtagatcgatcgggtcgatcaggctcgctcggctgaagttcatcggatcagaggctcgggctccggtttctcgcccgcaatgctgaagaaagcgtcagcaggaagagctgcggccgcgacggggcgcggcgatcccgcagcgcccgcctcgcgtcccagtcccacagccaaggtcgccgagggcggcgcctgcagcgccaggccggcctctcggctcctctccacgaggtcagtcccgagcctcttcgcggagtccccgatgacgacgagccccgccgcctccgcgcccgagctgctgtccagggccccgctccgctccggcggtagcccgggcgcggcgggcctggcgggcgtgctggtggcggaggaggccgacgagcgggggtccttgttgaggaacgggcgcagggtgctccgcgggacgcggctccgggtgcagctgccgccgccgccgccgatcgagttcggcgtgaagaacagggaggcccagctggcgctgctctcccccgtgcagcggtcgccggcgcggctggcaaggcggaggagcgaggtggaggaggagctggccggcgaggactacacctgcgtcatcgcccgcgggcccaaccccaggatgacgcacatattcgaggaccgcgtcgtcgagagctcgacctcgacctcgagctcgacctcttgcgatgggtgcaacaaggatgctgctctcttgctggtgctggaaagctctacatggtgctgtctctgtctcctggat

SEQ ID NO: 37690 - DNA, 1303 bp, Zea Mays
agagaagaatgggaatccaaaatcctataagaccctcctcccttcatgcacagctctgccgcttgcctccgccggcgagggaagggacgaggcgccgagccggcaaccgttttcggggttgctggcggcgattggctgcggttccgcatcaaggctggtcgaacgctgcccctcctgattggtaggtagctcgagatggatctgattcttccatataaggttggggacctcgcggagtccaaatccttggtgagcggttacagaggtgcatggtttcgctgtaagatacataatatgcgtgtcaggcttggatacctggagtgttacttggaatacattgattatccaggagaaacaattgttgatgaaacctggcaaattggtgatcgagttgattggttgaaggaaggttgttattggtctgggacaattactaagataatcaatgaagatctggtcgaggcaaatggaaaaggttggcatgctgctcgtctacttcagcattataaatctgaatcagatgatgataatgacgacaacgatagctgggatgcccggcaaacggtgtgcagagcttcaaacacgcctgaggaagctccaggccccatggtccctgcacctccgtcagccacaaacaacgctcccagccacatgtatcagaaggatgctgctgtcacatccacagaggacctgctgaagcccagctcaacatccaagtcgccagaccccaggcacgacgcccaagctagcactcaacctgcaggtacgggggtctccatgaagccggaaccggttattggagtctcaacaatcaagaaagaggactcctccttgacagaaggtgaggttgatggcggcacggaagagtgcctggagaagctgggcgcgatcaaagccaggctcaaatacctcatgcagggcacgcggctggaacatgagcgcagcgccaccttccgtgggtagtcaggcagatgaagctgcatcaaaggtgcaacttcacgcaggggtttagggtttagggccatctaacgcctgttgtggttgctgaattttgtgtcctgtggttacaggtattattgtcctgaataatgacgttgtgaataagtggtttgtttttttgagtgcggcaatttgtaggagctaagaggaatgtgttgctgagttaagttatgaattagaccgtgtccagcagttcactcatatggtcatcctaaacaccgtgcagtagagtttgaatattagtatgaggatggataaactggtgcagatagccttatgttgtgaatgaatatgttgctgagta

SEQ ID NO: 37691 - DNA, 2125 bp, Zea Mays
cgcgtacccgagccggcgcccgacccgcctccagaaccacaccccacgtccccgtcgcggcgggccaggctgcagcgacaacaccgcactagcctagcctccccccgccgctcggccgaatagaatcgattccccctcctccgtcgctgtccggccgaccgcggagagcggagtcgatcgggggcgacaacgatggtggttagcgtggccgcgaccgggcccggcacggacgccgagccggtgagctccaccttcttcgcgtcccgctacgtccgcgacccactcccacggtaccggatgccggagcggtcgatcccgcgggaggcggcgcagcagatcatcagcgacgagctcatgctggacggcaacccgcgcctgaacctggcgtccttcgtcaccacgtggatggagcccgagtgcgacaagctcatcatggactccatcaacaagaactacgtcgacatggacgagtaccccgtcaccactgagctccagaaccgctgcgtaaacatgatagctcacctgttcaacgcgccgatcaaggaggacgagacagctattggggtcggaacagtgggatcctcggaagcgatcatgcttgcaggtctggcgttcaagaggaaatggcagaacaagaggaaggagcaggggaaaccgtgtgacagacccaacatcgtcaccggtgccaacgttcaggtctgctgggagaagtttgcaaggtattttgaggtggagctgaaggaggttaagctatcagaagggtactacgtcatggaccccgtcaaggctgttgagatggtggacgagaacactatctgtgtcgcggcgatcttggggtcgactctcaccggagagttcgaggatgtcaagcagttgaacgaccttcttacagagaagaacaaggaaactgggtgggacgtgcctatccacgtcgacgccgcgagcggagggttcatagcgcctttcctctaccctgagctcgagtgggacttcaggctgcctctggtgaagagcatcaatgtcagcgggcacaagtacggcctcgtctaccctggtgttggctgggtcatctggcggagcaaggatgatctgcctgaggagctcatcttccatatcaactacctggggacggaccagcctacgttcacgctcaacttctccaaaggttcctgtcagatcattgcgcagtactatcaactcattcgcctaggcttcgaggtactactgttcttcgatcggttcttcctcctcttgatcgaacattctgaatatatatgtgcaggggaacaaaagggggtgctgtctgatacgtttcttgagggcgagtcgtttttgtttctgttctcgctttgtgctgccgtaacagcctcccaatctggtcgggttttttttttttggtgccgcttctatctggtgtgtaggggtacagaaacatcatggagaactgccaggagaacgcggcgatactgcgggagggcatcgcggcgacgggccggttcgacgtcctgtccaaggacgccggggtgccgctggtggccttctcgctcagggacagcagccggttcagcgtgttcgacgtctccgagaacctgcggcggttcggctggatcgtgccggcgtacacgatgccggccgacgcggagcacgtggcggtgctccgagtcgtcgtcagggaggacttcagccgcagcctcgccgaacggctggtctcggacgtccgcaagatcctgcgcgagctggacgcgcgcgcgacccacgccgtgagggtcgccaccgccaccgccgagcagtcgggcgacggcgtcgtggccaagaaaagcgtgctggagatcgagcgggaggtcgccgcgcgctggatgaacgccgtgaacaagaagaagacggggggcgcttggatgcgttggtccagttccgcgtatgtgaacaaggtgtcgtatgcagtatgcaaatgttcaggatccaggaaccacaaataatggatgtaaatgttgggtttggtgccgtatgttgggtgtggagtatatttcttcgccaggtatttgctgtaatcctgtccctttacgttcgtgcactgcaatgagaataaaaaaaaaataagtgtcgttcacggaacaggaactgtgac

SEQ ID NO: 37692 - DNA, 1175 bp, Zea Mays
ttacatattagtattagttgttgtccattgtatattagttgttgcccaacttgataacagcacggcggggtcccgttgatagtgaagcaaacaaaatgatcatgacctgactctgaaacctcgtggaggtggaattggaacccaggcccgcacagcaagcccatttgccggcacctacccaggctccccgcctacccatacttatacacgttatgacgccccaccgaagcggagaaaaaaaaacgtgctgtcttcccgtctcttcccaatgcggcgtctcgctctcctcttcctcctgcctctcctcctcgccaccggcgtcaccacggcgtcagcggagcccgcgacccctcccgcctctcctcctcctcctcctcctcctcctcctcctcctcctcctccaccgcctccgccgaccctcgccgagctcctcccgaagtacggcctgcccccgggcatcttcccctcgaccgtcaccgccttctcgctcgccagcaacggcagcctcaccgtcgacctcgcggggccctgctacgtacacttcgagtatctcacctacttcgagccccacatcacgggggtgctccgctacggctccctctccgacctccagggcatccaggtccgccgcttcctcatctggttcaacgtcatccgcatcaaggtcgacctacccccgcctccgcgctacgtctacctcgacatcgggtggatcacgcgcaagctccctgctgcggacttccagtcgctccacgcctgcgaggactccaggaggtgccgcctcacctccgcgcttgccgtcgccgccaaatggttccaggacttctttgcccaattttaggggatggggaaggcctacgatttgacaacagcagtggatgagttccctgccttcgagtcttcgacggccgaaaaggaattgtgtgaaccttgaacgagctggaacaccgccattgttactctctctacacgcgatgtagctaatcaagctgttatctcatttctacatctgtcgacgtttcatcttgtgggttgtgcataaacatgttgagaacatgtagcaaatatgatgaagttgcttgtttcatcatttggtcggaagcttaaagcagtaccgcagaaaaatgaaacaatctttttcagcagtaaataaagatgggaaaagggaagtttgc

SEQ ID NO: 37693 - DNA, 419 bp, Zea Mays
  misc_feature (1)..(1): n is a, c, g, or t
nacatctctgctgcatcccagcccagactcccagcgcggttgcgagtgcgcgggccgcgccgaactgagcaaccccactgttacgtgcctaaacattctacgagtattattgccgccgaggcccgaggtgcatggaccagactaccagaaataactagtactaagtctttttaaaattttactctaagtttaaccgacttattttatttaaaatatttgtgagactgaccgcagccgtgaccaatttttctcctatatcactttttgtatcatatcatcaatatttcaccccctaaattttcatctcccgcagcggttccctctatattatcccttatactccactacaattataaaatatcattatctaactcttttcatcttttattactattttttcaactattaaataggggagc

SEQ ID NO: 37694 - DNA, 3639 bp, Zea Mays
agcagcacgccatggctgccaactgcggaacctttcgtctactcatctttgtctgtttgtacagttagcagctagcgagtgatgtctccttcgccattgccactagcccactacacctgagcaagcaaggagcagagcatgcacaaaccctttattctcctcttgccttggagcaagcatcagagcaccacggctgcacgccgtgccgcagtcaacgccgccatcctcgccgctgctacaccacgagccatattgagccacggacaaacgccgatgtgatgtgtcgccgcgattctctcccgcatcacaccgctcgcgtcgcgacagtcaaactcgaccacctagattgctgtgccacgccctcgacgtcatctcagcaccagcccgaagcgcccaggaatgcaaagccaactccaccgcgccgcgcgtgcttgcacagtcgtcgcacgccatgtgcaccattgagccgcgaccgcctgtaagaaggggctcgagctacccctcgacgccgtgcatcttcccgagctgagccaccaccagtcctccgtcgtgagctggttcgccgcggccgtccgtcgtcttgccgttgcagcaccccggaaggccagccgagccataggtaagcgcctcctccacctccggagtatcctccaccagcccatcatcgtttcccttgctgtttgagccgtcgtcgagcccagtccgccatggccgcacctcccacacagcagctcgcccgtcgacccgttcctcaaaacctcgccccaaccagacctgctacaggttggaggcacttctcccctctccccagcaacccccctcacctcccttgtggctggattttgaactcccgatggtcgccgtgagggaacagagagagaggaagaagatgaagccttgtattctccgaccagtaccagttttataatttcacgcatctaaaataacacagacagaagagtagcgtgttggcaagctactacttagataaatgccattgccagtgttcaattcctagtgttggtatattttttccaaagtttttctaaaatcaaaccattcacattatcattattattattattattttctaaaaattaaactatgcatatttattaaaaaacacaatgtactcatatttatacttgttgtgtgattgcctattgtacgcgtgctcgttggcgactgttggagctcgacctcttacgctgacggtgtttgttcctaggtgaggaaaaacataaaatttgctagacttaggagtgacatgaaatgatacacctaatactgagggaatgagagaaacctttggctgatgccttgatgcatgttaattgcataaatatttgataccttgacacttggatgaaactggacgggaatgaaaccagagcagtagggtaagtgttggtgcatgcgctaccatggtggtagacttgagaccgagttgtcatggtgacatctcgggtttactagttttggttggtggctgctctggtgaaccataaggactgtgtgttggggtgccatctcacctaacttatttccagtgcgaccacatgagcttgtatgggcaagccttagcctaatcccactggctggcctggtagtcgtccgaggtggatatgttttgggttggggacccgagcggtcagaacccagggtttgtgggcggctaggcgaggttgagccatgactgggtgttggctatgatagagtcgtcttgggacggtgatgtgcgtgtggcactacacgacggttgatctttagcgacccttattagggaccgacggttggtcgctaaaagttatggaccgacgattggtcgctaaatacgtttatagcgacggtctgtgggtcactaaaagtctagaaatttaacgacttatggtcggtcgctataggggtaagtgtgtgactgatggtgggtcgctatagaggtacgtgatttttgtgtttcttatttactcaccaaagcccatctaaaggcctactaaacaaacgaccgtgtggaaccggctggggaaaactatttcgtggcggctagggtttaacaaatgccaaccacgctgctttgctagaccgccgccgatatctacggtcggattaggttcggtgccctcttcgcctctgtctcccgaggtctccctgcggcggcggtcaccgtagtggactccggccacccccacgacaaccggcaaaagggtaagggagtgcaagaactagggtacaccggcctcatgaacagctccattaacaatctctttgatctcatcacgaaccaaggtacgggagtgtgaactatgccgtgcaaagacctgcgcttcactgcctttgcccacacctcaggctagaaaatggttcctgattccgtcaataaccaagaattcctatgaagctacactcattcatttcacaattgctcatacgactgttctgctcctctttaggtaagttctatgtactacctcattcatttcactgccaatatttatgtcaagtaattccatggaaccgtgtttctaaattccacaaatgttgacagaattgttctacgcatctctatgtatgctccaagcactatctctttaatctacgacaagaatttcatagcagctttgactactattgaagttgatctttttactagtgtggtctgcttagcagtagcactacaactagcaatgtatggatgaattaaaggaagtgaagaaggcagacaatcttacataaactctacatcttaaaactgccatgattggcaaagaagctggatgcatcctttgcattggtgtattcttatcaccaagcagtaacgtgaagcaagtcctgaccagattgaagctctgtatcagtacgccaaatttcagtttgagtgtggtaactactcaggggctgctgattacctttaccagtatcgtgctttgtgcacaaacagtgagcgaaatgtgagtgccgtctggggaaagctggcagcagaaatcctaatgcagaactgggacgtagctttggaggaactcaaccgcttgaaggaaataattgattcaaaggttctaaccgggacgtgctttgttctgtgttctttgttctttgtgtacactatatcaccaaccatgttccttcctgatctttgggcagaacttctcatcacctctgaatcagctctagaacaggatatggctgatgcattgggctctgttcatcttctttaaccatgaaaatggtagaaatgggatcattgatctgttcttccaggacaggtacttgaatgctatacagacaaatgcacaccatcttattaggtatctagctactgcagttgttgtcaacaaaaggagaaggaatatgcttgaagagttgattaaggtcattcaacaggagcaccatagctacaaggatcccgtaactgaatttctggaatgcttatatgtaaactatgattttgatggtgctcaacagaaactcatagagtgtgagcagaatcagtataataatatggactatttggagtggtctttaaatgagcttggatgttggtgcataaggctgcaacaccgtctagtggaggtagataaggcatcaaaattgtatttttatttgcaaatgtagcaacaatatactaatttgatgtactttttt

SEQ ID NO: 37695 - DNA, 2201 bp, Zea Mays
tcattttcaccttcccttcctcccttcgcttccccttgagtgcagcaggacccccacctgataagagcggactgctccgctcttgtcctgccacccacgcacgccatggacgcctgggaggccaccaaggtggtgttcgaccgggtgcgggcgctggacccggagaacgcctccaagatgatgggcctgctgctcattcaggacaacagcgacaaggagctgatccgcctcgccttcggcccggagcacctgctccactccttcgtcgccaccgcgcgcgccgagctcgccgccaagcccgcgtccccgccgtcgcccgtgctcggcccgctgcagtccggcgcgccctggggcctcccgagccccggctctggagccggcggcggcggcggcggcgaccaccaccaccactcgcccttcgccgccgctgaccagctcgggtacgacggcggcgccgacgcgttctacgccgacgagtacgactgctggtcccccgcgggcgccgccggcgcccaccgccggagcttctcgctcagcgacgccgaggcggccgcttcgtggaggccctgcatgtactacgcgcgcgggtactgcaagaacggctcctcctgccgcttcctccacggcgtgcccgaagacgacgccgcggagcgggagatggccgtcatgcgcgccaaggccctggccgccgcgccgccgacgcagcagcagcagctcatggcgtccgcgtaccccttctcgccgtcgcccaagggaggcgtgagcctcagcttcctgctccagcagcagcagcagagcgagacccaaagggcggcggcgggcatgctgctcggcggcgaggacatgcacaggttcccggtgcgctccccgcggatggaccgcggcgacctcatcggcagccccgccgcgcggcagatctacctgacgttcccggccgactccaccttcagcgaggaggacgtgtccaactacttcagcatgtttgggccggtgcaggatgtgcgcatcccgtaccagcagaagcgcatgttcgggttcgtcaccttcgtgtacgccgagacggtgaaggccatcctgagcaagggcaacccgcacttcgtgtgcgacgcccgcgtgctcgtcaagccctacaaggagaagggcaaggtccccgacaggttcaggtccgttctcccttcttctccgttgcatattgcattgccattgcctgcctgcgcatgcatcgcattctcatcgttctctcttcagtcacattgcaatgcactgcacgttgcgttgcttgtttgtttcgatagcttccgttgccacctaaaaaaagcttcttttttcggttttatcgttttgtctggttgcaggaagctgcagcacacgcaccatggcggagccgagttcgtcggttgtgcgtcgcccaccggattgctggattccagggacccgtacgatctccagcagcctcagatcggatcaaggatgatgtacgggaacatagctaaccagcacgaggcgttcctgaggaggaagctggaggaggagcaggcagccgagctgcagcaagccatagagctggaggggcgccgcttcatggggctgcagctcctcgatctcaagagcaggggccaccaccatctcggttcaggcgcgcccatgcctctgcggcaagccaccgatggcaaaggcagcggcatcaacgggaacggcaacgcgtcccatttggaggatgccatctgcatccaagataagaggatgatgagcagccttgcaatgagtgctcctgctgctgctgatgcggaaggcgagcacgaggagcagcaggaagagggcggtggtggctgtgatggcagcagcagcagcagccccaagcaggcagtcaaccctggggaagaggaggtggtggaatctggtcctgtgacagcgacgcccaacgctgcttgtggattccaagaaagcagctatggcgtggtggaggtggagctcgtcttgcctgacagccccttcgcgtcccccaccaaggaggaggcctcatacgctgacgctgtcactactgcagccgctcggaacggtagcatcagcagcagccctcgccatgtggcccttttcgcacccgcgtcttccaccaccctcgagctgcccccctacagctcctcctccttctttcaggtgcccagtctacaggaagttacagcgtggtgttcctcttattg

SEQ ID NO: 37696 - DNA, 1069 bp, Zea Mays
gagaaaccacgcgtgtcagccagccattggatcaccaccattcgcgctgttcggcgtgcgcacccgatcccgtctccgtgcggctttgtgagtagagaagggaaggggaagcaggagcaggaggggttcgtcatcgcgtggtggccgcgccgctctgttcctccgtcccctcctccttccggctctcgctgtcacatgtcgtgtggtgtgggggcgctctgatccggatggtgcagcgccgcgggatcgcccacggccatgattgatcgcgaacgagcagttgcagtaactgcgtgaaatgctataccggagatgccattgtgcacggaggtggtttattttgaggaagagttgggacacagtttggtgaattttgttgtgtgctggtctgagagctagtgctgctgggattgaggaaatgcaagttaataatgaggcaccactagggtgcctcaagccaaatatttctcagtataactctccagagcagataggtggtgttgaagggtttcctgagaataatgaaaaaaggaatgatattgttgctgcggaaaaaatctgggaggcgactccaaaccaaggccttagcaggcccatctaccgacaagaattttatgcctggccatatatttattcagattatcaaatcgtgcgtcagccactaccttatggttttgacaaccaattttatcagataaatagggaccacggtttccctattgagaacagggttcaatatcttccattcaagatgctccctcaagtgcaactggaaaactcgaagaatgcttccaaacatatgttcggccgacgtatcatcaatttttgactgatttttgcaaggagcttactggcatacaacagattcaggtggacagaggtgtgcctctaggtgaagccttactcatgcacgataaatggctagaggacaagggcatcaagaacacaaactttgctattgtgacctggtctaactgggactgccgtataatgctggagtcggaatgcagatttaagagaatcaggaagcccccttattttaacagcttttgtgccagggagatgctac

SEQ ID NO: 37697 - DNA, 1045 bp, Zea Mays
atttttagacgacacccctacccgacccgatcggcgggagagcacgagacgccagcgccatccatcgcggcaaaagccgagacgacccaggaatctcggcaccgtcgcccccctttctctctcgctcaaaagttgctgctggagccctctcccctctctccgaccaccaaccatggatgaggcgcaagttgtggagtcaaaggatggaaccatctcggttgcttctgcatttgctggttatcaggaaggtgagagcattgctgcagtaataataattattagtctaattcccttgtcgttgcacagctttacctgctggcagaagttcaacattgccattgaccaatgacctctaagctgtgcaagacagggatcacaaattcttgacaaaagcagtggaagaagcatatcgaggagtcgattgcggtgacggaggtccattcggagcagttgtcgtctgtaatgacgaagtagtagtcagctgccataacatggttctgaagcacactgaccctactgcgcatgctgaagtaactgcaattagagaggcttgcaaaaagcttgggaaaattgagctctcagactgcgaaatttacgcgtcctgcgagccatgcccaatgtgctttggtgcagttcatctctcccgaatcaagatgctctgagaggcactgggttctaccagaaggccaacttggagatcaagaaagctgacggcaatggtgcattgatcgctgagcaagtctttgaaaagactaaagagaagttccagatgtactgatgctgagcagaagagagatctcagatttgtacaatgcttactcataaggacaagaaataatacagtgcccaaatgtccattgtttcgggaaaaaaatctcaattccactgttcaacattttgatgatgcctgaatttcttgttaacagacacaagattgttatttgctgtaaaatgtgcagttgatggaatatactttctccctgtctgatggtgccatttagcacattaaattcgagtatgaggtccctttcctgacgttttatgt

SEQ ID NO: 37698 - DNA, 1351 bp, Zea Mays
cgcgccggccggccggatccgtcggtcaggtcagggtcagggtacgtacgtctcgcgtccgtccaatcccgcgcccacgtcgtccctcgtcccagccgacgatggaatggcgacgcagtgcagagcccagtccaggcggtgcctgcgtcgcgcgctgtcctcctcgtgccggccgtacggggggtgtcgttgtcgcaacgacaggacgtacgcgtacgcgtccgagaggcggccggtcacggacggacctgggcccgtatccaatatccaaccgttctcgagagccggacccaacgaccatgcatcacgctcacgcatgtgccgtcgcccgcgctcgcgcgtccgtcgcaaacaccaaacgtcacgtggcgcgcgggcaggcgcaggcaggcaggcagggatgaggcgcccgagagagagagagggagaaaggcctgcgaatgcgagcccttccaagccgtgcggtgcgtgcgtgactccaccatgcatctcgtcgccatacgcgattaaacaaacagacacatcctgcatcggttttgaaatgcggagcagatcatacaccatgcagccccgcaccgcatccgcacatggttgcctgacgacgacgacgacgaccgttcctgtcccggcctctgctcgctctctgctctggcgtttttcttttttaccgctcaggctggccacaccaatcaagcggtcgtctcgagacatggcatggcatggcagccaaaaaggaaccgatctctaggcaaaacggccggttcacgacaaagacggccgcgccggcgcgcgctcaccggcaccgctcacaaggaatcaaagcatggcgatgcgatcggctgcatgcgtcgtcgcgcgccagacgcagacggccccgatcggctcctgcgaattcctcgcctcggcccgccgtcgtctctcgggaaggacggcgtacggcgctgccaacgccaccacaccggcccggtcgcgcgcccccatgcacgcgcgggcgcggccctgtgctgccgggaccgagatgtgcgatgcatgtgggcgcgtacgtacgttggtcgttggtccctccttccgtcgtccgtggtttcgtttagttaattagcgcccgcgggatctatctagctatcccgccggccgccatgcatgcatgcatgcatgtgacttgctatgagccgccgacgacagccacgcttggttctatcaccgaaagctgcgtgtcccgcagggtagttacggtgcaagttgattagtggttaaggtgcaagttgacgcgtggttttctctctctctctctatgcaccagccaatcagccatcggccatcactgagctgagacatgcactgtctagtctaa

SEQ ID NO: 37699 - DNA, 1335 bp, Zea Mays
aaaatagcaaatttctcgcccctggagaggacgcggtcatggcgtgcccccaggcgccgcacgccgcgggacgaggaggatgggggcggggctggaccctagcccgagcttcggcggctgctcggaccccgtgttggtggagctatccatgggcggggactactaccgcgcctgctgcggcgagcccgactccgatatccccgaggggcccaagctgccctgcgttggggacaaggagcctctttcctcttcagcagccgagtttcagtctggcagccccattttacaagagaaaattaagttgctcggcgaacaatatggtgctttaagacgggcacgtggagatggaaactgcttttatcgaagctttatttatgttttcctacctggtagtatctgcagtgtacttttcacaaatattatcgttcataattcaggctatgatcctttcttatatttgcttacaggaacacatcctagagagacaagacaaagctgaggttgatcacatcatggtaaaaattgaggaatgcaagaaagaagacactcctgtctcttggatatattgagttcacttttgaggatttctttgcggacatgagctttcagctagagacatagcatgtcacccaaagttttttctaccgtactcgagactttttgtgatagaaagaaaaaaaaaaagagacgcagcagatcaatcagtttgacgaagacatggccttgcgattggtctggggctcagcagaggcgagaatgaagaacgggtctcagctagtcagctgccaagtacgctgtgccttcccggcacctgaaagaagcaagcacattttcgactccgtttggtggtctatctttctgtttccacagtcagggtggttgggtggctggccggctgggtgttgctggagtgctgctgctctctgtctcttttcgttctgggcccttttcgctgcttaggtaggttccccgtgtcacgccatccaactcgcaaggagatagatagacagcgatcgtgcttcgttcatatcctcggaagacagcggtcatgcttcgttcatatgagcaaggaggaggaggcgtccaatcttggatcggaccacgcagttcagttcctcacaagcaacgaaaaccaaactaattgtgcaagaatgatgtaatcctcctccggggaagaaggcgtcttatgcgtgcgttctaattttttttggttaaggattagaggatgagggagttaataagtggcaggcagatggcgccaaattgtttgaaaccttgtagctgattagtcgcaatttttatgcgtggcgtacgggtaaacaatcataatctgac

SEQ ID NO: 37700 - DNA, 1477 bp, Zea Mays
attttcgcgtccggccctatccagaagtccagaaccttccccaatcacccacacggccacacctggccccgcccaacttccatttatgcacaggcggactcgcggactcggggctcgtaccaacaggaaaaaaggcccagaggcagtgccgtgaccgattcgagacgcaagagaaggatcgagacgaggcggcggttttccggggcagcatcgtctcggccacgaagatgtcttactcaaggggctcaagtgaaaggtatggatctcgctcaccttactcgagaagcacaaggtaccgaagtcgctctaggagtgtcgactctagtgatgctgaaaaccctgggaacaacctgtatgtgactggtttgtcggctcgtgtaacggatcgagatctggagaagcacttctccactgagggtgaggtgattgatgcaagcgttgtgtatgatccttggacaagggaatcacgggggtttggttttgttaccatggctgctgttaaagatgcagatcgctgcatcaaatatctggaccgttctgtgttgcaaggtcgggtcataactgttgagaagtgctctgtccattgaagattttgttgacagcaacagggtagatgttggtagctgctctgcaacaaactgatacaacctaacaccaaaccatgccaacctcagccaaagggcaaagagaagacgaggtagaaccccaacacctgggaagtatcttggcacaaaatcatcccgtggacggaggtactccacaagctactcacctgatcggaggggccgttacagttcccgctactcacctgatcggagggactgtcatggtagagaccggtcatactctccatatgacagaaggcgatcatactctccttacggcagggatgaatcatattccccttactatggccggcgatcatactcaccttactacagcagacggtatcgttcaaggtccccatactgctacagaagacgcaggtcaccttctgtttcgccatactaccgccggcacagccattccccagaatccgagagatcaacaagctattctcctaagaaagggagtaaaagggaaccctcgcgtagcagatactctggcaagagtcgtcattcaagggaaagccactctcatagccgcagttcgtactccaggtctgtgtccagggagcgctcagcttgatctgcgaggtgtgtcgtcctaggtggttataagatatgcgctgtatttgcatctatcagaacttgtgtacttcgtatattacgaacttgagaactgtatggatgtgtgcattgtgccaaattatgttcattctgtgctatctttctgatgctatcttgctattgttggtttgaacttggtaatttagtttacaaaatcattcgacatgtggagtccctttttatggaacatttcgttcattattttgggatactagtggaaatgtatgtggcacgcgtgtgtatgtgaa

SEQ ID NO: 37701 - DNA, 2186 bp, Zea Mays
ctcccgatccatccatctgcatcgtgggaacaagaagaacaatgggtataatgcgagtcgcggacgatgtggaggccaggttggtggtcggggcaggtggcggcggcgggaccgccaccaccacgacggagccgcttctccgccactgccacggcggccgcaaggaggaggacgaccaggggtctaagatccgggacagcccggaggcggagggggcgtccgactgcgggaggacggacggaggctcgctgcggatggtccttgtctccaccgccgtcgccgtctgcggctccttcgagttcggcacctgcgtcggctactctgcgccgacgcagtcagggattgtagaggaagtcgggctatctatctccgaggtccgtcgcaccatccttgtcttgggaaaataatttgttctttccctgcgcactcaaagtttcttttcctactaaaatctgttatgatatagtgcaaagcataggattgctgtaatggttggatctacctacttctaatcttctatcgtgctgagatgttcgatcccagtgtacgaaaaatatatatatcgatgacccccacagagtttagactgtctatgcatctcaatctgcagtttgcaatttttggatctgtactgacagtcggagcaatggttggtgccgttactagtgggcgcttggctgattttctcggacgaaaaatgaccatgcggatatcagctactatttgtatattcggttggctctccatacatctggccaagagcgctatcatgctctactttgggagaaccttgctgggtttcagcactggagttctttcttatgtggtgcctgtgttcatagctgaaatagcgccaaagaatctccgcgggggtctcgcaacgtcaaaccagctcttgatctgttccggaagctcagctacctacatcataggagccctggttgcatggcgcaatttggtacttgttggtttagtgccttgtgtcctcttgctagctgggcttttcttcattccagagtcgccaagatggctggccaatgtcggaagggaaaaggaattccacgcctcattgcaaaagctgcgtggagaggatgctgacgtatcagaagaggcaattgagatcaaagagtatattgaatcactctatagccttccaaaggccaggcttcgagacttatttctgagcaaaaatatatatgcagtcattgtgggcgttggcttgatggtttttcagcaactcggagggataaatggtgttggcttctatgcaagttatatcttcagttctgctgattccaatcacattgtttggggccatactcatggataggagtggaagaagggttctcctgatggtctctgcatctggaacatttttgggctgcttcctcacaggagtatcattctatctgaaggcacaaggactgttctcagaatgggttcccacactggctctttccggcatactggtttacatcggggcatactcaattggaatgggtcctgtcccttgggttgtcatgtctgagatattctcaatcaacatgaaagcaactggtgggagcttggtgacccttgttagctggctgggctccttcgcgatttcttactcgttcagcttccttatggactggagctctgcaggtaccttcttcatgttctcttcagccagcttgatcactgtactcttcgtggcgaagctggtccctgaaaccaaaggaaggacactagaggagatccaggactcactaaacaccagaagatagtaatgaatttacttcacactacagaataattaattctaagatggaaaaatgggaatttacaggacacagcagaataattccaagatggaaaacgaatgtaccgtcagacctctgctcatcgatagatatgtatacaagaaacaatatatataattctcacgtcctcccgcttcccctccctttctctcccgcaccacctccgtgtaatacgtagtgtactgtgtaccctatgtaggttaaggaatgctgcagattcagattacgcattatgtaccgtgcccctccagattgtttgagcatgagcagcgacagaaccgacattatgtttatgtaccatgtccctctagatcaaccagcagtacattttttatattcaggatcaacatttatgtatcatgtttttttagggaaaaggctcag

SEQ ID NO: 37702 - DNA, 363 bp, Zea Mays
ggagaatgggttgtgagccgttgattccgcatctagggcattggaggccccctcaccctctaaccctagccaccccctctcattttccccgttgcagccgaccccctctccctctctcacccttgaagccgacccctctccctctatcaccctttgcagccgccacgccctcatcctctccaagcagctgcaccctcctccacatgcaaaccctagccgccacctcccccattccacccctccaaggtgtagccactccctccctaggatcttctttgggtttgtgcaagtctccattggaagattggtgggaggaagaaggatggggtgaagaaggagttcaaggtggtggacatccggatc

SEQ ID NO: 37703 - DNA, 1560 bp, Zea Mays
agcatttccttttgcctctctccactctacctctcctctcctgtgcgctacagcgagggggaaggggagcgtcgaccgattcgtcccggcctcccgtcccgccgctggcctcgcctgccccgatggcggcggtggcgatccaccagttcgccgagtgcatcacctgccacgcctggagcccggaccagtcgatgattgccttttgtccaaacaaccatgaagtacatatctataaattcttcacagacaagtgggagaaacttcatgttctgtcaaagcatgatcagatggtttcggggatagactggagtaaatcatccaacaaaatcgtaacagtttcacatgatagaaattcatatgtttggacacaagaaggatctgattgggtacctaccctggttattctaaagttaaatcgtgcagctttatgtgttcagtggagcccaaaagaaaacaagtttgccgtgggaagcggtgccaaatctgtgtgtatttgttactatgaacaagaaaataactggtggattagcaaggttatcaggaaaaagcatgaatcttctgtcactagtcttgcatggcatccaaacaatatatatcttgcaacatcgtctacggatggtaaatgcagagtgttctctacttttatcaagggtgtagacacaagaggatcaaaatcgagcacttcaaccgattcaaaattcggagagcaaatcgctcagcttgatctatcatctacctgggtatttggtgtaaggtggtcaccaagtgggaagacattggcctatgcagggcacaactccatgatttatttcatcgatgaagtcgaatcatctcctgtggcacaaaatttggcactgcgtgatctgcctctccgtgatgttctttttgtctctgagcgcacattgattggtgtcggatttgactgcaatcctatgatctttgctgctgatgatactgggctttgctctctgaagcccttggaaagctatacggccaatcaaagcaagggactagtagtgataccgttgaaccatcaaaacctcgtggcggggcccatgagaattgcataacgtgtattgtacccttgagaaaaggaagcgacggtagtatcaaacgattcagcacatcaggattggatggtaagatcgtggtatgggatttggagaatcacgtcagcattgcaaaatagctcgagggagactttatcaccaatcaaatcgagggaactcctgtcattaccagccgtcctgcaggttttcaagatccagggccagccagatagattgttttttttttaatttttaaattttgttgtacctgtacacagaaacattgccttagcgtagggacagcttgcatctatcaagtagcttcatttttggcgagtaattttgccctttgaattgaatctatacaatattatactataattttagttaggtcgtaggcagttgacgtgatcccgcgttctttcgctctttctttccggtgccctgtgtaaaataaccacacgtggaatcttatctatccgggacttgtggtcatcttgtttcttctgct

SEQ ID NO: 37704 - DNA, 2756 bp, Zea Mays
tgcgaaaaatgtacgggaagcgcggggaagacctctcatgagaaagcagaggcacacacgcacactgcacatgcggctcacacgaaccacacccttgcgaaatgcgaaggtcggagtcaccaacatatcgccggcctctcgtctcttccccgatagcatatcgatcgccgaaacggaacaaatttgtgtgacagagagtgggtgagtgagtaagtgtgtgtgtgtgtgtgtgtgtgtgtgagagagagagagagagagagagagagagagagagagagagagagagagagagagagagagagagagagagagtaatagagtatcagttccaaactcgccaaagtcacaaggcatccatttcgaactacgctgaatttggcagttgaacatttcaaggacgagacacaatttctcagtacaccatgctaacggcctcgccgtcgtctcaggtgaagccgcaacaatggggtacatgcggggtcagcgtggcatcgacgccggcgcttcttccgccaccggccgccggacggcttgtcgccgtcgataccaggaggaggacgaggacggttgcctccgccgcgcttggtcctgtggccaccgagcccgcagaaaggtctcccgtgccacagcccccgccactgtccagcgacgaggagacggtgctccggctcggcaactacgtcccggtcttcgtcatgctcccagtaagctaaagctaaacgttccaccagagacacgcctgcaaaaaatcgatcaagttgcatcactgtccaatgtccatgatgaacacgacgtggcagcttgaagtggtgaccaccgagaacgacctggaggacgcggggaagctgcgggagcagctgcggcggctgcggggggccggcgtcgacggcgtgatggtggacgtgtggtggggcgccgtggagggcgccgggccggcgctgtacgagtggcgcgcgtaccgggacctgttccgggtcgtgcagggcgaggggctcaagctgcaggccatcatgtcgttccacgcgtgcggcggcaacgtcggcgacgacgccgtcagcatcccgctcccgcggtgggtgcgggaggtcggcgaggccgaccccgacgtgttctacacgagctccagcggggcgcggaaccaggagtgcctctccattggcgtcgacgacgagccgctgttccatggcaggactgccatccagttgtatgccgatttcatgaagagcttcagggagaacatggcggacttcctggactccggcctgatcgtggacatcgaagtcgggcttggccctgcgggggagctgaggtacccgtcgtatccggagacgcaggggtgggtgttccccggcatcggacagttccagtgttacgacaagtacctggaggcggatttcaaggcggcggcggcggaggccgggcacccagactgggagctaccagacgacgccggggagatcaacgacacgccggaggacactgggttcttcgcggcggagcgagggacctacctcaccgagcaggggaggttcttcctgacatggtactcccgcaagctgatccagcacggagacagggtcttggacgaagccaacaaggccttcctggggtgcaaggtcaagctcgccgcaaaagtgtccgggatacactggtggtacaggcacccgagccacgccgcggagctgacctcggggtactacaacctcggcggccgggacgggtacgcgccgatcgcgcgcatgctggcgcggcacgacggcgccgtcctcaacttcacctgcgcggagatgcggaactcggagcaggccgaggaggccctgagcgccccggagcagctcgtccagcaggtgctgagcgccgggtggagggagggggtcgaggtggcgtgcgagaacgcgctgagccggtacgaccgccgcgggtacaaccagatgctgctcaacgcgcggcccaacggcgtgggtctctccggcgccggcgccggcgccgcgcggcgcagggtcgcggcggtgacgttcctccggctctcggacgagctcctggcgagcaacaacttccggatcttccggaccttcgtccggaaaatgcacgccgacctggattactgccctgatgcggaccggtacggtcggcccctcaagcccctagagcggtccgcgccagagatgcccatggagcggctgctggaagccaccgcgccggcgccggcgttcccgtttgatccggagaccgacatgagcgtcggcggcgggctcgcagaggctgtcgactgggtgctcgacaagatcgcgtggctatttggataggatcagaatcagatcacactcaggcgatcagcatttccgttggacacgaaccattgatccgcaacaggaatggcatggccagtgatacatgcagttgcgctagcagcaccatgtcatgacaccgacattgtacctgtacacgcttctgcttcgtcctccttttagcggaaggctatttatgatatactgatgaaatttacagcatcttgggtaagatgttttagatgttgtttgaattttcacgtattcatgttaatgtacgtgtattaggggtggtttcgtgtagagtttagtttaaatttcacgtaaatttggctaccatatagattgaggtggatacatgtcctgagccaggcttaccgaagaaatcgatggtctgtcctacgaatttttttcccagaagctttatgtaaaaggaattagttaaatatatttaagagttgtgtcgtc

SEQ ID NO: 37705 - DNA, 530 bp, Zea Mays
atacaaaattgtataaaaatagggtctttgatccaccaccgctcgtgcctagcgatggctggcatcgtcgctggaggtaggacgccagagggcgccactccggggggcgtgcctccgaggagccgacgtcacgcacgcctctcagatccaccactgcgtgtgcgcctcccaaatcctcgatcctgggagaacaccaccgtcggtcatcggtcggtccttggggagcgccgccgtcgcatgatcctgggagagtgtagccgtcgctcgatccttggggaggtcgctgtcgctcgatccttcaggagcattgtcgtcgctcgatcctggggagcgccaccgtcggtcgccctcctcagggcgccatcaccgctgcccccgggatcgtcgtcgctcgcacgcccaaggaaaccgccgccgctgctcgctcgcccgagggaatcgctaccccgcaaaacctaatccctggcgacttgagggtgttttatagccatctgaacctggtgcggttgaaccggatgacaccattgaga

SEQ ID NO: 37706 - DNA, 1922 bp, Zea Mays
gagaaattgtattagggagttgctatgaactaaccctaatcacacacactcctaactcccatcccatcccatcccatcccagccgccacagctgctgctcgccctctccctgtctcctctctctttccagccacggtttccccttcccccatccgcgcgctagggcacgaggcaaatctgtggccctctcctagtctcctgaagtccgactcagccgtctcccagctcccgctcgctcgaactcgggttggggaggcacggagtcactgaccccttcgcgttaggcggtgcccttaccggctcttcgtctaaggtgtagtcaagctgccggccacgcccggcacccccctatccagtacaaggccttctccgagatccagtacaaggtcgtcgtctccaagatctgaccccgacgctagtgaggagggaagagtgggtggacgaagtgggggaggatgagcgaggagaggccggtgccgcggcgggagagcccgtggggtctgcctgagggcgacacgcggcagcccaaggctcaccgctgcaacgaccgcgccgaggacgtcgtccaggcttgctttgaagggaacccattcaagacagttccaggcccatttaagctcttctggcaatgcatgcgctcaaaacctggaggtatttcacgaatggacctgtggttttcagggaggaaccaaccgagccctatacctacctgcagctagatcctccgagaagggtggaagtgaatctggagcaaacaggaagtgaaccttgaacgagcatgcctagtttagcatctcgtgcctatttgtcttcacctttcgagcagactttttcctcctagggatcacatcatgtgagcacaaagctgcatatgtttggatgtttatataatctacctaataaaccgtgatccccagagctgcctgtccaggctgccaactccttgaaatttgctgatgctggtgtaagaattgtgcccctttcttctgataaatggtgcacgcccaagtccacatgccgccagacatcagagctagtgcatctgaatgcttccactatgggtctaagcagcagtatttcggtccagaaaaccttgtatgaggttttatctgtgagcgaagacgctacgtatgatgaaattcgtgcagcatacaggtctgctgctctgaacacacaccctgacaaggcacggacacctctcgagtcatgtgttctttccggtgagcaacaggaattttctagtgtgcagaaagcatgggaaatcctacgccatcctacatctagagcagactacgataagcagctgcagtcatccagacagaacatcgagatcatcgcatctgaagtccaagtcggggatatgatcattgagagcactgccgatgccgatactgtagagctgtcgtacccatgcaggtgcggtgattacttttccatcacttcgtgcgagcttagcgggatgggaatttccgtcagtggagatggagatggagaggtagagctgcaggcgtccgattctccgtcggcttccgttgttctgggctgcggctcttgttctctcaaaatacggttggttttatagatggaactccatgatatatattgtgtgcggctcagcaatgctcactttaaactttagcagccaccacatgtttctcaaacactatgcctcctggtctgccgaaatcaaaatagtgcagcttaaccttgcctgttcctatttccgggagagatgtcgagtttgtaacctgatggtggttgcgttgtgataaatgacgttttttgaccgttgttatcagctaaccaccgctgtcgaatccagctgctgggaaatccaaagttgttccggtggtggttattcggtagatgagatcttcagttaatgttgttttacaggcccgatttaatggtcccatctgcca

SEQ ID NO: 37707 - DNA, 1466 bp, Zea Mays
ccaattcctacttaaagaggtcacatcacaacacttttcatttacttatgttatgcttggtgctgttgtaaagttttctgtatctaaaaaatcacactttttagaacactattttatttatttctgtctttttcgttcacgctgctgctgatggcaggtatatgctatagaatggtgcatagaacttcaatatgcaatggaatcctaacgcgttacagcatagtacccatcttctgtatgatgtctggcagtattccttgctgaattctaaaaccaatcaatattcagattgcagtatttgctggtggtgtcgatacctcagcaaccgaaacaaagggaacagtgttgatccattccgctgagcaggtgccaaggttattgtcagtggagctgcagttggtgacatggcgctacatttttgtgaacgttacaagctgatggttctgaaaatcagctcgaagtttgaactgagaagattctgccgtactactggggctgttgcaattttgaaacttagccaacccaatgcggatgaactagggtacgcagactctgtttccgtggaagaaattggtggtactcgggttattgtcatcaagaacgaagaaggtggaaattcagtggctactgttgtcttgagaggcagtactgacagtatactagatgatcttgaaagagctgttgatgatggcgtcaatacgtacaagtcaatgtgcagggacagtaggataattcctggtgctgctgcaacagaaatagagctggcaaagagattgaaggagttctctttgaaggaaacagggttggaccagtatgctgttgcgaaatttgctgaaagctttgaaatggttccaagaaccctggcagaaaatgccggacttagcgcaatggatgtaatatcctctctttatgctgagcatgctagtggcaatgtgaaagttggcattgacctggaggaaggtgcctgcaaggacatcacgaccttgaaaatatgggacctttatgtcacaaagttctttgccctaaaatattctgccgatgccgcatgcaccgtgctgcgggttgaccagatcattatggcgaagccggcaggaggtccaagaagagatgcccagcctggtggcgggatggacgaggactagtttgactgtgattgttctctttgtgtatcacgtacgcaatgtttcagagcagggaacatcatgtcttatttagggtttggttctgtagaaggttttggtgcctgtagttcacgtttggaagggttgcacggctgtgctggtatcgtatggggaatttgcttgttctttcctggtgtattattgcagtgccgatgtattattcattcgagggttctttccttcagttcatcataccgactgagctcatatgagtgttacttcagtttttttattatagaagcaaaaatgttccagccttttatagtcttctgcgtaaaaaatatt

SEQ ID NO: 37708 - DNA, 1785 bp, Zea Mays
cttccctactcctaccaagcgcatgccacaatgcccagactataaaaatcgaagcccacgccgggagctccatccctaaaaaaaaacaaaagccttcgcttcgcttcaccactctatcgctccacggccggccacagctgcgtgctgtcctgggggagcagcagcagcttcggcgggaggggaaaggagctacgatggagaggttgggcgtcggcgtcggcgtcggcgagctgccgccggggttccgcttccacccgacggacgaggagctgatcacctactacctcctctgcaaggccgtggacggcggcttctgcggcggccgcgccatcgcggagatcgacctgaacaagtgcgagccatgggagctcccggacaaggcgaagatgggggagaaggagtggtacttctactgcctccgcgaccgcaagtacccgacgggcctgcgcaccaaccgcgccacggcggccggctactggaaggccaccggcaaggaccgcgaggtccgcagcggccgcagcggcgcgctggtgggcatgaagaagacgctcgtcttctaccggggccgcgcccccaggggccagaagacgcgctgggtcatgcacgagtaccgcctcgacggcacctacgcctaccatttccttcccggctctacgagggacgagtgggtgatcgcgagggtgttccagaagccaggcgaggtcccatgcggccgcaagcaccgcctgggcggccccagcgccgccgccggcgagtcctgcttctcggactccaccacctcggcctccatcggcggcggcggcggaggaggagcgtccgcgtcgtctcgcccgctgctcaccgtcacggacacttcctcgccgtcgctgttcgtggccaacgcgaacgccgccgccagcaacaacaacggcaacccggtcaccgggcgagagctcgtgccctgcttctccactaccgccagtcccctggaagccgcggcgctcggcgtcgtcgggcacccgtacaacgcggccccgctgcgtctgggcttggacttcgaggcgccgtccccgggcttcgtcgtcccgaacctgcgttccctgcaagtgcaggacgacggcggcctgccgctgttcctctcggcagcagcaggcggcggcatgtcgtccgcgacgctgggaataatggggtcgctgggcgggtctctccactgcccgccccacgccggcatggatgtcgtcaaggtcgagggccgcgccgcgccgccgcagatggctgtcggccccggcctcctcgatggcgccttcgcctggggcttctagtgctcactgctcaggcgctgcacgccgccgtggcatatgggcatgcatgcatcaccagcaaaccgatggatatatatatgcctctccacatgcatgtggtagttcgtggtttctctgcatgcgttgtacgttaagcttcgttagtaagtggaagtggcagagagtcgtcgtttatgtacgctattaagcttgattagtatcaggatgtggctgaccgaccctccatgcatgggcactccaaactgtagccttccagcagctttgttcgtggattagatgtgtcgtcgtgtatgcctagcgtagtacagtactcatagttcgtgctgtggaatcgacgggatgcgatgtgccctgcctgctgctgagctctgcaggttctgactgcgtgcttgtgccagctagtgcatggtggtatggctgggggtgctactgctcgagagcgctaaaaagtccacacggccgtttccctggcacggcgcctcag

SEQ ID NO: 37709 - DNA, 2214 bp, Zea Mays
aaacgctactacgagctcactagctggtagtactccagaaacgacacctcgccaactagtccagtccagtgccaaagagcgcggcagccgttttggcaagcatggcggtggtggtggcgggcagcagggcgagagcggagcaggcgaggcggcagtggcgggagcaggagcccagaagccccgagatggccgcgccaccgccaaggtcgaccatgccgcggccggcgagggcggcggcggtcgtctactacctggccaggaacgggcacctcgagcacccgcacttcatggaggtcgcgctttcctgccccgacggcctccacctccgagatgtgatggatcggctcgacgcgctgagaggcaaagggatggcgcgcatgtactcgtgggcgtccaagaggagctaccggaacggcttcgtgtggcacgacctggcggaggacgattacatccacccggtggtcgcccgggagtacgtgctcaagggcaccgagcgcctgcacccggcgctgctcgacgcggcggccgcgtcctcctcgtcctccgccggctcgcaggagacgcccaccacgtcgtcctccgccaggtgggaggcgcaccggatgacgatgaagggcgcgtgcggcggggctgaccttggcgagtacgtggcggcgtacatgggcgaggagcgcggcgcggacgccgcgacgcagaccgaggacgacggccgcggccgccagaggcgcgtccagtcccccgccgcgcaggaggagctgagcagggcggagacgtcgccgccgacggcgtcgacgagccccgaggcgctggccaaggcggacgggcgcgccgtgctggagggcgccgtcagcggaagcggccgggccagggcgtcctccgtgctgatgcagctcatctcgtgcgggtccgtatccgtgcgggacgcgcgcgcctccccggtgatgccgcgcgcgcaccaccaccaccgcccaccccggccgccggccgtggaggcaccgtcgtaccgccgcgccaagctcgtggtggaggacaaggagtacttcagcgggagcatcgtggagaccgcgacgaagcgctcgccggccgacggtgtgacgtcccgggacgacctggccgttctccggcggtcggcgtcgtacaacgcggaaagacgacatggcagcagcaggatgataaagctggagctggcgaaggaggccggggacatgcacggccgctgcatcccgcggaaggcccaagcgcaaggacgacgacggatacctggtcatctcctgcagcgcgcaggggaataacaagggatgacgcggggccgtcttggttcgttggtagctagcgcatggccatcatcatgcggcgcggcgacgagcttaggctagctagctggtcccccggcggccggcgagaacggcgacctggcgagcgtgcatgtgtgcctttctttcttgcgtcgggaacagtaagtagatgagtgtccaccactgctactccagtttggtgtcgtctgctttctttagatgctctgatagcgattggtgaaatgcctgtgattttacgtgtgagctagcaccttcatgtcgatacgtgttactgcgtgtctgcctcgtgctcgttcgtggtctgagctgtttagtgcctactgcctagtcatcatctcattctctctttttgtgctactgggtttcaaaaggctattcttcacgtgttcacggactgtaccgtacaggcgtgcgtgatgagcccgcccaggccgtgctgctgcgtgaatccgtgaccgtgatggatgtagtgcaatctgcaatggtagcacggcgccgacgcgttatgctatcattacttacctcccgtcctcagattcctcccagcagtccccagttctttgatacgtagaatctggatgctcgattgcgtcagttcattcccctctgatctgaggtgaggttcttgatcgagtgtaaaaataaaataaaaaatgaagcctgaccagacagttcggtccctactattactgcttcaccttacaatttgtctgcctccaaaccagcacggtccccaacgatgggatcagctccctcctcctgaacctgaagcctgatccaatttctctcacaccagtctctttccagactgatgttagcgactactgtacagtgtttttttttagcttgcaaaggtggcaatctcggggaagatgtggcaaattgagtgacgagttga

SEQ ID NO: 37710 - DNA, 968 bp, Zea Mays
cttcgacccgcgccgcgcctcccgaaagtttcgaacaaaagtccacaaatccccttcgccgtctccggcgagccccgcccctcatcgccgccgcgccaaagagacagtgagaggggggatggatcagtccatcagaaccgcatgcgagttcctctcgtcggtgctaaaccacgctgagtcctcgtcccgcgagctcgccgacgccgtctcccaacgccccgtccacctcgagatggcgaggacctcgttcctgcagaagctggagcacagggtggaggcgtcggccgccgacttgcagcacatcgagtccatcgccctcgacaccgtctccttcgaggagctcctcggccactgcggcgaggcgctcaaagtctacgcgcgccacgccgacgccctccagtcgcacctcgcttcctttggctacgagcccccggacgcacaacaccccgagatcgatgtggatgtggaagatggagatgtcgggaaggttggggaccctggagatagatgcctcagcgtgtcgcgttcagtgctcaggtcgggtaagcggcggtttgatagccacagcgatgcgatatttgaagagtcactgaaggatcttgggttttcagatgcttgtctagccactctttcttctgaaggcgcacattatggtgagagcccaaagaagctttacaagaatgctgaaagtactgatgatggcgaaaagatcatgaatgaagctgaaattatgactcccctaaatgaaagaaatggtcaaggtaattcttttgaaggagtgataagggcatcaaaggaggattatgagcaactccctccttatatgaagagtctagcatcatgggaggagttgcaggagggaatatccaaactaaattcatacttgggtggtgacaagttgcaggggagtgttgctttgaaccaggaccgtgttgcagagataggattggaatgtaggtaactctagg

SEQ ID NO: 37711 - DNA, 453 bp, Zea Mays
tgcgcgtggtgcgcatgtggcccagccgagatctggtcattagattcaatagttgtggtactggtagcatgtggcccagctgagatctgacagttcttagaaaaattcagctttcatttccaatcgttacagctttaaactattatgatcgttagtttttccttggcattattacttggagaaactattcaaagcatccactttgcttttgataaccatgaatttctaggttcatgcaaaagcatttgagtttgctaagttgcattctaagaacatatatcaataacgattggaaatgaaagctgaattttttaccagcgaggggctactgaagtttgcacctggtggtgtgagctgcgcaccacctccttcagaagcagatgtcctgtatatggaagcggcaggaggtggaagcactatatatgacacatctatcgctcttgttgattgctg

SEQ ID NO: 37712 - DNA, 2085 bp, Zea Mays
taaatgcctcgccatcttcgccgctccatccaagcacccacgccacactcctcacctctcctcgctccacgcacgcgctctctcacccgctggctattagtcgtcgtcccttggatttcgacactctctctagcgggcgcctgttccgccgccgtccatcgatcctagctagctagctagctagggcgcgaccgtcgtctcggtggttgttgacaggtcccgtacgtgtgtgctcgccatggctcgtggcgacggcgggcagctggcggagctgtccgcgggggtccgcggcgcggccgcggtggtggaccacgtggccccgatcagcctcgggaggctcatcctcgccggcatggtcgccggcggcgtgcagtacggctgggcgctgcagctctccctcctcacgccctacgtgcagactctggggctttcacatgcgctcacttcattcatgtggctctgcggccctattgccggcttagtggtccaaccgctggttggcctgtacagcgacaggtgtacatcgagatgggggagacggaggccgtttatcctgacagggtgcatgctcatctgcgttgccgtcattgttgtcggattctcgtcagacatcggagctgctctaggggacacgaaggaacactgcagcctctaccacggtcctcgttggcacgctgcgatcgtgtacgttctggggttttggctccttgacttctccaacaacactgtgcagggtccagcacgtgctatgatggctgatctatgtgaccatcatgggccaagtgcggctaactccatcttctgttcttggatggcgctgggaaacatcctaggctactcctctggctccacgaacaattggcacaagtggtttcccttccttaaaacgagcgcctgctgtgaggcctgtgcgaacctgaaaggtgcatttctggtggccgtggtgttcctagtcctgtgcctgacggtaaccctgatcttcgccaaggaggtgccgtacagagcgaacgagaacctcccgacgacgaaggccggcggcgaggtcgagactgagcctaccgggccacttgccgtgctcaagggcttcaaggacctgcctcccgggatgccgtccgtgctcctcgtgactgccatcacctggtttcgtggttcccgttcatcctctacgacaccgactggatgggccgggagatctaccacggcgaccccaaggggagcaacgcccagatctcggcgttcaacgaaggtgtccgagtcggcgcgttcgggctgctactcaactcggttattctagggttcagctcgttcctgatcgagcccatgtgccggaaggtcgggccgagggtggtgtgggtgacgagcaacttcatggtctgcgtcgccatggcggccaccgcgctgatcagcttctggtcgctcagggactaccacgggtacgtgcaggacgccatcaccgcgaacgccagcatcaaggccgtctgcctcgtcctcttcgccttcctgggcgtccctctcgccatcctgtacagcgtcccgttcgcggtgacggcgcagctggcggccacccggggcggcgggcaggggctgtgcaccggcgtcctcaacatctccatcgtcatccctcaggtgatcatcgcgctgggcgccggcccgtgggacgcgctgttcgggaagggcaacatcccggcgttcggcgtcgcgtcggccttcgccctcgtcggcggcgtcgtgggcgtgttcctgctgcccaagatctccaagcgccagttccgggccgtcagcgcgggcggccactgatcgaacccggccggggccggccgccggcacgcagcccggcaagagctgtatgttgttgagagttgaacagaaaccatgcatgtgtgcttctgtagttctgttgtttgtggtcgatcgatgggcgttgcgtggcagcgtgggcaagcgaggcgaggtgcgcggatccaaaaaaagggccattcgatcaatcaatgtgtagtagagtacaactagacgatgatgttcacatcatttgtctttaatacataccggtttctattgtctttacaatatttttgtctatattaa

SEQ ID NO: 37713 - DNA, 2302 bp, Zea Mays
ctcgtgaccacctctgctttacgcggccttgtcctttcatccactgatccacctcgccgtgcatccatatagcccccgaggggcctttcctctgcacgtagccatatcacaccgcacacagtactcgtcctccttgcagagcttgcaccaacacgccaccttaccttgctttgctcgcactcgcacacagttgcgagcgcattgcttgcattgcgcagccgcaggccgcagcacgaagctagccagtaggcggtagatggcgagcagcgcggggaaccgcttcctgaggcagctgagcgcgagcaacggcgacgaagcggtctgcggcggcctgcagatggaccagcaggagtacggcggcgccggcgtggggaggaggggatcccggcggtggtcgaagaagcgggccgccgccgccgccgccgcgaggggctacggcgccggcagcgggaatggcgtgaagcagccggcctctgccgcggggaagcgggtgatggtggtggtggacgagagctcgggagccaaccacgccatgatgtgggcgctcacccacgtcgccgacaagggggacttcctcacgctgctccacgtcctgccgcgctccggcagcggcaggggcgaggaggcctcctccctcgccaactcgctcggcacgctctgcaaggcctccaggccagaggtggaggtcgaagcgcttgtgatccaagggcccaagctgggcaccgtgctcagccaggtgaagaagctggaggcctccgtgctggtgctcagccagtgcaggccatctccctgctggttaagctggtaaggcactccgcaccccgtaccccttctcctatcttatccgctctgcatttgtctcggaaatgtgaagctctcagaggtcaactatggaccagtaaaattggggtgagggaatctctcatgatgccaatccatagcgtttcgtttaaaaatggaaaacgaagcttagacttcagaactagtaatttacatgtctgcaattccagcagaatattcgactagtatcagatttagcttatcctctcaggtaaacaatcctaaaagcaataggtcaaggctcaggagtgagctgattggcacttatttagttgcgtttgcgtctcaatgtatactttctgtaagataaatcaggtaaaaaatgtaattatgagagggcctactcgcaagtggtggccaaactatttgtaaagaatcctcgctcgccaccgttcagtactagggtccatggctttgggtgaaaataacgcctttaggatgcagctccatgtgcaatccataaatccaagatgccatgcatgtccttctagatacatctctcccaaacaaaagcaagaaccacgcacacagatgccagcgagatacgagtacagtacactttttgctgcaatgtgacatcacatgtggaggggcagctgaacctctctaggttggataggattattagggcaaatgtagtaagtactcttcacatcagtgtctgataaccagccgttgtttgagcaaattccaatgctgtgaccctttctttttgcagcttcctgcggagcagcggcgaggagtttgtggagcagtgcatcaaccaggcggagtgcctgacgctggcggtgaggaagcagagcaagggcgtcggtgggtacctcatcagcacccggtggcagaagaacttctggctcctggcctgacaaccatgcattttacctagctagttactactgctacatgatcacatttgttttaagtcactcccgtatatgtgctgtcatttcgtgtcatcaagtgcgtcacaagaaagaccatctctctctctccttcatcctgttgtaaagcgaaaagagcctccgaatctgaccacctttctacgaacctgtatcttccctgcaagtctttagcgtgcgtgtagtactgtgatctgcactgaacaatcatgtaatgctgcataaatgaccaattctgttgtacggcgcttcttgcttgctgcaattgacacttgaggctgtacagcttgcggattacgctaccggatgaaacctgattgcttaaccacgagggaagagctacgcaaattcaggataacaacatcggcaaggccaaggcgacgtttcggatgccgaaggtcgaaattggaaagcaatcaaggcgactcacactcaagcttgggtgcgagaaggaagtcttgagttatttctagaagtaaaataatgttcaggtcctgctccgccaaaataatgttctggtcctgcagccgtccctataataaatacttcatccgtttcaattt

SEQ ID NO: 37714 - DNA, 1675 bp, Zea Mays
agagcaaagcatacacgcgcgcagtcactcacgcacgcccccagctctctccttctccctgctcgctcgctcgccatggacgctccgagcagctggaagagtcctgcgcgcgccaagtgaccggagaagctgcgagatcagagtagttgcttgccgctcccgtgccaccaaattagattggacgtagctagcagctagctgagccgtagtgcgtagcggcagctaggctgctagctcgatcgttatagctgcgtactagtggtgtcgcagcagaagcagtagccagcttcagtagccgatccggtggtaaaagcaactttttttggacatggcggcggagggagccccggtgctggtgaggcatgctggcggcgtggaggagctgcggcagctcccgccggggttccggttccgccccacggacgaggagctcgtggtgcagtacctccggcgcaaggccttgggcgcgccgctccccgccgccgtcatccccgtcgtccgcgacctctacagcctcgacccctgggacgccgtcgacgtgccggccgcccctgatgcgagcagccaaggcgagagatacttcttcgcggtgcggccggcgggcggcgtcggaagtgctaggagggcgaccgcgagcgggcggtggaggccggcggggaaggagaagccggtggccctgccccgcccgtgcggcggcgggagcctcctggtgggcgtgaagagggcgatggcgttcgttccccggcggaagaagaagaaggcggcggcggcggcggccctggcgatcggctgggtcatgcacgagtaccgcctcgccgcgccgctgcacaagcaccctggcccaggctcagggagagtgggtcgtctgccgcgtcttccagaagggcagcggcaggccgaggaggaggaggcaacgaccggtgtcaccgtcaccgtcgtccgctagcagctgcgtcacggacgggtcgtcgtcgtcgagctcggacatggacgaggtcagcagctagctagcggccgccgccccagctagccaaccaagggccggcacgacaagccaagaacacgtataccaccagctgacagctcgcagctagctgccggcggactgcctgctgtgccaatctcaaagagaggcgcaagcgcaactcaagcttggtttgctctctctctcttgcgggcattgctttgcttgctccggtctcatccaacatttgttgtcattttattgtctagtttgaatactctagtattaattttaatcatcttcacacacacgtggattagagttaatactagaatacctaaacaaagtctaattagttttctttttcttttttcccaactttctttgttatttcttttcttactttccactctgtgtaattaatgtaatgaggtgtaatttaattagcgagagaagcatgcattactgcctgattagttaaccgcaaatcaccacctactcaggttcagcaagcttcttgccttcttgttgagagcttccagaaccaagtcggaaagagagtcaaaaacatagaaaactttaaatggatgttctcgtgtcaactagctagtaaatgtttgccccccaaaacaacctgagaacacaacggcaagaatccaagcctaatcctccgagtcgcaaattggtagctcacgagcaccaatcgaaccg

SEQ ID NO: 37715 - DNA, 1906 bp, Zea Mays
cctcccccaccttcctctcttctcccctcacccctttctggctttctcctccgccgaggccccgagtcctgccggaattctagatcccggaggcaacttgccacgggctcctccgctccggtcgctgaatcgtactatcgtgctctcgacagaaagcccggccgaaacccagccggaccaagccctgttcgccgtgcgcgcggtgccccgggccagatctgcgagatctgcaccgacaccgctacgcctatcacgaggtggatgctctcgtgatctctcggagtcccctggactgagcggcatctcggcggaggcgtagcctgcttagctggtggcctgccgagatgcagcggaatggggtggtggaatgcagcgtgtgccactcccgggtggtggtgccgagtccccggagcgtgtccagggcatacgacaagcaccgcagcaagatgtcgtccaagttccgcgcgctcaacgtcttcctcgttgtcggcgactgcatccttgttggtctccagcccatcctagtgttcatgtcaaaggttgatgggaagttccagttcagtcccatcagtgttaactttctgaccgaggttatgaaagtcatctttgctattgtgatgcttataattcagtctagaaagcaaaaggttggagaaaagccactcttggcacgttcaaccttcatacaggcagcccgtaacaatgtacttctagctgttcctgctcttctgtatgccatcaacaattacttaaaattcatcatgcagttgtacttcaatcctgcgactgtgaaaatgttaagtaatctaaaggtactggttatagctgttcttctgaaatttataatgagaaggagattctcagttattcagtgggaagctcttgctttattgcttattggaatcagcatcaatcaacttcgaactgtacctgcgggcaatacagcatttggtcttcctgtcactgctattgcatacatatatacattgatttttgtaactgttccttcaatggcttctgtctacaatgaatatgccttgaaaagccaatatgacactagcatttatcttcagaacttgtttctgtatggatatggagcaatattcaacttccttggcattctaacgaatgtcattttgcagggccagagagttttaatattcttcgaggacattcgagggccacgatgtttctcatatgtaataatgcagcacaaggcattctatcttcattcttcttcaagtatgcagacacaattttgaagaagtattcgtcaactgttgccacgatatttactggcctagcttctgctgcatttttggggcataccttgaccattaattttctcctgggcatatcagtggtgtttatttcaatgcaccagttcttctctccacttgctaaagtcaaagatgacaaaccagctgacttaatagagttggaagacacacaaaatcaccggtcatccgaatcttcttttgtaaatatgactgctggtgctgctgttgatgcgagccataggattggaactgatgagaggcaacccctgttgcctacatgaactagtttcttgagcaggtttggtgtagcattgtaagttgaataaactattgtacactgtaaaggcaaaggaaggaaagaactaccaacatcttctccaatttctttcatttttgggacgaggccggtcggtggcctgccatctgtggccgtgggagtgacagagcagcatacattttgataggcgtataattcaatagggattttccagatacggcacttgtaacaaaattttcttggaggtgtatatgaacaacggcgatatgacaatcttttctgtacggaacatttatactattgagtgattgatttactattactatgttgttacttaattgtatttcca

SEQ ID NO: 37716 - DNA, 2841 bp, Zea Mays
atgcccgagaggacaatggacacgcacgcagagggagctgccggctgggacaccggacaccacaccattcacatatctcgcgacagcagaaaccacgtcgcgacgctgccacagcagcaggctatgatggtgctcatgagttccatcccagttctcaggccgcgaatgcggttccaaaatactccaagcaaacaggcagtttcgattgggcgaagcgcgtggaaaatccaccgcgccaggaaatcccagagcggcgtcggatcgtggcctcgtgcagcggcatccgcagcaggctcagtggtgacatcagctgaggtccggtagtttgcctctgcagccatgcctcaaatccagaacaccatgcggcaaaactgcacactcctagctgttctttgtggggagtttgctgagaagcggcagacaccagcttccctggcgccagacacaaagcggctgcggctgtcataccctttccctgagctcgcttcgtctgggagactggaggtgcacacgctaatcaatcccactttggagcaatttagagaggcacagcaggcggtgcatcctgtcttcttgtatcttcaggggcagcagcaagagaatgaggaggagattggcacgcttgtctggggtgatacagatttatctgacccgcagatgtttgtctcactcatcaccccaccatttccgaccatggtttatttagaggttcccactggggaaaagcttgcccagtcacttcattcaaaggggataccatatgtggtatattggaggaatctattttcatcttatacagcatctcattttcgtcatgcgttaatttcctgcagccatacatgggatgcatttcaacttgcacatgcctccttccgactatactgtgtaagaaataatcatgtacaaagtgttaagcttggcccctgcctacttggggatgctccaaaaacaaatgtcatccctgctggggatgaagtgaatgaggaacaaggttgttctgaaggttttccagatataagaatatatgatgaagatgtgagcatgaaatttcttctctgtggagtaccatgcaccctggatgcatgtttgttgggggcactagaagatggtttgaatgcgctcttgaatatcgagattcgtgcgagtaaacttcagaaccgagccagtgctcatccacctcttcaagctgaagatcttccacatggagttgttacaatgcgctgcgatatcacaacttgcagttctgcacatgtgtcgtttcttgtttcatgcagtgcccaaacttgttttgatgatcagcttctagggagccgtatcaagaatgaaattattgagaagaggcagttagttcgtgctctattgaataatgaggataacaagccatcttcatatgagcctttgccttccatgtgcgtggcttgcggagcttctacttttgaagtctggataaccatgccaaaatgggcagcacaggttttgaaacatcttgcgccagaaatctcctacagaagcttggttgcacttggaattgcttgggtaaatggtacaccagtgtcctcatttgataggcaggatgcagaccggcttcttttcttttgctctaaccagtgcggagatcaagctattcaaaatggctcatatgctcatgtatccagctggtcagcaccccttaccaaggatagaaccactggaagtctcgagtcaaaacagatgtcatttggtgcaaaaggagttgtaggggataatacgatctccctatcatcattgaaaccaaggctaaagcctgcaacaatgagaccccttcctcactctcgcaagcaacaaatgcatccctttatggggtttcctcagtccatcattcacgatgctagtcaagttaagcctagcttgccagcccctcctgtgaagcacaacgcagtacctgttaccgcagtgacaccgagaaaatcatcatctgggtcaccatcatcctggtcacgtgttcagctaccaatcccattgaatcctctgccaataaagaaacatgagtgcaatcggttgcctatccacagttgctctgaagtacacttcgggaccatccttttgtttccttctgtgctgaagcatcttcctagtaaatatcccctcattttgtgctatcttttgcaggaagacttcttgaaagatgtcatgcagtttctacttcagaggggccacatccgacttgtacctcagggaggactggcagaatttcctgacgcagtgttaaattcaaagcgtcttgatttatataacttatacaaagaggtggtataccgaggtggcttttatgtaggcaatggcataaattggaaaggtcaaatcttttcaaagatgcacaaccatacagttacaaacaaaatgacgggtgttgggaacaccctaaaaaggcattatgagacgtacttgcttgaatatgaacttgcacatgacgatattgatggggaatgttgcttgatttgccacagtggtgctctgggtgactgggtgaactgtggattatgtggagaatgggcccaccttggctgcgatagacggaaagggctgtctactttcaaggactactcgaaggcggatgggatggaatacatatgtccccagtgtagccttgcgaaatacaaaccgccgttgcctgcaccatgaaatatgttgattaacttctgttactttcttaagggtgatggtttggatagaaattagtggctaaggatgtgtagtgttgacctgtactattgaatatgatcctgtacgatttgtacaatttttataaaatttctgatttccgaagggtgtctggtctgtttgtaagaccttagtttttaa

SEQ ID NO: 37717 - DNA, 1687 bp, Zea Mays
cttcgcatgtgaactgcccactgccgcactgcgacaccgctccacccaccccaacctaggcagtaggcagtaggcatcaagcgtcctgcgtggctgcgtccaagtccaagcgccgtccggccaccagcgcaggtaccgagccaccgaggtaggagccagccaccgggcagatcccaggctgccagccaccggcgtccagcactccggctgccagctaccggccacccgcagcgcaggccacaccaatgggtagcaaccgcatggcgccatggctgccgacgaacaccagcagcgagacggccagaccccagtaattcgatttattatatcttcgtcgaggatagtgacacgtcacgtcagtgtccggccatcgcttgagaggcgcgaatgtcttcgctgcgccgtcacgatccaggctcgcatccccttctgacgcgcacccattgcgggcagacgtttgggctttgtgtggatggatcatggacgtacataccacgtttgtttttctaactaaatcttcacttctttgaatcgcagagtccaacccaaggatggtttaggctactgaagggcaatgcactgattcttagactattgaagaatttacaggatgatgtgcaggagcaggcagctactatgcaattttctatttattgtactcttgccacgaactgctcgtaattctctttcagtttgttgcagagcgtgggcagtaaatgcaaagaaaaaacacagttgcagaaattgctagcaatagactatacaagatagagccaaattgagcaaaaaaaaagaccattcccatttggatcaccattccctaaccacagcaaaatgaaggtggaaaattgagtagttgagtgccgtgtatgcacatgagcagggctaatactttataagaaatgtgctggttcttgatactcctccaaccagttgtagaagaattctggtttggctgaagtagttttacatccgaaagatggactttgtacagatatattctctgtcaacaatatgtatatccaggcggagatgaacttggagggaagcagatttacagtttgcaatttctgcaagtcgacccatcgtgttgaactaaaccatctctaatttcctacagcttcaactccaacaacaggatggccccacacacttaatgaaaacatctctaatttctagcaaattcgactccgaggacaataaaggtaccacaatggacttcttaagaagaataggaatcgtgtacataagcttttttgctctaataaaataagagtggttgttgcaacaatggcattcagaatgggtcttgataagagtgacgttgaaccgatatgaccatttgactagcatacaaagttcaaatgtgacagcctatagctttaagcaatgttacactgcttatcacctggactgattcaagcatttgttcttttaaaggtggttcattgtatcttgccagaaatcgtagaagaatacatacatgtatattccatgcagattccccccaccctcccattttcttctcttttctagacatcttactatgctctttctaggaaactggtcgtgctgattcaacaaaagtcaaagtcttttgcacaaatgaatcttatcgtcttgtcctttttttcttgtaatttacatttccaacctgctctaagtttcctacataatgacttcaatc

SEQ ID NO: 37718 - DNA, 888 bp, Zea Mays
ggagcacaggttggggtgtggcatacgccaccacgcacgcagtaggcagtactagaggcatgggcgttgccgccccccgagttactgaagaaaacctggcagcactatttataaattgtggacaggttgtggactgtcgcatgtgtggagacccaaactcagtccttcggttcgccttcatagagttcactgatgaggagggtgcaagggctgctctgaatctgtcaggaactgtgctcggatattatcctgtcagggttctgccatcgaaaactgccattgcaccagtcaatccaacattcctacccaggtctgatgatgaacgggaaatgtgtgcgaggactatttactgcacaaacattgacaagaaggtcactcaggcagatctgaaattgttctttgagtctatatgtggagaggtctttcggctgaggttgcttggtgactaccatcattctactcgcatcgcttttgtggaatttgtgatggcagaaagtgctaccgctgccctgaactgcagtggcgtgatactgggatccttgccaataagggtgagcccctcgaagactcccgtgcgtccccgtgcgcctcgccagctgatgcactagaggtgtcctaggtacaggagggcccttttgtttactaccttgcacatagaaggagaggagatggagagcttctcactagaaggatcggaagcgcgcgcgggggggtctgcctgatgctcttgtccttgatgcaacaacaggcggaaaactcctggacttttaccctgctgttcagttgtttgctgctgtgtcctggttgctactgaaacaaactggttaaaaaaaacttgggtattggagactatgtgccctgcctgttggtttggttgctactgtctgt

SEQ ID NO: 37719 - DNA, 2618 bp, Zea Mays
ctacctgcccgccgccgccgccctgcgcgcgccccgccgccccaccgcgcgccacccagcacgccaccacccagcgcggcccgccctcaccaccccgcggccccgccgccgccgccagcgcctagccacgcgcgccccaccctcgccaccccgcggccccccgccgccgccagcgcctagccgtgcgcgccccgccgccccatcgcgcacctgctagcgcgccgcccagcacgtcgcccgccctcgccaccccaaccgccgccgcagccgccgcccgatgtgccctcgtgcacgagacctctcgaaccctctcagaaggcggtgcgatccggtttgggtcgccgtgccgagcccaatgtgcccgacgcgcgcgcggctgagtcaaagccgaaactggcgctcggagacgacgatgataggccgccccttgaggagaagcaccgctgcagcggtgagggcggattcatcttcctctgcgcccttgttggacacaccgaggctatcggtgggatttctatgccgtctggttcgaacaagctctactccggcagcgtcgacggatctgttcgcatctgggactacaattccggcaaggctaccaacaatctctttgattatggacgagtaacgggctgcttccacggaggttccagtgaggaggttgtcattgttcgtggtggttcatgtgctgattagcaatgtgtgcaccctatggaaccaaccataaccgaatggtgactcctaattttttctgattggttgtgcctaaatcaccaatcgtcagcggatttcttatgattagttgggtgatcctgtgctcctggtttggattggatgttatctgtcaggctagccttgttgctatatattggaggctcttcgcctgattcggttacccgtttgcctgggatcagtttgtggcgctatctggttggttgtcacttggttgatacatatgattgcatgatctgcaagtgaatcttcagagattacaactatctcattagtggatagtcatgcatttatgtaaaaatatagcaatgagaaaaaggaacaaagtaaagaaaaagagaaaatatagatggagatatgtgggagtatatccaagaggatggaaaaaatataatttgttatcatattacaatttttgttcttaatgtttctgcaatagtgtgttgatgtcatcaagatgggaggcaaggttagctgcatgatcacccatggcccatgggtactcattggaattccaaagtttgtggaggtgacattctgattctagtgagagtacacctttattttgtattatgtatggtgacattgaggggtgactttgcttggtacaaggcattgaacacaaagacagggatgaaactaagatttcaagggccttctagtctagtttgttccatggctatcacgaatgagatgttgtttgctggtactggagatggtcgcatcatggcctggagatttcctgctaaggatagtaacactgaaccagtgttgatcctcagtggccatcaacggccagtgatttcactgtctatcttggcaagaagactttactctggctcacttgacaagtccatcaaagcatgggaccttacaactcggcagtgtgtccaaacactctctgagcataaagcttctgtaacatctgtgctttgttgggatgagaagttattatcttgctcccttgacaagactgtaaaactctagactctgtcagagtctggaaaccttcaagtcaaatatgcccatgccgaggagaatggtttgcgcacactcttcggcatgcaccgagttgggaagacaccagttctcttctgctccctccacaacagcaattgcgtccgcttgctcgacttgccatcgctgccaagaggcaaacagttgctactggatcaccgaccccagggcgcactgcatgggttggcaagggaacagtaacagcactaatgataatctgcaaaatgaagacgcaaatgatgcttctaggtggcccatatccctggtgctttgttctttgatgttgatggaatatccgacagaacatctagtttaccacacatgctgccatctgaaaaggcattttcagttgctgtatctgctcttggcatctacaacaaagatgggatagtagtttatgatggaaaggggatgttcagtgctgcttgtgtttggtggtggggaggactgcacagttcgcatttggagcatcaaaacaggcgagctaatctttgtgcggagcatggcagacagtcccttcacgacatcttgttggcccaaaagcagccatggcttgtagtccttggctgtttgatgtaaaccacagctgggaagtcagacatcacctagagctagggtgtccattcttgacatgtttctcttagtgataggtggatactgtctaggtaggaacagagtcttgagggattgatgggcgcatgcatcttcaattcctgtgtgttgtattactactggtacaatctccaatgcttgtgaacttatgtgtttggactgtgaatttgtgatatgaacatatatcaatatgtttaaaatctgtattgtttgtgatattctgtgttgcatgtgatattatgtgtgtctaattttta

SEQ ID NO: 37720 - DNA, 5120 bp, Zea Mays
tatatccgtaggaaacttttaaatgcttcagcatttttacctaatatggaatccccatttgttccaaattcgtttactgggaagagaaaatcaccagttggtaattcagccatagttcaacctcatgttggatcacgggctgttcatgagtatcagttccttcctgagcaaccaagtgatacatatgagagggcaacccgatctcactactatgacactccagtggaagtttcaaatgctaggataccttctatcacatcaggatcacaacttctccatggatctgaggaggctgcgcctagttatgcttttcaaggtcacacatctggttctagcctgttgcctccgtccagcaggccccaagtgtttccagcagcaccaacagattatgagatgactcagtctaatagcaaccttagttctgttcctgttgaaggacagtttgatatttctcaggttgctgcatttgaaaacccacctgtatcatctgaaataatagcttatcatgatgaagatacttctcgcgtggaaagaaaacgaaaacatagtgaagaagcaaagattgcaaaggaagttgaagctcacgaaagacgaattaggaaggagcttgagaaacaagatatgttgaataaaaagagagaggagcaaaggcgcaaggaaatggagagacttgatcgtgagagaagaaaagaggaggagagattactgcgtgagaggcagcgagaagaagagaggttccaaagagagcaaaggcgcgaacatgagcgtatggagaagtttttgcagaagcaatctagacgagcagagaaacaaaggcaaaaggaggaactccgaaaagaaaaagaagcagcaaggcaaaaggctgccaatgaaagggctactgcacgtaggattgcacgggagtatatggaactggtggaagatgagcgtttggaatcaatggaattagctgctcaaaacaaagggttgccctcaatgctgtatcttgacagcgacacattgcagcagcttgattcctttcgaggcatgctaagtcaatttcctcctacaacggtgagaatgaagttgccattttctataaagccttggactggatccgaggataacgttggaaaccttttgatggtgtggaaattcttaattactttcactgatgttctgggtctttgtccagttacacttgatgagtttgttcagtctcttcatgattatgattcaaggttgttgggggaactgcatattgctctgctgagatccattataaaggatattgaggatgttgctagaactccatcaattgcactgggggtgaatccaggaggtggccatccacaaattgttgaaggggcatatgcctggggattcaatatacgtagctggcaacgccatcttaatcttcttacatggcctgagatattaagacagtttgctttatctgctggttttggacctcaattaaagaaaaggaccgtagaagattcttactatcgtaatgataatgagggtcatgatggtgagaatgttatattgacgattcgaaatggtacagcagcagtgaatgctgctgctaagatgaaagaaagaggttacaccaatcgccgtagatcccgccaccgtctcactcctggaactgtaaaatttgccgctttccacgtgctttcgcttgaagggagcaatggtctcacaatattggaagtagcagaaaaaattcagaaatctggattgagagacctcacaacaagcaagacacctgaggcatccatagctgctgccttgtctagggatacaaagctttttgagagaactgctccttcaacatattgtgtgaagtcgccttatagaaaagatccggctgattctgaggctgtgttgtcagcagcgcgtgaaagaattagggcttttcagaatgtgctttctgactctgaagctgaaaaggaggtagatgaagctgagagggatgatgattctgactgcgatgatggtgatgatgaccctgatggtgatgatgtgaatactgaggtggaagacgacaaggatcctcttcttgctgtcaagtcacaagatgaagtaccgagtacaactacagttattggcataaaggccaatttagatggtgtgggtaatgcattgaactcatcaagtagttttactaaatcagcaaaaggcgctcctctcccttctttaggcaggtccaatgcagcagatacttctaatgatttgcctcttggagtctcatcagctaatcatgaagtagtacctgatgattctgaaaatacacaaattgatgaaagcaatcaagccgagccttgggtacgtgcactagcagaaggtgactactgtgaccttagtgttgaagaacgccttaacgcactggttgctcttgttggtgttgccactgaagggaactctattcgtgctgtacttgaggtatatattgtgatcctgctaaactattctatcttgtcattcctcattgggaaacacctgatcaagagtcttgcaggagcgtttggagttagcaaatgccttaaagaagcaaatgtgggcagaagcgcaacttgacaagaggcgtttcaaggaagaatttactagcagagtacaatataactctgacatgggtttgaagcctgatatatatcaagaaaacaacgtgacagagattacttcaactccagcgtgtgatgcttatagagagaatgatgaacatgtcgggacaatcaacaattgtgagatgcttgatcagcataatcagggtaatgctggtagtctaccttatgagagaaatggcgtatgccaggaaatcctcgcaaccccagatacttcgtatgttcagcagtatgcttatgctgataaaaggcgatctcagttgaaatcgtacattggtcaccgggcagagcagctttatgtttacagatccttgcccctaggtcaggatcggcggcgaaacaggtattggcagtttacaacttcagcatcaccaaatgaccctggctcaggaagaatcttttttgaatccaaagatggatattggagagttatcgactcagaggaggcctttgattctttattggctgccctcgatacacgtggcacccgggaggcacagctgcattcaatgttgcaagtgatcgagccaaccttcaaggaagctattaaaagaaatgtgagtatagaattatctgctggaaggtatccaaagaatggagctactgacatgataagggcaaattatcacagtgaggttggaagctcaagcagtactcctagtgctacatctgacagtataacagcatattctgattcttttaaagtagagcttgggcgtaatgattttgagaagacagctatctcaaaaagggcagatatatttttaaaatggatgtggagggaattctacaatcaggaattgacatgtgccatgaaatacggcaagaaaagatgctctgaattgttgcattcgtgtaattgctgctatcagatttacctagcagaagaaaggcactgttcttcttgccataagactttcaaatccatttacaatttttctgatcatacaacacaatgcgaagagaaacagagaacagaacctttctggaacatgcaaaacactgattattctgtcccaataggaatggtattactcaagcttcagttagtttcgattgaggcatatataccatcagaagcacttcaaccattttggactgatgtgtatcgaaaatcttggagtgtgaagctgtacactaccaaatctattgctgaaatattccagcttttgactgttctggaaggtgcaataagaccagattgcctctcttctgattttgaaacaagtgagtgtctaaactcacaggttggatctgcttctgtccttccatgggttcccgacactacttcagctgttatgctccgaatgttagaccttgactcagctattttgtatgttcaaaatcaaaagatggatagagatgatggaggtttcatgaaatttccgtcaaggtatacagttgctaagagcaaacaagaaacaacacctgaaacagctggtttggatctgtatgatggaaggtggcttcctggtagtggccgtaggggtcgtggacgtggaagtagaggaggtagcaggggaggcagaggtcgaagtcgaggtggaaggatcccaagaggtgttagcagctcatcaaggatcgagttcaagggtggtattgttgcttctgataaagcgccaaggaagaatgtacgccgagggcgtggtcgtggtcgtggtcgtagacgtggacgtcgaactgtgaggcctcggcagccatctgttggcagagccagatcaattccaaaggaaaatttgttgggaagctttagcatgcttagcagctcaaaggctgctaccattgaggagtctccacgaagctctggcgcagacgagtggggcttggagaccagaacgacatacactgaatgtgatgagaacagctctggatcacagtcagaagataacgaggaaaatggccagcccatggatgatgattatgaagatcaagttccagattactcaataggctattctaccggctcgaggcaccatgtaatgatgtccatgatggaccatgatagtgacgaggaggatgaagatgctgaaggtgatgagaatgtggaagaagatgcagaccttgcagttgacgatgccgatgttgagatggacgaagatgatgaaattggtgatgatggagaggatggtggcgttggaggggagatgaatgcggatgaggatccggatgctacttcatattcatccgattacagcgactaagaaagcagaaataagggaaccttatcccagattcctccctcggcatggaatgcatgtagtaccgagtaggcattcccccccgttgtgagccaaaagggagcttagatgcttaggttcgaaggagcgaggaactgttttttaggcaccgcaggttttaatagaatttctgacgcattcgacgaagtgtttggttgtaccgtggtagttgtgttactggggaattccccgagttattatacaatgtgttaagacaaaatactgtcatatcgcatctggttgccatgcgtctaactggttcacggttttaccgtta

SEQ ID NO: 37721 - DNA, 1806 bp, Zea Mays
atactgtacaggccaattcgttcgcagactcgccaaactgctgccccgagcggccgagcccccccccccccccccccccccgacctcgaaatcctccgtcttcctcctcgccgtgtcgggcctcgccttgcatcgtccccaaatccaacccaaactcctcaatctccgtcactggcatggcgtccgataccgagggcatcgccgccctcttctcaatgtacaacgacgacgaggaagatgaggacgccgacgagcccaaccctccgtccccagcgccgctcaccaccgtcacctcctcgtcgccgctgtcccctcaagccgggggcgaggaccctaacccttccctggcgcctccgtcgcctccccgtcccgaggagtcggccagtctcaaaaccctagtgagtccccacccttccccggcgcgggcgctgctaccgccacttccctcgcggcgctcttcgtcgcccttcgcagcgtcgcccccctctccgctacggggaccatcctccgcgccgccagccgacctgccgcgcccgccccggcgcggggcgcttgcaatcgtggactatgcgcacgacgagatggctatgtcgcccgagcaggagtatggatggcttgcaggatggggagatcatgagccacacatacagattcgtttcagatgctcaggctgcagaggggaatcttgaagaacgaactctctctggcacagttcatatcatgacaccaaatactccagcagaattgtctcagcatgctgatgcacctgagcagaaccaattagggacagacatggcagtggatataactagagcagaaattgaagacgcccaggtggaggaaactactgatatttcaactaatggtgaaaatgatgatccattgagtcgtttccttcctccacccgtgactacaaaatgctctgcagcattaaagcaaaaaattaacaaattccttgcatacaaaagggccggaaagagctttaatgctgaagtgcgcaacaggaaggactatagaaatcctgactttttgcagcatgctgtgcgataccaagaaattgatcagatagggacctgtttcagtaaagatgtttttgatccttatgggtacgataaaggtgactactatgatgagatagaagctgaaatgaagcgtgaacttgagagaaaggaacaggagaagaaaaggaatccaaaagttgaatttattactggaggagtacaaactccacatagtgcatcaataccgaagatcccaggtttggcgggtgtctgtacactaccggtacctacagaaggtgtacagaaagagactaggccaaacaagaaatcaaaatgggataaggttgatgatgatgttaagaatcatgtagttcctagtggacacgacaacttatcagcaactgcttctgtggcactcctgacttcagctaatgttggtgctggatatgctgcttttgcgcaacaaaagagaaaagaagctgaagaaaagagaagcgatcataagtcagacagaagatcgtagcaccactttttttttttcattctgagcagtcagcgtatcatttagtttttcagtaacatagttttgtattgtgggtaaggaaaagaaggaaacagttaaaatcagtccgagggaaatggttccagaaaagcccctcagagcgacttgttgtcttatacaggtatcagaaacttaacgttttaggccaagaaaaagagaacagtgagcgttctgcacttctgccccccgttacggtggacaattactcctgtcctaaaaagaatgcaccaaaattgaatgcaa

SEQ ID NO: 37722 - DNA, 5954 bp, Zea Mays
ctccggccaacgttactactgtagcagcagtagataaatactgctgcggctggctgctgtacccctcctagtcggctagtcctctactctccattcatccccaccacctccacttgtcgaaattgaaactcaaatcaaatcgaaccacctccacctcggcaacgagcgaattccggtgcgaattggagccctcctccccccgcatctagggtttcgcccatggaccccgccgccggcgggggccggggccgggaccgggcgggcttcgagcgggcgtgccggctgcccaacaccgtccactccgaggtcctgccgtcgctgccgctccccaccctcccgcgcgagctcggcttcgacgcgctccgcgacgacgagcccctcgccgcgcccgaccgccccgacacgatcatgcaggccgccaacatcgcccgcgtcctcgccgacaccgacgtctcccacctgggcttcaccgctgcggacaacgtcgacgtggaccccatccgctgctcctggctctggagggaggtgctcaagcacaaccccgacgctttcaaggtcaaggcgccaagtccgtcttcgcaaggtccatttggaggcccaggatatcaaaatcaagaacatgagaagcactttgagcattttacacctaatacgagcaaagcacgaaatgaatctgcatttcctcaggatgaaattgactcacatagagagcatttttataatgaactgacctcagattcaattgcttcaaagaagccaaaaataaggaagagagaaaataacaattctgtttcaagttctgctcccagcattcctaatactcaagatgttatcactaccttctgtgaggtggtggaggatttctgtggaaaaaccgaaattcctgatgatggagatggcggtgactggttgtcaatcccacttggtgatgttaaggttctcgtgaatgaaattacatctgttcgatccaaaaggatattgcatgaggttcctatggatacagttacaaggttattggatgtgattgaccgtcagattcgatattctcaaggtttgtcgatagatgtgaaagaaaattctgatgtcgttgatgctgaacctctggttttctctgctttggaggccagtcatgctgcgttggcaattatgacccaccatgatatgccaaagcaactgtaccgagaagaacttattgagcggattattgatttctcaaggcatcagatcacagattgtatggcagcaagtaacccaaccttccgagctctctacaaaccagctgaaaatgttgcaaatgatggagatgatgatgaagatgatttggaaaatggacaagttagcaagaggagacgtactgctactaatttgagcatgagaaaatcttcaaacaaactttctgcttctgtttattctgctgtgcagaaactatgcttgatattgggctttcttaaggaactgctcacaacagtgcgcttgtcagatggttgtattctgcagttagcgaaaacatgctttactacattcttggtggataatatgcagctattacaattaaaagcaatcggggttatttgcacggtgttttcgtcatacacacagcacaggagttacttggttgatgaaatacttcaccttcttcgcaagttgcagttttccaaaaatgccgtcagaacctaccatctagcagatgaagaccaaaagcaaatccagatgataacagcactgttagttcacctggttcagtttagtgcaattgttcccaatagcttaaaaggaacagttgattggaccactattgttgatgcctccggagatgctgattattatccaattaaatgccatgaagcggcaacagaggcttgttgccgtttttggactgatgtccttcaacgttttactgctgctaaatctcaagatatgtcggaaaccaaaggaataatagataatcttgttcaggatttcctaatgatactaaacttgccggagtatccagctgctgcttctatccttgaggttctctgtgtgttgctccttcagaatgctggattgaaatctaaggacactaatgttcggtgctttgctattgatcttcttggtggtattgcatcaagattgaagcatgattcggtcatctgtagtgaagagaagctttggatattgcaagatctcactgatgcaggtagcgatggctcaaaaatcttgaaaaacaagtgctgtgtttgtcttggtggaagaggtataaatatagcctgtaatgaatgtggaagatgtttccattcagattgtatgggggctgctagccaggataacttagagcgtgatagtgtttgccccttgtgtttttgcaaacaacagctcaatgtgctacagacgtactgtcagtcacaaattaaagaaaatggcaaaaaaactgctgcgtctactagtaagaaatctgctaaaccagctgaggtgccagcagtggatattattcaacaaatactactgagttatctccaagaatctggtccacaagatgatgggaacctgtttactcgatggttctatctgtgcatctggaacaaagaaaaccaacattctcaggaggagatcatctactatctcgctagattaaaatcaaaagagattctgcgagattctggcaatggtctggcaatttccagagattcagcaaagaaaatttgcttggcacttggtcagaagaactcattttgcaggggttttgataaaattcttgctcttcttttgcttgagagaaaattctcctgtaataagagcaaaagccttgcgtgcggtcagcagtatagttgaagctgaccctgaggtcttgggtgacaaacgtgtccaatctgctgtcgaagggaggttttgtgattcggctatttctgttcgtgaagctgcccttgaacttgttgggaggcatattgcttcacatcctgatgtgggcctgaagtatatagaaaaagttgctgagcgaataaaggacactggagtcagcgttcgcaagcgtgcaatcaaaattataagggatctatgtgcttctaatccaaacacagacacaacacatgcctttgtggagataatttctcgtgttaatgatgaggaatccagtgtacaggatcttgtatgtaaaacattttatgaactatggtttgaagaaccaactgggagccataagcacttggttgctgatggaagttcagttccaatggagatagctaaaaagactgagcaaattgttgacatgttgaggaagatgaccaatcaccaacctctgattaccatcataaaacgtaacttgactcttgatttcctccctcagtcaaccaaggctgcagggattaactcatacatggtggcatcaattcagaagcgttgcgaattaatatgcaaacgcttattagaaagaatattgcaggttgaggagggagctgctaaggagatggaaatccacatgcttccttatattgttgctttgcaagcattttgtattgttgatcccacgctctgcattccagtaactgatccttctaagtttgttgtgacactacaaccataccttaatattcaggttgacagtaaatcagctgcccagttgcttgaaagtattatttttgtgattgatgctgttcttccactcataaggaagccaacacaaaatgttgttgaagaacttgagaaagatctgaaacatatgatagttcgccattcgtatttgacagttgtacatgcctgtatcaagtgcctttgtgctctgagcgagtcagcaggtagaggtccaggattagtggaaaaccttgtcaatattttctacaagcatctgtctggagctaattcagatagtcagttattgggtcgatcactgttttgtcttggactcctccttcggtatggttatcaattgatgcaaacatctgaaaatcagcttgattttcccaagattatcaacttgctccagagaaaatatcttctcagggatgattttagcttgaaggttcgagctttgcagactttgggatacatacttattgcgaagcctgaatttatgctacaaaaggatatgttgaaactcatagagacagcactatcttctgaggttgattatagattaaagattcaaggacttcaaaacctctatgagtatctcagagatgctgaaagccaacttactgccgagagcactgtgaaacctcctgtccggtgtgaaataaatggcagaagtaaagtgcctgttgctgctggtgctggagacaccaacatatgtggtggtattattcaattgtattggagttctattcttgaaaggtgcttggatacaaatgatcaagttcgccagagtgcacttaagattgttgaagttgtactccgccagggtttagttcaccctattacctgtgttcctcaccttatagcacttgaaatggacccactggaggggaactcaaagttggctcatcatctgctgatgaatatgaatgaaaagtaccctttattttttgaaagccgtttgggtgatggactacaaatgtcatttaaattctttgaatccatagtcagcaaccataagatggcagcaaacataaaatcaaatccaattgcatttgtcaaacctggcatatctagaatataccgtcttatccgttcaaatcgaaattccagaaacaaatttgtccactcgatagttcggaaattcgagtctgatagccggagtcgcagcacagttagctttcttgtatactgtgccgaagttcttgcctccctgcctttcacatgctccgatgaaccactttacttgatctatgatataaatcgaattattcaccttaaagctggaggagttgagagcaatttgaaaaggtggacttctatgtctcagtctcaaaatacagtggatatgccaacgttgccaggagagaggcatgttgtcatgcaagagcctggcggatattatgataacgtgggctatgcccatgaaagggtgaatgccaatccttgcagtacttcagacgtggacatggccaaagtgcaggttgacgtggatatggccaaagtgcagggagattgccttgatgcaatagcccttcagctactgctgaaattgaagagacatttgaaagttgtctatagtttagatgatgcccgctgtcagtcattttctctaaaggagcctccgaaatctggagaaacattctccaggcagaatattccttttaatgttagcagcactaacatcagtctgccgagctgcctgcaggacgtagcttctgtttaccaggatttcaagacagtgctccacgaagattccatggactttgctgtgttcatcccttcagtccagattaggaagcgcccaaccccgagaaatacgacaaacccaaccccaagaagtacgacgagggtcaggagaacggctgcctcgagtgttacaaaagcccgtggtggcgcacgtggcgatgactccgacgactccgatgatgacgactggaccgggggcccaagagtgcttgacttcagtgggggtggccgtgtgacaaggcagagggtccaagtatgatgactggtcttggtgcttttgtacattctagggaaacctatagcgggtagcagctgacacgaggagagttagggttgagttttaggtttaaagtcgtttagggtacatagaagcagaaaaggaaaggaagatagcctttttacttagatgccattgatttggagcactccttttcttgctctgcccctgtcctgtttgtaattccggtcgggctttggcaaaactgacaaacagggttgtgctccggcttctgatctgattcaatgggaatgaaattattccttttgctttgcctgtataataacagttaagcctatgtttcgtgtaattgtctgccttgctaatgttatatatctgtacgtgtgctgagccttttttgttgaagttcatagaaattgcc

SEQ ID NO: 37723 - DNA, 2933 bp, Zea Mays
ggagttcaacgcgcgagataaggagagcttttctaaacgggagttttgggcaatgtctcgtactctcgttcctgtacggtcgaagcccacggcattgtttccaaacaagcgaaaccgagcgtgtcgatgcagcctccccgtttcgccgtcgccctgccgccgctcgtctcccgcctcccctctgcgcctctccaaccttctcctcgccgtcgcgtccgttccggtgccgccgagcacgcggacgcgtcttcgcgcgcctcccggagcccgccgcccgcgaccagaagcaagggcaaatgggcgccacaccggtgcggtggccgcgggtgctgaccccggcgcagctagccggagccatacgccagcagaaggacccgctcgaagccgcccacctgtactgggacgcacctcgccgctacccacactcctaccgccacaacgacgacgtccgcttcaccctccttggcaccgccgccggctcccccgtcctcccgtccctcctccgccgggttctcccatcctccccatccgccgactccctccttgccgcttcgatacccaaactctctcctccagacgccgtgtccatcttccgctcgtcgctcccctcctccccgtccccgtcttggtccctctccttcaccgccctcctccggcacctcgtctcccaagcactactccccgaggctgcccgcctcttcgctgacttcgccaggcggccggaagtgtcaatagcatccgcggatctgactcttctcataattggtctctgccgcgtgcgccgccctgaccttgcgctgcaggtgctcgacgaaatgcccaacctatgcctcgctccggaaagggacgcgtaccgcgcgattgtgcctgctctctgtgatgctggcatgcttgatgaggccacacacgtcgtctattccatgatgtggcgggtgtcgcagaggggctgtgatgcagatgttatggtgtaccggacattgctggccgcactctgtgcggctggccggggtgaacaggctgagctggttctggataaggtgctcaggaagggtctgagatcaccaagtagtcgtcggtctcttcgtgtgccaatgcttgctgtgcttagtgtcgaggatgctcgggaagccattgaccaggcgttggctgttcgaactggacgtactgtatgcagctttgagtccatgatttttgagctctatgaagagggtcggtttgatcaggctgacagattgttccaggacatggccaagaaggggttcaggccaaccatctgcatgtatgaggcaaagatcggtgctttatgcagggaacggaatgtggatgatgctgtggaagtgctggaagaggagctgccaaagaatgaccttgttccaacagtgacaacatataacttgctcatgaagggtctatgtgacacgatgcaatcaatgagggcactagaatacctcaaaaagatggataagcagctcggttgtgttgctcaaaaggacactttctcaatcttggttcacggtttgtgctcagaaacgaagtttgttgatgcatcaaagttaatggagagaatggtgaagggacatcatcggcctgacaaaagtgcattcaacagagttatcgaaggtttatgttctgctggcagaatatatgatgcattgctatggctagaggagatgatcaaccatggagaaacaccaaacgccggtgtttggtcatccttagtctcagcagtatgtttgccccagtttgaagctttaggagctggactgctggagacagcataggttgtaactgcagaagaagactcgttcgacctaggaaactcttgaaaccacaatacaccaataatgagtgcccaagatacaatgatacctcaaatccatttacctttctgcctgatccaaatgacctagagaaccatggcacacttggtcatgatgacgacaaattttcagagaaaaatatgggctgaaatgaattcagaatgggagcaggagcagcactacagcagctgtagggcgtggcagggaactggggcaccttgaagagatcctcgtcgtcgtccttctctgtcgtcggcgcggcgaagaagaaggtccctgcctgaaagtactgggtgacgggcatgtcgtcccacaggttccagtcgccgaacgccgggacttggcgccacttgcagtcgtcttgcgcctatcagaaaaaacgaaacggaacaaagcttactcctctggactctggtgaaagcttggaagccagtcttggaagcaagaaagacagtgtgtgaatgtatgacacatacgtgcttgtttgaaaagaaaataaacactgttaagagcatagtatgtctcttagattaacagtagataactactactatctctattcttttttgtttgtcacgttttagtttaaaattaaactagcggcgacaaatatttaagaacagaggtagtagagcatgtcccaactgccatggtatatttctctgttagcaaggacatgctgcatagtttagtttccttattgcatgaggatgcagatccccatataccatgcatgaagaggctggtattcatctgccgaaaaaaaaaaacaagagaagaaaacaaacaaagacagacgcattcttggctcacctccatctcggtcgcagttgatgccgaagcaggcgccgaggtgcgaaaagaggaggaggaggaacagggggcaaagaactgagcagcaagcaagggcagccaaagctgggttgcctgagtgttggaattgggtagcagggggtcgctcatctatacatagccggccgaagagaatgcgggggcacacgtacccaaactgttcagagaaaagcggtcgaggaaaagcgagcgcccaaagcagcggctagcgttcagctgttactgatgagccgaggcccgccccggcaggcaggcaatgag

SEQ ID NO: 37724 - DNA, 1134 bp, Zea Mays
agtcctatcaccttttgcagcacacgcgatcccaaattaaagggccatatataccgacccgaacgccgaagcaatataattcggtggaccaccactcaaaggacgcgtacgtacgggccgggagcgagcatgaataagatcgcctccgccggagcactgctggccgtggtagcggtggttgcggcgttggccgcgacgacggcgtcggcgaaggactacacggtgggcgggtcagacaggtgggacacctacgtcgactacggcaagtggaccgccggcaagacgttcatggtcggcgacaccataagttcgagtacatgccgtaccacaacgtgctggaggtgacggcggcggactacgccagctgcaacgccggcagccccatctccacccactccggcggcagcaccgccttcaagctcaccgccacgggcacccgctacttcatctgcggcatcccgcgccactgcctcaacggcaccatgcacgtcacgatcaccaccgttccctacgattccgccaccgccgcggcaagcggccccgcgcaggctccgctccagtcatcctcatcgcctccagcagccgacgcctacgcgcccggaccggcggcgggacacaaggtggccctgggcgctgcagggaagtcgccggcgggcgcaccgagcagcgcgccgcggtatcagcagcccgcggccgcggtggctgggctggcggtggccgctctggtggccttggtcgcctaagctagcaacgtgcgtgtaatttgcacgcacgttgcagttttgactttttgagttactgcttactgctgctgtactgtacctgaaacaggacttctgttactgcgaacgtacaagcggtatattcatttgtgcttcttctttttactcttgtcgtgtgtttatattcggtacatgggtgtaaattgtgatatttacttcttataattccattttagcggcattggtcaatggttatgtcttcagtgacagggtgtgcgaatccatttcacaaccactatgttgcaaaacttcgaggcataggaacgatataatgttttccatgctgttcagaaatatgaatgttttccatacagctcagaaatatgaatttggctctacaaatacaatgagg

SEQ ID NO: 37725 - DNA, 973 bp, Zea Mays
gtgggagcctcccgcactggattacactggaagaaagcaaggaggcagacacaactactggtaaagccacccacaggatctcacgtggcattggcattaagggtcactcgttaacaagaaaccttaactccgatggacgtgtgaacacccttcaaactttacacaacttgaatgaagatgagcttggtgggtttgaagaatcatggcaaagaaatgccaggcagaatatgcctggctgggatactagaatgaacatgcttggcaacggaaatcttcacacgggcttccgagatgcgaatcaaaggccagcacttcctgccccaggacgatcccgtaaagcgaattcctcatggaacttccagaatggctcttccacgggtcgtgcaccccgcacatgagttcttctgtgccatacgcaggatcacagtgctcagtaccggtcgcatccactattttgcagaaaaatgttgcaacccgagcgctcattcgaaagactactgtatagcttatgacagttttttaatattgaagagcttcactggagacaactgaaaatcagaagctttccttagtttgagcagttctatcctagtgctccaatcactgtagtttagtgctgcctaatatgttttgatgggaaggacaatttcttcatgaatgactcgccctagaatcatgtagcctcttgccaacagcttatacatccacatatttaaactctactctgcgaacacttgaaaagtcttatatggtggtatatggtggcatgagtatgtatgtttgtaatttttctttcagatgcattctagctgccaataagaccgtctgcagcagtctatctagagtttattttatactgttctacactgtagactatactgttcatagattagagtttaaatatggttaaatatggctatggagatgaataagctgctggatatagtctaagctaaagtactgattacggttg

SEQ ID NO: 37726 - DNA, 1724 bp, Zea Mays
ggctcgggccagccacgcggcctcaggcgagtgggctgggctcgttgttcggactctcacttcctgtgtgctctcgtcgcctccgatcgaatcgtgtcgggcgggctcgtgcccgatcttgtctggtcctgtcttggctccccgccaggaatagcgcaccgagatcccttgcgcgcacggaccagcagatcgcgcgcgggagtgagagggcgacagggcgtggccgcgaggtgggcatgggatcggagggacgggtctggaatggcgcgggcgtggccgccggcagcggctatggcggcagcgtcgaggcgaaagcgaccaccgcggcgcccgcggacgttcccacgtcggcggcctccgtcgacatctcgctgccgctcccggagatgtcgcctcacatcataggtctctgcaaggagttggtcaaagggtggtcgtcgattgacagctcgcgcttctccatcgagaccgtgtctgggggcatcaccaatctattgctcaaggtttctgtcaaaggaaacaatggcaatgattcttctgttactgttcggttgtatggaccaaatacagacttggtgattgatcggaaaagggaattgcaggcgataccgtatctctcagctgcagggttcggggctcggctgcttggaatgtttgaaaatggagtagttcagtcattcatctatgctcgaacactgtcacctgcagacatgaaagaacctaaaatagcagctgaaattgccaaggagctacgcaaatttcatcaagtagatataccagggtctaaagaaccacaattgtggaatgatatattcaagtttttgaagaaagctgcagcattgaagtttgaggataacgagcagcaaaagagatatgtaaagatctcatttacagaaatacaagatgaagttaaagaacttaaggatctcttggacattctgcatgcacctgtggtttatgcacacaatgacttgctttcaggaaatctgatgctcaatgatttggaagggaagctatattttattgattttgagtatgggtcatacagctaccgtgggtatgacattgcaaatcatttcaatgagtatgcaggatttgactgtgactttaatttgtacccagataaagatgcccagtatcacttcttcaggaattatctgcatcctgatagacctagtgaggcacaagatatggaagtgctttatgtggaaacaaacactttcagactagcatcgcacatttactgggcattatgggctcttattcaggcaaaggtatccccaattgactttgactatcttggatacttcttcttacggtatggtgagtacaagaaacaaagggactcctgcttcgccttggcacaaagtttcctctccgggctaagaaatggctagagcctgagaatctggtcaagggtttgcactgttgtacgcatactcggggcgggtacgcgttgtgatcatcgtctgctactcagaaactctattatagtggtggtagcagcctcattttgttgtatctgatggtagtttcgtcatcgcctgataggaaagtctcatgatcgccctcgggaacgcagggtggcgagatctgtacttatatttgtaataaacacaatccggatgggttctgtcctgtgcaatttgttgtgcgcataagcattccgtgtttttatacattattgtgaggaattgcataagtttttttgtttttcgattaaa

SEQ ID NO: 37727 - DNA, 2262 bp, Zea Mays
aggtgcgcgcgtgtttgttttccggccatctgctccatttgctcggggagccagctgattaataaagcatttaggcgcgcgcgaagcaacaaactaattctgggctagctatggccggtagcaacggaactctgctgctcgcactccgcatcgtcctcttctgcgccctcgcctccgtggccaccaccttgctccctctcgtcacaaggccatgcgcctactccctgccaagaaccatcctcgccgccagcggcctcgaccctcgcctcatctcctgcgcggacgacggctccgccaaggcccagctgtcggatggcgatggaggccacaacaaggccggtagcggcggcaggcccatagtcaccgacctgctgtcgtgcggcgagccccgcctcccatcccacgcgctcccgcccttccgctgctgcccgccgacgccggcgtccgacgctgccgtcgccaacttcacgttccccgacccaggcgagccgctccggacgcggcagccagcgcacggggccgccggcgcggacagcgtcgccaggtacgcgcgcgcggtggcgctgatgaaggcgcttccggagtcggacccgcgcagcttctaccagcaggccaacatccactgcgcctactgcaccgcggcgtaccggcaggcggggcggccggagctgcacgtgcagatccacttctcgtggctcttcttccccttccaccgcgcctacctctacttcttcgagcgcgtcgcggcgaggctcctgggcgaccccgggttcgccgtgccgttctggagctgggacgtgccggaggggatgcgggtgccgccggagttcgccgacgcggcgtccccgctgtacgacccgataaggaacccagagcacgcgccgcccagagtcgtggacctcgacttctcgaaagtggacaagaattacaccgacgagcagcaaatccagctcaacctccggaccatgtataaacagatggtcaccaacgcgccgctgccgtccctcttctacggccagccctaccgcgccggcgaccgggagatgccgggggctggaacggtggagctgagcccgcacaacacaatccatgtatgggccggcgacctctcgcagcccaaccacgagaacatgggcacctactactccgccgcccgcgaccccatcttcttcccgcaccacaccaactccgaccgcctctgggaggtctggcgcggcggtccggcgcgccacgcggacttcacggaccccgactggctcgactcgtcgttcctgttctacgacgaggacgcccggctcgtgcgagtcaccgtccgtgacatgctcgacatcgggaggctccgttacgcgtacgccgaggtcgggctgccgtggctcagcgcgcggccccccatcaaccctggcgacgtgaaccgcggaagagacccgccgcacctggagtccgtccgcttcccggtgtcgctcgatgccccggtgactgcggaggtgagccggcggccgggaaagccacggagccactgggaggaggtgctggtggtcgagggcatcaaggcggacggcgcggacttcgtgaagttcgacgtgtacgtgaacgcggtggatcacgagaagatcatgccgggcggtcgggagatggctggaagcttcgtgtccctgaagcaccccggaaatatggtggtgcagagcagcatgagggtggcgctgaacgagctcctggaggacctgggcgccgagggagacgacagcgttacggtgacgttggtgcccgtggaggggagggtcaggatcggaggtctcaggatagtgtacatggcggagtgaggaccagcgtaggaaccgtttactctgcagtacgtccagggaggttttgaacagacccacatatctctgtattttaattatttggcagtgcaccctcacattgctagagccttcaagaagatgtcgttcgaccacaagttaatttgggctcgtaatttcgtcaatgagaagttcccaggagtgtgagggctattactaggtaggcttggacaattcttttgcttgaaccacatcgaacaatgatttgtggtctaagtacgtgtggattttgtgtaaaccttgaacttgatattatttgtaaggctatgacacattattatgtgtgttgtgtggagttaatagtaatatgtgtgttttgtggacttaatattagttgtaacatattttgagatgggggcaatggctgcaagtattttggttaaatttcagttttttgttctca

SEQ ID NO: 37728 - DNA, 328 bp, Zea Mays
ttgcgatccgttttcgagcttcgaggaatcaaacatcaagcgttggcgaccaagtgatccagttcttcgagttccacgagatcgaagaccctgagcatctgtttgatgaaggcaagtgtcctcagtcccattatgtctcatttactttataatacactgtctcgcatactatgaacaacctaaggatttactagctttctatttaccttatccttgtttacctttcggattactatggttagattcatgctagcgctttaatttaatcaatgaacatgacgagatgcaacaatgatacgatgtttttattttggatacgatggtaata

SEQ ID NO: 37729 - DNA, 379 bp, Zea Mays
  misc_feature (378)..(379): n is a, c, g, or t
ttaattggtttttgtatactaatgtgtttgtctaagtgctagaaacagtgacaaaagaaaaggaaaaagagttggctatgtgcagccaacaccaactttggccaggtgcaccggactgtccggtggtgccagaatggccgacggtgaaccggctgctctcgggaaacgcagaggcatacgactataattcaccggaccgtccggtggtgcaccggactatccggtgagtcatccgcgacgaactcgtcggtctcgggaaaaggaaaaaggcgacgtggctataattcaccggactgtccggtgagccaacggtcgctagagccaacggtcggccgcgcgatcaacgcgcgacacgtggtcgcgccaatggtcggttgnn

SEQ ID NO: 37730 - DNA, 2114 bp, Zea Mays
gtgctttacttcgcgcgagcaaagaggggagctggggagggcaaacacgcactagacccaaatcctcgtagctccagacatccagaacggcagaaccttctagaccaaaccttcgacccatcacctcgagctccagccatgtcgctctcgtcggcgcgccagcgccgggccactgcagcgtcgccaccgacagatgatgggtacgccaaggacgccaaggacaggaggcggcggcccggcggagacggggacagcgaggacgagggtatcaagtggttcctcccgttcctggcgctcgggctcctccgccacatgagcgcgtcctccaacctgatccacgactgcgacgaggtcttcaactactgggagcccctccacttcctcctctaccgctccggcttccagacatgggagtacagttccgactttgctcttcggtcatatttgtaccttttctttcatgctcttgtagctgggcctgcttcattgatctttggtgagcataaggttcgtgtgttctactcagtgagaatctttcttggtctcatttcaactattaccgaaactgttctggtggttgctctttcaagaagatatgggaagcggcttgcttgttatgttcttgcaatgctatgcttatccagcggttgcttctttgctagtaccagtttcttgccaagttcattctccatgtatgcagtaacactttcgtctgcactcttccttcttgagaaatatgctggtgcagtctcagttgcagctgctggagtgatccttggttggcctttctcaattttggtcttcctccctgttaccgtttattctctaattagaggatcttttagaagggtttttctatctggatttgtgacttcactgtgctttcttgttctttcgtttgttgctgattattactgctatggtcgattgacattctcggtgttcaatcttctgaaatataacgttattggtggcggcgaaagtcacttgtatggaaccgaggggttttcattttacttcaggaatggattcaataatttcaattttgccttcatcctggctcttcttttcttgggggttgtaccatttgcaagaaagaaatatgctcctgatctcctgatagttgtctctcctgtctatatctggttggctttcatgtctttgcaggcacacaaagaagaaaggtttctctatccaatttattcattgatatgtgttgcagctgcagctgttattgacagtttacctgattttttccatgacaaatattcatctgatcagtctatttttgaaaagatagcgaagggtctgcgtcctttgatacttggttttattctgtgtgcttcccacagccgaacattttccatgttaaatggatatggtgctcccctgcagatctatcagcatctagaacatcatgatgacactggacccgggtctattctgtgtgttggaagtgagtggcatcgctatccatcatcgttcttcataccctcttatatcagtgaagtccggtggatagatgatggcttccgtgggttacttccatttcccttcaacgagacactgggtgggaccactgcagctccgtcctacttcaataacaagaacaaggcggctgaagggcaatatctgaaagacattggagcatgtaacttactggtggaacttgatctaagacggccttacccctcgcgcgggagtgacttgtcgacatgggaggcattggccgcactgccgttcctggacagagagctttcccctgcattatatcggtccttcttcataccataccgatggcaacaaaacaatgtgttcggcctgtacaagctactgaggagcttgcagatttttactgccatagattttctgatcccaatgtgtaatggcgtacctatttttgtcccactgatccttccatcatacaaattcatcacgagatgacgaggatgagagtgctcaactgctgatgtagggagggatgttcgaggagaatcatgttgtgaaacggctgcttcgccagttgttacctttttggattgtttgttgaatattagccaatgacagactgatagatctatacctttttatgttgagcatttttttcctcctgc

SEQ ID NO: 37731 - DNA, 3371 bp, Zea Mays
gtaaacccatccggtccaggagatttatccgagggcagataatttatagcattttttttctcgaacatctaagtttgtagcccctcctaacacccacaggtccctttcctcctcggttctcttgatggcttcattaaggcagggagaaaggccgtcaaaaacacaggcgtttcgtctcttctatttgcaggctgccgaggtggcattggaagaggaaaaatgttaagcagtgggtttagtggtgggggtgggcatggtggtaaaggcggtgatggcatttataatggtggtcatgtagagggtggatctgcgtatggtcatgctgatttaccatgtgaacttggcagtggcagcggtaatgtcagtggatcttcaactgctggtggtggtataatagtgatgggttctttggaacaatctctgccgaacctctccctttctggctcgattgaggcaaatggtggtaattttactggtttgatgtctcatgccacaattggaggacctggtggcggttctggtggtacaattcttctttttgtgcggacattactcttgaagaaggactctgtactttctagtgttgggggagttggtggcaatggcagtggtggaggtggagggggtcggattcacttccactggtttgatattcccactggagatgattatattccttttgcaaccattaaaggaacaatacttgcaagaggaggagtcagtgaagggcaaggtttctctggtgagaatggaaccatcacaggaaaggattgcccaaaaggtctttatggaacattttgcaaggaatgtccctcaggaacatacaagaatattactggatcatctaagtccatgtgctcaccatgccctccaaatgagctacctcgccgtgctgtatacataagcgtccgaggaggtgttgctgaacccccatgcccatacaaatgcgtgtctgatagatatagcatgcctcactgttttactgcccttgaagagctgatatacacgtttggtggaccttggttgtttggtctgcttctgtctggccttcttgttttattagctcttgttttgagtattgctcggatgaagtttgttggtactgatgagttgcctggaccagcaccaactcaacagagctcccaaattgatcactcttttcccttccttgaatcactgaatgaggtattggaaacaaacagggcagaagaatctcactgtcatgtgcacaggatgtatttcatgggcccaaacaccttcagtgaaccttggcatctcccacacaccccgccagagcagatttcagagattgtgtacgaagatgcatttaacaaatttgttgatgagatcaatgctcttgcagcctatcagtggtgggaaggttcagtttttagcatcctatgtatactttcatttcccctggcatggtcgtggcaacagtggcgcaggagaaagaaattacaaaaactacgtgaatttgttcgttctgaatatgatcattcatgtttacggtcctgccgttcgcgtgcactttacgaggggctaaaggtagctgctactccagatttaatgctgggttatttagatttcttccttggtggggatgagaaaaggactgatcttcctcctcggcttcatcaaaggtttccaatgtccctgatctttggaggtgatggaagctatatggctccattttcacttcatagcgacagagtggtcacaactcttataagtcaggctgtgccatcatctatatggcatcgtcttgtagctggattgaatgcccagttgcgtttggttcgccgtggaaatctaaacacatcacttctccctgtgctcaaatggctagaaagtcatgcaaatcctgaattgaacacgtaccgtgtgcgtgttgaccttgcatggtttcaaactacagcattaggttaccttcagtttggtcttgtccttcatgctgtcgggggagtggtggctgctgaactccaggatggctgtacaagtaaaaccgatcagcattcagtaaaccagaatacatgcactgactctcaaatgggccactcaaggaccaatgatgttctgcgtaaaaggataactggcaccattctcaatgttgacaacttaaggatgcttggtggcaggagaggtttcttttaccttctctctcttatcttgcacaatacaaaaccagttggacatcaggaccttgtcggcttagtcatctcaatactgcttcttgcagatttcagcttagtcttgcttactttcctccaactatattcatattctatggtcgatgttctgttagtcttgttcattcttcctcttgggatactagcaccatttccagctgggataaatgctctttttagtcatgaacagcggcggtcagctggtcttgctcgtgtctatgccttgtggaatattacatcactggttaatgttgtaagtactcctccatcattgtctgtacctggattttgctctaacaagttcattaggttgccaagttcagattcatagggagttgtaatcattgctgtttgcttgagcatttgttggggattcaatattgccattaagagttcaagcatgggcatcgatagaggctgaatgctggaaccttattcctacccccagatttgtatcatgttgtggcttttgtatgtggatttctgcattacaagtcatcaagcaaaaaacatccaagcatgcagccgtggagttttggtggggaggaaaccagctggtcgctattccctataggacttgttctatgcaagtgcattcaagcaaggcttgttgattggcatgtatctatcttggagatccaggatcgtgcagtttatagcaatgacccaacaatattttggcagtgaaagcatttcgatttacaggagttctcatgaggagagcttaatgcaactcaagtttttgtgggagttgataaaaggaaggctatggagttagtctgttctttgtccgcccagtcaggggaagcatgtacaaagtagatgctggtaattgcctgcctatatagacttaatgacttacagtgcatggtcaaccttttgtccagtcactcacccagctttgttttccttgtacataggaaacgggtttaattagttgaccgattcgttgtaggatttaggatttagacaccatagaattatagattacccaaggtaatctcaaagagatggtggaaaacatatatacttcttttgtttaaagctttgtcttttgcattgatgttgagctgggaaacgggtgaggcatcaaatagagcttttttcccctctgttaagattaagacaaatgttaacgtgctgatgttttattcaagatctggttgccatatgttcccgtga

SEQ ID NO: 37732 - DNA, 4234 bp, Zea Mays
ctagccttcgggactcgccatctcccagccgcacgctcttctcgcccacgcacacacgattccttctcgcgctctcgagattcttcccacacgcacacggaagattcccgcctcctcccctctgtcgccgctgctgccaacgctagcaccgatgccacctcttggttcccaggttgtgtcttgcctctttccatccaccgtcatcgccgctacctatggcttccccgtcgggtcgtctcttgcctcattctgttccccgccgctgctctcgccacccactatcggaggcattgtgtccagaaacatggttaagagggtatgctgtctgagcgccagggagatccgaacggtgatgccctctactcgcttcccattgtcctagagtcaggcaaatggaggaacatgagtcagtggggctgccatagttggagaatgcggcgtaagcaggccgacgacggcgagttcctcaacatgtactccggtgaaattttggtggtggttccgtgacctgacatctttccaatatcgaagatgagaaataccgaggctccatatgcgtgatgacagctcctccgtcattaccatttgttttatggtagcgagatgcgcgtgaagacatttggattcgtccaccaccacatcactagtctcactctcacctgtaatatatctgcacccaacgagcaggtaccaagcaattagcaagagaaacacaaggtcgaggtggtgaggtatggagctcgccttgggggccatgaccagcttggcccttaagctaggcgacctgctcatggaggagtatgtcgtgcagaagggcctcaagcccgacatcgagtctctctccagggagcttgtgatgatgaacgccgctctcatcgacgcgtcccgggttccacctgaccagctcaccgaggtggaaaagctttgggcacgcaaggtccgggacctgtcgtatgacatggaggacgccgtcgacgatttcatcctgcgtgtggctggtggtgacgactctgccgccgactcaaaattcttcaagaagacccttgccatggtcaaggacgtgatgtcgatgaagaagttcaaggatcggcgccagatctccgacaaggtcaaagacatcaagaaactctccaacgagttagctgaacttcgtgccaagtacacggtaaggggtgtgggcgctgatctcgccgcgagcaccggcatcgaccctcgtgtcatcaatctgtacaagaaagagacagatctcgttggcatcaagaagtcaaggaacaaagtcattaggatgctgtctatggagaccaaagatgatgatgcacttgagtcccatcaggctctaaagatagtgtctatagtcggggttggaggactaggtaagactactctagccaaaacagtgcatgacatgcttaagaagcaattcgactgttctgcttttatttctattggtagaactcctaatctgaataggacattcgagaagatgctattgaaacttgatcgtgagtataaacaagttgacatggccagatgggatctagaacaatttaaaaacgaactggatgaattcttgaaggacaagaggtacttgatcgttgttgatgacatatgggatgttgactcatgggaagcaatcagatatgccttgaaggacaataattgtggaagtagaataatcatgactactcgtaattttgggattgtcacgaaattagaagaggtttatagattaaaacctctttctaatgcaaactccaagaaattgttctacaaaagaatagagagtcaggaaggagaaagccttgatggtgaactctctagtaaaatcatacataaatgtggcggcataccattggctatcattgcaatagctagtttgttggttgaaagatcacgtgaggagtggtcagaagtgtacgacaagattggtcttgggaatgaagacaatacaacaaagataatgtcatacagctactatgatctgcctccttatctcaagccatgtctgctgcaactaagcatatatccagaagactgtatcattgatacaaactctaccatatggaagtggataggtgaaggtctagttcatcttgagaaagaagagggtagcctatttaaggttggagaaagatacttcaaggagcttgtgaatagaagcatgatccagccgacagaggacaaaaatgatcggtttgtagaagggttccgtattcacgacattgtgtttgatctcatctgtaagttgtccaaggatgaagacttcattaccattagcgggcaacattcatctcgggatagtttaagaagagagaagaaaacatgtgtgcctcgctcagactgcaagctacgtcggctggccgtccgaaatcaacgtgtgcagcgcttccctgaagaaaccatcgacatgccagaggtgttgagatcacttagcattatagattgtaatattgaggttatggccccaattgatagcttcagggtttgccgtgtgctgcatctggggaagagctacgtacccatcagcctaaagcatctggggaagctgttgcatctcaagttcctagagatagtatacacgcctattgatgagctccctaaggaaattgggcatctgaggtctcttcagacactgatattagaccgtactggactagacgagctgccaccggttgtttgctcgcttacacggttgatgtgcctgatagcccaggggttcgaaaggttgccagctgacaggatggggaacctaacgtccctggaggagctacgactacgtagggtagttggccggagtgccacccaagccctagtggcagagcttggcaagctgacgaggttgagggtggtcgacatcaccttttcagagcagctagaggagagcttgcaagaagcattggtgcaatctctgtccaatctgcggggactccaggaactaacgcttttgtttaaaatgacacggtggggaagcgatatgtggggagactgggagccaccaaggcagctccggcgcctgattattgaaggcatcatcgtcttctcacgacagcctcgatggatcaaccgctcctgtctgccacgcctctgctacttatctctgatggtgcacactcttgaagcacaggacctagataatctagcgaggttgccagagctccagtacctcacgctagatggtctcagctggcctccaaggtatactgttggcccagacgacttcaggaatctgaggttctgcaaagtgggcacaacgttcgagtttcgtaagggcgccatgccaaggctcgaagtgctgcaatttagagtttttgcagggtactattgttgggcatacaatggtgtgccgttcgagcagttcccaacgaaggatcttgacttggacctggataacgtccttttacttcagcaagtaatagtcaaagtcaactgcgtaggtgctactgtcacacaagtggaggaggtggaggccgtggtcatgcgtgccgtggaaaatcatgccaaccgtccaaccataaaaatgaatcgagcatatgaaatagctatcctatccgacgaagggcgggaggctctgcttcggcgacacattgaaaaggattgctgcgtgcgcacgatgaaggataaatctgatgctttcttcatcagccagctgcggaggtatcgacatcttcagaaagccattattttcatcgactgttcgggtgccagcatgtgtgaggtgcagaaagtggaagcagcttttagacatgcagccgaggttcatcctaaccatccaagtattgaacttatcagaacaaacaccgacggaatggcctcctcctcatctgaccatcccaacacagagcccaggaattgatggctcggtttgtcagatccttccaacccaggagcaggtaaatgtgagttgcttaagtaccaaagagagaggtcctgttcagcaagatgattagaagcattggcaattggcatggcttgttaattagattcgtggttcttagtctaaaatcacattgaagagggagacggacccaagtgatgcagttcatgtgttatctgtatcagtctctgtttttataagctgtcatatattttctcgaaactatcttgtgttgattttgtgtgaagtgtacttttaatggcacgggccattgtgtatttgcttgaaagataaggatggtattatctttgtatttgaactctaaatgcttaaatgaagtgatcattctggatggagata

SEQ ID NO: 37733 - DNA, 1347 bp, Zea Mays
gaactccgtcataaacgagaacccagccgctgagtagacttgtgttttcgcttccccttccccatcccctctcctcccctcgccggcttgtcggtctcgccgcgccactggccatacatccaagacgctaatccgtgtgggggaaaagcccccctctctctgaaactattcaaatggcgtggggcgtatccccgcggcggcagccgtcgttcccggtgcaggccctctacgagctctgcaagcgctccttcccctccccttccgccgcctcatcgtctcccccgcccgctgatgtcgtccgcagcatctcctcgctcatggatacaatcactcctgcggatgttgggctcagagattataatcttgaggacgacagggggcatggattttttgactccaacctcctcaagggttcaggaaggcttcctcggtgggcgcggcccatcaagtaccttcatatctacagctgtgatgcattctctattggaatattctgcttgccaacttcatcagtcattcctcttcatgatcatccaggaatgactgtactgagcaaaatcctttatggttccatgcatgtgaaatcatatgattggatagagcctactgtcctagcaagtagccagccagcaaggttggccaaattacatacagatgatgttcgtactgctccatgtccaacctccattttgtatccccaaagtggtgggaacctgcactgcttcacttcagtatcttcttgtgctgttcttgatgtccttgccccaccatataacgatgacgctggtcggatttgcacttattttcatgactatccattttcaagtctctcagctggacgcacgaaggtagctggtaacccagataattatgcatggctggaggccataaacactccagtgaatatcaacatgcacactggcatgtataccggtccaactgtacagacatgatgtaaagatgaaccggagcatcaagcagcagctgggtgcctcttcactgatagtagagctctaatatagtgatgtatgttctatactttgaggttagcttttcccctctggccccctttgttggagaaactgttgtacttcagttaagagataagttttcagagtaatttctcctaatcagtttagtagaggtttcaggttcactaacctgagcagtgatcaggcttttagcttatttatttatgttgtgcaacgctggaatggttttgaatgcaaaattgtcactgatgttgccgcattgccgtcttaactcgcgggggctggctgcatgccgatatcggtgtttgaacggaaagaggactcacaacaagaaatgaatgaacgatgttccatt

SEQ ID NO: 37734 - DNA, 318 bp, Zea Mays
tttgaagacaagaagcacgaagttataattgaaaatttagaaagcaaaataaaggagcaatcagctgctattgagaagaagaactttgagctccaggcaactgaaggtttattggcggaggccgaagcaaaaataacagaactgaacacgaagcttctttgccaatctgagcagtttgaacaagaaaagcaagaacttaatgcaaaacttgaagccgaagctcaacaaaatttagatttgaaaaaactattggcgggccttcaagaaaaatgtttggaatttagcaacaaatgcattcaacgactaagaaaaattttc

SEQ ID NO: 37735 - DNA, 928 bp, Zea Mays
taatcatgaactctcttggagtgcttagtgcattactcatgaaaatggaaaagagtgcattatgagcacggcggctctatcagagcgtgatacattcacaagctgaagagggctcggtcatccggaccggaattcgtaaaggcattagtgcattagcatcgtcaccactcgcgccgtcgtactacctcgccgactccctcgcttcgcagtgcaaggacgaagccagaatgctaccagaacggcgtgtttggccttcccagggggaagatggatgtggtggagaagatccagcgagggacgaagctgttcttgtatgattttgacctcaagctactgtatggggtgtacaaggcagatacaaggggaggattggatcttgtgcgtcacgcctttgatggcaaattccctgcacaggttaaatttagcgttttcaaggattgtcttcctattcctgagagtagtttcaagcatgccattaaggagaactacagctcaaagggcagactattggcactgttcaagcctatcagcctttctaaaccagctccacaacatattgaggatattcgaaaaccaagtgattatgaagaaagaagacagttgcaacatattgaagaaagggctgcacctattaatgtccacgcacatcctcttgaagatcggtacaagatgacacggtcattacatccgccactttttgatgagcctcgacgtggtttggtgctaaatccttatcatatgcaagagcctcaacatgttcctcttaattactatcaccaagtggctactaggtctccataccatcaacctcatatggatattatgcacgaaagttcaactatgtcgacaaccatgttcaaccattgccttttgattcgtcattaggaaagccaagctcactcacttattggcttgcagttagctaaca

SEQ ID NO: 37736 - DNA, 1577 bp, Zea Mays
gatccgtagtaggagtaaggttcgccaaagttgctgagactttggtgacctgtggatgctttgatcctgtgtttatttcaagattgcagatcatttaacataaatggctgactcagaggacattcagcccctagtctgtgacaatggaactggaatggtcaaggctggctttgctggagatgatgctccccgtgctgttttcccaagtatagttggtcgtccacgccacactggtgtcatggttgggatgggacagaaggatgcttatgttggtgatgaggcccaatccaagaggggtatcctgactttgaagtatcccatcgagcatggaatcgtaagcaactgggatgacatggaaaagatctggcatcacaccttctataatgagcttcgtgtagcaccagaagagcacccagttcttcttacagaggctcctcttaaccctaaggctaacagggaaaagatgacacaaatcatgtttgaaactttcagtgttcctgctatgtatgttgctattcaagctgtcctttccctttatgctagtggccgtaccactggtattgtcctggattctggagacggtgtcagccacactgtcccaatctatgaaggctatgccctcccgcatgccattcttcgtctcgatcttgctggtagggacctcactgattccctcatgaagatcctgactgagaggggttactctttcacaaccactgctgagcgggaaattgtccgtgacatcaaggaaaagcttgcatatgtcgcgctcgactacgaacaagaactcgagaccgccaagagcagctcatcagttgagaagagctatgaactgcctgatggacaagtgatcacaataggcgcagagcgcttcagatgcccggaggttctcttccagccatccttcattggtatggaagctccaggaatccacgagacgacctacaactccatcatgaagtgtgacgttgatatcaggaaggacctgtatggcaacattgtcctcagtggtggatccaccatgttccctggcatcgccgaccgcatgagcaaggagatcactgcgctcgcgccaagcagcatgaagatcaaggtcgtcgctccaccagagaggaagtacagtgtctggatcggaggatcaatccttgcatccctgagcacatttcagcagatgtggatctcaagggctgagtatgaggagtctggtccagctattgtccacaggaagtgcttctagacgtcacctagccttaattctcctctggaaataccttcgtttgatgacatatctatgggtggttgctctgctatagctcgcagtttttgtgtttgccaatatatccggtaacattgtggagtcagccgtccactgtatgaagtttgttcattctccgactgatttgggcactggcgtgttgcttctccaattttttgtgtggtgcttatgttctcacaaccacaagcatggaagaaaatgactggattgagggagattaaatctaggagtctacttcttctaaccgaacaagccataagatttttttttaggagcgagaggattgagcaggctaaaatcc

SEQ ID NO: 37737 - DNA, 3527 bp, Zea Mays
acacaaacacaacgacgatatatgcaccttgagctttccaccccataaagacgagccagcagggccagacacttggtagtgtgtgtgtgcgtgtgacaccttaattagcttgcttggccaggcattcactgatcgatggcactactggtcaagagccaccagcaaatgttggtctcctcctccaccacctcctcgtcgtccccttcgtcggcgtcccagcagcggcacccgccgccacctcctcctccctcctcctcctgcctcaccgaccagcaacagccgtccccagccaagcgcaagaggcgccctcccggcacgccggaccccgatgcggaggtggtggcgctgtcgccgcggacgctgctggagtcggaccggcgttggcggcggcggcggcggcccccggaagcgcgtgttcgtgtgccccgagccgagctgcctccaccacgaccccgcccacgcgctgggcgacctggtgggcatcaagaagcacttccggcgcaagcacggcgggcggcggcagtgggtgtgcgcccgctgcgccaagggctacgccgtgcagtccgactacaaggcgcacctcaagacctgcggcacccgcggccactcctgcgactgcggccgcgtcttctcacggtaacgtagcctactactagtacatagtacatctacatactcgcgcacacgtgcatgcgcacgcacgtacgaaaccacacgcgtacgggcgcgatcggtgcggtgatcgagcatggcttgtccggccggccggccatgaacccggtgtgcgtggtcgttcgttcgttcgctccggtgtgggatcggagatggacaggcttgcatggagataagacaaatcacaaatggcttgctttggtgctagccggcttctgagtaggaccaagccctctgcctgtgcatatgtgtgcttgctggaccaggcgcccaggccagtgccgtcaccacggcagccgacaccaattaattagggttaattcgatcccttgtttagtgatagcaagctgaccacatcactagctagctagttgcatgcgtccatgcgtacggacatgggtggggctatatatgttttgcttgcatgctagctaatcatgatatctatgctatcgagctcagctcagctaccgaatagatatatagctgatgacgatcgagtgggttccatagtatctaaaaatgtccaccagcaaggtgaggaggctgcaggaagaaatgacgacatatatctttcctcttgccaagaacagagaagaggatgcacatgcatagtgcagtgggagatatgatcgtttcggtggcgggttgcggtaggaccgaaaactcaaacgcgacggggcgacagcgacggcgcatccaccagaaactgtcttggcgcatgcgttttcttcctttctcctctccccgttgtgctcacgggaactcaagagagaatccgacatgcatatctatccgccaatagtacatgcgtgctattagttaaaaatctcacccctatccatgattccattttatttatcacgttttagtttaaaaataaaatagctagtgataaatattttaagaacggagttagttagtactaagtaccactgtcggtaactatatatgcaaaggaaactaggtacaatatagtaccattattatgttgtagatgcaaacttgacatgtatatacatatgcgtgtactagaagctagctacctaagcttgccttctgaagtactgatggagtattggtaactgaccagactaccagactagccaccggctagagcattcggccagtggtcgtcaaaggatctctaggtacggtagatcgagtagagacacgcacacgcacagcgcaccacggaatgcatcatgcatggcagccacactctcttgtcgtcgctgaccagccacacccggacatgcctctttcgatctccatacagatcgctcgtctagctagctgatatatatcatacttattacgtagctttcatctatgttacaattagctagctactaagctagtgcctcgtacatatatgacatattcacatataagtatatgtgtggtccttggattattgatcatttgttttttgctcactcattcgatcggtcgatgtacgtatatatctggcacgtactcatccaaaaaaaacgagctaatgcggatcgctggctgttcgctctaactgtttagactactggagctacaattcataaaaataaaacgctatataaataatagaagtcgttataaattaaaaccaagtttaacataaaatcgttggatcgatcggcacgcaccagtcggtctccataccatcgctatctacccgcctacccgtgatcgatgcgttgctttcccgcgcgagtcagcaggcgatcagccaatcatgcatgcacgccgtgcggtgcggggcggtgcaaaggggcttttcccatctcgccgaccctctgctcgtgacagcgacatgcagcctctcctgtgatcatctgattaccgtccgcgcctccgcggacgaggcgactaatgatggatcagcgtgctttcttgcagggtggagagctttatcgagcaccaggacgcgtgcaactccagccggatacgcggcgaggccgtggcggtagccgtgccggcgccgccgtcggcgctcccggtcatccgccccgccgtcccgcggcaccagcccacggtggcaccggcaccgccgccaccggagctccagctcctccccgcctccgcggcggcatcagcgccgctggctagcacaccgaccgcctctctgtccaccaccacaaacgcgtcacaggagcaagaaccccacgcggcggcggcggcgacgacgacgacgaagctgcagctctccatcggccccaccgtcatcgcgccgggcgccgacgctgctgcggcgaccgcctccgccgtcggcgaggaggacgactccgaggcgaaggagctgcggcgcgcgatgaaggagaaggccgcagcggacgcggcgcgggcgcgggcgcgcggggaggccgccgcggcggagcgcgcgctggacgaggcccgccgcgccaggcagcgcgcccgggccgacctcgagaaggcgtgcgcgctgcgggaccacgccgcgcgcctgctcgcgcaggtcacctgccacgcgtgccgccagcgctcgctcgccgtggccggcggccccgcggtggcctgcgactccattatcaggggaggaggaggagaagcaggcatctagctccaccacccgtgctcgtgtgcatgcattgcatataccgtatgcactgccttgtagatctagctaagctaattcgtaatgtaggacggccttgtcggtcgtgtcgtgtggccattactgcattgaatgcaaccatatgcgcccgcttggtttctactttctagggtgctacaagttgcaacgttgtttggcctagtaaaagtatgaatgagatcatgcacgtcaaaataacctcaaaggcaaaggctgatttgatgaccaacgatcacgggttaaa

SEQ ID NO: 37738 - DNA, 3123 bp, Zea Mays
ctctccgcggtccgcccccctctcaccccacccatcgtccctcgcctcctcccgtcccgcacctcgccggagcaccgcccccctcgccggagcaccgcccccgcctccctcgcgcatccccctttttaccatctcctccgcctatctctgctccccttatccatcctcgagctcgcccgccgcgtggatcgcctcgacccattttactttttttttgtacctccccgcccgagcgttagctggtgggcggatgtacgtgtcttggctggagatggagatgccactggcttgacggattgatctcggggagctgcctttagtgaccggccgccctcggcctcgccgcggcggccatggacacggagaggggggcgggcagcgagcaggggtcgcccgacagcgaaatgggagacggcgacaacgacagcgtcggttacggcgcagagatggaggtggacgccgggagcggctcggccggggcctcggctccggcgagctcggcgtccgcatcggcctcggtctccgcgtcagcgtacgccgcgcgcgccggcgcctacgacggggtcgaccctttcgagggcatggagttcgacgacgaggaggaggcctggacgttctacaacgtctacgcccaccgcgtgggcttcagcacccggattagcgtcatgcacaggtcgcgacggaacggctccgtcatgtcccgccagttcgtctgcgccaaggagggattccgcacctaccgcgggaagaatgaggtttcacgtggtgatgccgtagacgctggcgacgacgatagtgggaggggtcggcggacgcgggctgtcaccagggttggctgcaaggccatgatccgggtgaagaagcaggacaatggccgctggagtgtgaccaagctggagactgcacataaccaccccctggtccctgcgaaccaggcacactgtctgcgcccgcacaagccactgtcagagtgtggaaagcagcggccttttgggggccatcgaaatggcagtttgcctctggcaattgagccaccgccacctcctcttacaccgcctgttcctcatacaagcatagctcaagtggttcctgagtatgtttcggatggtatcgggcatgacactagagtaattttggattatgtcaagcgcatgcaagctgaagatccagcgttcttttatgccatgcaatttgttgaggggcgtccagtggggaatgtgttttgggccgattcgagggctaggacggcatacaaagattttggagatgccatcatcttggatgactactgcaaaaggagcaagcatgaacttctactttcagctgctttgaaagtatttcctctaactaggctccagttctgtaagtggcacatcatgaacgaagcacaagataagctgtcatatctcctagatgtgtttccatccttccatgaggactttatcaattgcatcaacatgtctgaaacaatcaatgagtttgaagcaagttggaaggcattaatttctaaggtcagctctcaaaaaagtgaatggattgacttgatgtacagctgccgccatcagtgggtccccgtatatctgagagatacattctttggggatgtgtcattaaagctgcaatgttcaagcaggagttcgttgtttgaaggttatatcagtgccaaaactgattcacagtcattcattcagcagtacgaaaaagctttagactgttgttacgagaaagaggtgaaggaagaatttgaaacaaaatattcacttcctgatatgaagacatcatctcctatagaaaagcaaggagcggagttatatacaaggtcaatgtttttgaaattccaacaggaattggttggtgcctctgtttacactgctgacatggtgaaagaggagggcgatgcttcaatttatacagtgaccagatctgaaggaagtgagaagtctgtaacagttcagttcagttcttctggaagttcggcgacatgtagctgtcatatgtttgaatattttggtattgtctgcaggcacatacttaccgtgtttggcataagaggtgtctctgcactcccttctcattactttgtaaaaagatggacaaagaatgcactggatagaagctcaggcaagaatgttgacgaagttagcagagttgcggagcccaaggaggagcaaagaagtagcgctgaagatgatgagcagtccccgacatggcgttacaacagtttgtgtcgtgaagcactaaggtatgctgaggagggggcatcatcattagaggtttatattgtggcaatgcaagctcttcaagaggctgctaacagggttaatatggccaagagaggtattggacaggtagcaccattagcggtgatgccaattgcagcacaaccaccagaaagttttgcaagaaatcaggagattagttctaataagcaaaagaagagaaaaaggaattcaaatagctcaagggagaatgtcacaccaaatcaacttatctccttcaattggaaatctgcaaggtggagaaacaaaatccatagggactgattcacaaataaaagagagccatgaattatcccaagctaatggtagcaggggatgcagtgtaaatacattaaactccagtgtcgcgccacagctcgtgactgttcctattggactgtgccttccatccactgatggctccaagatatctgcggctggtatgaactctgtaaattctggagatatcagtagcaatggcaagttgtcatttggtcttcatcaatctcagtcatctgcacaacagccagctacaccatcacagacaacaacgcttgaccatattgactcccgtgctaatcctgagggttcatctataagggctgcagccattgcagccggcgcacgcattgggtccccatctgatgcagcaacaatcataaaagcggctcagtcaaaaggcgccatccacatcatgcctggggaaaacctcccaaattacctgaaaccactagcaccaaaaccactttctgcactaccaccggcgaacccactcaacccggcacatgcacccccaggacagctcagctttggtgattctgcagccgccaaggacgcaatcttcggtcaacttttgcctgattaa

SEQ ID NO: 37739 - DNA, 2424 bp, Zea Mays
gactggtggaccagacccagcgaccgaacccgactcgatttcccaactccaaacctccttgcccctccgtgactcgccttcctctcctgactcctccgccttggcccgccgtctctcgccgccccggccccaacccctctcggactaggtgagggggccggctgcccagcgtcgtcgccggcgagatcttcccaccgccgctggcaatggctgccccgcacgacgaggccgcggcgtgggcggaggaggcggcgcgccgggtctgggccggcgccgtgccgctccaggtccacctccacgacgccgacgtcaccgcgctacccccgccgccgcccttcctggtatgcatggtcgcttagctgttaattaagaccacagctgctcaatttctagggtgctacagcctacagcagcgcacattacctaccggccgcccgtgggagattcagttgctggcttgctgctgtaggatttgcctgtcttttgtggctgatacccaactacgggtccaattaatattttgaagttgaatatcattgggtcgtcatgactcctgagccaatttctcggggcttacaaggtcctttctgctctatatctagaactagaacctacccccttccatttatatgaggaactggatttttttccttccgatccctgcaaagttttatgcagtgcccagtggtaggtttagtacacaaggctagctccgttgctgctacaattataacgcaggagaatccgtggtgcctgtctcgttaacttctgactgagcgtgattttcagtcttataatcatgtgtgcgctctaatttgtattttcttggcttgtttagtttgcatcttatgtgcactcagatggagtatactttataccagtgtttctacggaattcattgaaaattcatatatttatcctttcctaccctcaagtacaacaagagtgcaaagctactattcatcttttgtttctgtgcaaaggcctatctttccctttacaggattgttgctcgttgagaaaacttgggagttttggcgtatgcttttagtcctccatgatcttatctgtttcatttggaccatccttttgtcttgaacagactttgggaccaagaattgggtatttgcccctcttgatacctgttataagggctcatttcagcaatgcactcccacctggtgttgacactgtttggtttgaatataaagggctgcctttgaaatggtatgtaccaattggtgttctttttgatcttctatgtgcagatccagaaagaccatggaatctaatagtccattttaggggatatccctcagaaatcttgtcaccatgcgagggtgaagatagtgtgaagtggagctacatgaattccctgaaagaggccaccttcatcattactgggaacagtaagagtgtgatgaatatgtcgcatgctgatcaagtcgctctgtgggaatctgtaatgaaaggtaacttagatgggtataaaaatatctccaccaggcttaagcttggaccatttgaagatgatgtgttagtacggacagcctccgtggagcggcaacgtcaacaaaattctgatgaacctgaatctcctggatctagcaaaccgtgcagggtccctgttcgattatacgtacgcaatgttcaagaagaccttgagtacatagaacatgcagttcctgtcagtgactgggaaaacgtgtcctacataaatcggccatttgagactcgcaaggctgaaggtagaagctacatcaccctggaacatgcgttgcaaacattgcttccggagttcttcagctcaaagcccccaggcagcgctgacggctcccaacacgcaggcgcaatggacgcagccgcagacagttcagatgccaccaactcttcaagtcgttctcaggaggcagagcaagccctggcaagtccagcagaggcgggttctgccaagagagcgaaagtgaagctggtgagggtgcaaggtgttgagctcgacatggacatcccgttcctgtgggtcgccgaccacctcaagaaccccgaatactacgtccacatctgtgtatacgtcggcactagaaaacaatagagataagagtacatggggaaattgttagatactgcgttaggagtgtgtcccagaaatcattttctttgttctttggttattacatgtgctatcctgtgtgcagatacagacgctgaaatttgtaacccttttggatgcacagtcatggaaggatggaattggatggtgaaccattttgtgtgtgtgtgtgtgtgtgtatccgatcgacgtattgcaatatatatcctgcctggagcatagcagaattctttcgttgtagaacaaacacatgagctctgaacctgaccattctgatggtcgctgtcgctgacatgaatgactgaatgccatct

SEQ ID NO: 37740 - DNA, 2671 bp, Zea Mays
ctcgcgtttccgtttcaaacgattcaaaccaaactatcgtggcctcttggggcccactgtctcctctacctcctccgtcctccggatcccaaaatctcaaaccgtcaaacgggacctgatacctgagatacgcgcatggcgtcgccgcgccgcattccctctgtgcctgccagatccggcaacaaagagaatatatctcaagatggagaagctcccttggattttgcaaccttgcctaaagaagggcctgccactacaaggcggaagaagaagcttgcaggtttcaacttgaggaaaagcattgcctggaatcctgcttttttaactgaagaaggtgttttggataactcggagctttctgtgcttactggctcccaaccgatggcaaataggagccctggatcaggggtcagtagtataatgtccccatcctgtcagtcagggagatatggtaacacatatgtacggaaggaagccgcagggaattcacatggaaaattgcctgcaagatatcacagggcagaaagccagggaaggaaattgttttcttcagcaaaaactcctcagggggacaatcagaaagaatctgctggaacacaaaacagaagctctgcaagaatcatccaaatatgtacaccaagagtaccagctggatctatacagaagaaagtacaaaactcatctgcttctacatctcagatgtcaagaataccaaaacaattacgaccttctcttcctaaggtcccaagaagtacttcatctgtgacaaacaatttggaatcacacaaaaaaatagctccagttaaagctgaactagttcacagagtaactggattccctgctagattgaagatcaatcctgtatcttctggacctagcatagagaaggctgtggtgcctgctgttactgccatacatgaagaagccactgtgaaatgcaaaaaaaacccagcacacccacaaattagcccatccaccccctttgatagcactgtgtcaaaacttgctaagccatcagcacttcgattgccttcaccttcacttggttttttcactcaggaaaaagcgcatgtgccacatggtgatgctgctaaaagaaacgtggggaggtgtttctcttcaaatacttcagcgcttgatagacctcccagatacaggcagtctgaggaaagcagactccacctagcaaagcagctgtcaaccaatggcactgttgcttccaatcttgtgctacctgtgactagagagggccatctcaaatctttggtggttccagaaaatgaatcatcgtcaaaagttatcattacatacttagaaaaatctggaaatgtaaataatcaagcaatgccaaaggctgatttcttattggcaggaactggagctactgatactacacaaccaatgaatttagaaaagaaagatgacgctggaaatagtgagacattgcttgtagaaggaatggatgatatcaaagagattgaacctcttgataatttctacgctcctgaagctatttgttcctcaaccattcgacctgttgaggattctttctcgcttgaagccagttattcctcaactaaacctattgtagagagtaaattgtcactctcttgcatttcttctaaagtacactcctctagtgagcttagttgtcaaggcaagtcagtcagtgatcccagtgcagcgatggacatggaaaactctaatgttggagatactgcacttagcgcttctttgtcgaaaggcaggagttgcactccagctcttgatttgttgcaaggattttattcatttgatcgccagaatattgaatgtcctatgctgatggaatcagtatctacaatatgtgcagaccagctgccacattgtgacagtttaagcgatgaaacgccagccctagctggcagtcattcagatttgaatgattctttgtgtgatgaagctaaacctgctttgtcaaaagaaccaaatactgaaggtgaaatggagcttcaaacaaacagtaccatagctgtaaaggaaactccgttgttagatgtggggtgtgggcatattcacaattataggaccacagattgttctacgagattggaagcacctacaccttgtgtggaaagacgtcatgctttattagtagaaccaaatatggaagaaaaaatggtgcttgacacaaacagattgtcagctatacagtacacaccacatatagaaaagaacaaggcactggaaagatcaccggcaaatacaatccgtaaagatcatctgaagaacttgataccatttacagaagaatggcttgctgtcatggagtcttgtgggcaggaagttttggaacaaaagaccggtgctgtgcaaaattctcctcctgacaaaacacctccagaaccgagtccttggtcaccggttaaacggaaggcgcaagatgttggaccatttgactgtacgaagtactccaaaagcatccgaacctctgggcaactgaaacagttggagacagaacagctggaacagccacgtcctgttgccctattttgtccgtctaattctgacgaatagctagagatggttctgtcccaatttatgactctgtactaaacaatcttatttaaaaatcgttctatcgttgcaactaaacacatactggttttctggacggaatgtgtgttccatt

SEQ ID NO: 37741 - DNA, 868 bp, Zea Mays
cgccaggctactactccctctcctatctctcttctctctctccctcacgtctctctccctcacgtctctctctcccttcattttctctctcccttgcttctctcacgcacgtgccctggccaacgcacgcgacgccccaccgcgacgccgcacaggccccgccctgcgcgagcagcgcgctgccgcgccagcccaccgcgatgccgagcgcgcccgacgaccaaacgccgcgaaccgtcgtccgtttcttgcttcatggcgatttatttcatccgtttcttattcctattatttctccattagtaactgacgtattgacggcatttgaagcctgcggcaccccatgacctccctggcagactcttcttctcccctccttctctctataaatggggacagcagagctctctcttctctcctgcctacccaagcgccccatctctctagctcaccattgcactgttcgacgccgccgttcgacgccgccgttcgtcgccggagttcgctgctcgttgccggagcccgtggagttcgccggagtgtgccgtcgtcgccggagttcaccggagccgcgtactagttgtccgtagtcgagccccgctctccgtcgatccgtccccgtcacacgcacgaacccgaggttgatgacgacccaagtttattttatgtattttataaagcgcttttgattcgattcatgtgttgtatagtttgtttgttgtaatatgaacacatgtgattccgatttatgtatttgtgtgcgctacggaatttgttagaaatatgcgtgcatcgtgttatttcatgtaatcgacgcgttgaattttggtttagagaaatatgacgtagatttaatagtcacacgtcg

SEQ ID NO: 37742 - DNA, 2340 bp, Zea Mays
taataagctaacgtaatactcatcagtgcttcattcacctagcaagctcaggcgacctctcgctgctgagctagctgagctgaggatggcggcagcgtggaggccgcgtgacaacgatgacgacgacgaggacgatgcgggcggcggagccgatgatgatgatccgcacaggagtggccctaggcctacgcagacccgtgttgtaagaggatttgtggaccaagaaagtattcaacaaatattccactatctggaaccacttattagtagggtggtgcgagaggaaatccagaacatcttttcgcattgtcacaatgatcacatgccaatcaggtctcttcctctacgcatccgagaggcacatgtcttgccccatctgaagctagtctttgctaagcagcttaagcaaccaatcttcacaaacaacaaaatcgttgatatagcgaacaacccaattgaaatccatctcatggacacgacaaccaactctatgatcccaccagcagatactcaccttggaccatcatcagtagtaagactagaagtgctggttctgaacggtgattttcagtgtgaggaccgtgatgtgtggacggctgaccagtttaatgcagtggttctgaaggctagagaagggaagagaccattgctcgtgggctcactcaatgtccctatgaacaatcatggagtggctgtgattgatgatgtgttctttactgataattcgagctggataaggtgccggaagtttcgaattggtgtgcgcatcatgcccgcggatcatcttggatcaagagtcaaagaggcagtgagtgagagcttcaccgtcagagatcatcgtggtgaatcgtacaaaaaacactatcctcctttgatgactgacaacatatggaggctcaagaacattggaaaagatggaccaatcgataagaggttgcagtctgaggggattaggaacgtccaggacttcttgaagcttaacaccatagatcctgaaaaactccaagctctcgtcggcatgtcagataagcaatggaacacaacgctgaatcatgcaaaaacgtgtgacatgggacggaaatgttacactttcaagactgtagggtgtgacattacctttaaccccataggagaggtcttacgggcaagaattggagaccatacatttcctctgcaagaactgcacccatatcaactgttccatgtgaagcaactggccgctcaggcataccagatgtgggatcaactggaagaagtacccaatgaaaaattatttgctgcaaataagagctttgttccaagaagtagttctgatcaggagcggactgagagccaagcagagagcatgatcagctcagggtcgcagaatactaagtatcttgactacacaggaactgctacctctggtgccgcagcaatgccgaacagctgcagcacatcagattctataggagctgctccagctgatgatgccatgctctggagaccgagcataccaccagaatgtaacttcagctggcaggactcagcagcttgttgggattaagtggattaacctttcatcgatgttgcttgtttcctgtttccaataatggcatgtttgatccatagtacttattgtactattgggtgaaatgttatgcttttgaacatgcgactgcttgcacgcggtttttcaattcaataaaactatgtgaacacaaggtcgttgatatatgcccttgtagtttaggtttgtgataaataattatcaacagagtagcatcttcctacacgacagattgaacaccaaatcagtgctcaagagaagaaatatggatctaggctcctacacatgtgaaaattgcatacgacagaaagaggaaacatgggatcatctatttctgaaatgtagcttcgacaagagatgttgggtaatggtcgggatcacgtcaacccagtccttgaacccacacaatgcaatctgtggtatgcgaaggaagttcacacaaccctggtccatggagacagttatcacaatgatatggtgcatttgaaaatgcagaaatcagtggatcttgaaaaacactcctccgaccacctagcggtgtaaaatcatgttcgttcaagcgatgaaccttaacacctacaagatgcaggatatggtagcttaaaatgtcagacaatggatacacacattgtaatacgagattgtaatctataaacacatatatagaaaagtaataaaatgaatactatagagaccccgtatagtagaatgttttattcaaaaaacatagtagcatcttaggttgagtcgtgtcgactaattaggatgttagtgtgtatgtgcaatgtctt

SEQ ID NO: 37743 - DNA, 725 bp, Zea Mays
ctttaaaacaagaaagaacgttacatcacgcacacacgcgcaccaaagccaagcgcccaagcccagcactcgacaccaccacagcgcgcagccacgctcacgcacaccgagctgcgggagtggagtagtggaccgatggggagcagcgggggcagcagcgagcacttcctgcggcagctgagttcgagcgacggcggcagcgcgccgcaccatctgctgcagcgagagtgggagtgcggcggcgtcaccggcagcggcagcaggcgcgggtcgcggaagaagaccagggcgcggggacaccgccgccgcggcggcgggttctgcagggcggaggaggctgcgccggggcggaagcgggtaatggtggtggtggaccagagctccggcgccaagcacgccatgttgtgggcgctcacccacgtggccaacaagggcgacttcctcaccctgctccacgtcctgccgccggagagcggccacagcagccgcggtgctgcggaggacgcctccgcgctcgccaactccctcggcgcgctttgcaaggcctgcaagcctgaggtcgaggtggaggcgcttgtgatccaggggcccaagctgccgaccatcctcagccaggtgaagaagctggaggcgtccgtgctggtgctgagccaacgcagcccctcgcctttctgctgttgtttctctagctacggctagtggtatagatcgctgatgcgtcagtg

SEQ ID NO: 37744 - DNA, 2669 bp, Zea Mays
gagccgatatccccattctctgcgcatataaaaaccgacgcaacgaactacaccctagtaccctactgcttccatcaaggagaactgcaactggaagcgggtgcgagcgactgcgatccggacgaggggagggacctgtccgtaatttcggaaaggagcctgggggagaatgccgatagacatgccgcggggtctccccttcgccgtcgacacgtgggggtcctcctcccgaagccggcgccaccgcttccttacccacgcacaccgggaccacctcgtcggcgccggtgcggacatcgatgggggagggatcgtctacgccactcgcctcaccttgcacctcgcacttcgccactttccccagttggggagttgggagttcgtggagatggaggtgggaaggacgttggtggtggatgatcccgtcggcgccttctctgtcaccacgtacgacgcaaatcactgccctggggcagtcatgttcttgtttgagggtcaatttggtaccatacttcacacaggggactgtcggcttacaccagattgcgtacagaatttgccaatgaagtacataacaaagaaaggaaacgagaacatttgccgacttgactttgtattcctagattgcaccttctccaaatgcttcctcaagctaccgagcaaggactcagcaatccgacaggttatatcttgcatatggaaacatctgcatgcaccatttgtcttccttgcttgtgatctgcttgggcatgaagatatactagttgaggtgtcaaggactttcggaacaaaaatttacgttgaccggaaattggattgttttaaagcactctcactgacagcccctgaaatcatcactgacgattcatcttctcgctttcagatggttgggttccaccaattacatgatagagcaagcaaagagcttgcagaggcaagggcaaatctccaacctgaacccttatttattcgtccatcaacacaatggtatgcaacctgtgctcgaagcccgaaacccagcctaacagaagctgagcaggatgagcttggcatctggcatgtttgtttctccattcactcctctcgtgatgagttggagcaagcactacaacttctccaacctcactgggttatttcaacaactcccccatgctttgccattgagctgagctatgtaaagaaacattgtttcaagacccgcttaacagctgatgatccactctggaaaatattcagagatcctctgggaaagtcagtgtcctccccttgttcagtgcttgcgacacagacagatgaaaataactcaaattttgttgttgatgatgaccattcttcttcctctagcgatggatgcacatacttaaatgtaataagcactcttgaactgaaatttgtgccacctcaaccacctgaagaaccggacattacattgtttggaagagcaaggtttgcctctcaagcaattgactttatgaaagaagattacattgccttagaagaagccagggcatgtgcaccaacagattcggttcatggcagtagtgaagaagtcgaaacatattctggaatggatttcggtgtgaaacaaccaccagcctcccagcaggatctcatggaagttggagatgatgtttctttcaaaaaagttggagatgatgtggattcctgtaagcatgaagtaacctcaacacaattagaagggtttcgagtcaagtcattacctactgttcaaagcaatatgttagtggtgtctgatcaacttgaaaggtcagaagttgtaggagagtcaaaattattgaaatccacggaagacttaaaccttaccattgtcagaagtgcagaaagaactgattgtcaaaaggaacctttgtgctatattggatcatcgaaatgtttgaatgcaagtttgaagaggttttacaggtcaaggaatatccctgttcctagacctcttccatcgcttgtcaaacttatggagtccactaaacgggtcaaaatacaaccaaatactaattatactttgttgaactcacgacacagcttaccctaatgaatgattgagcttatacttggcatattatgatagccaaaattttcagatttatgagtatatgaatggattatttctgaagaggacacctgtatattggttattgtgataaccaaaatactcggattctattgggtatacaggtatacttggactggttccgaagaagatacctgtttagtattgatccagatccacacttatacaggagctttgtacgattctcaaactgttgtacagaaaattgatgtaattacatgatgactctattggataatccgaagtgtattattcttctgcaatactagctaggcatcgtatgatgtcaaatatattctcagcaagttcgctttacgacttgatttactgaatatcatgatattctggcgtggatctatattgcttctgattcataattgtttgctgcaggagagtacataatatcttctagttcactaatgcataattttatacacaaagcagtgtcgccatggcatgacccttcaatccgaaaatacagattcatcacgcgacaagtcccgatgctactaggaattaaatcgtccagggcttaacagggcataaacttaaaaaaaatcgaaaaggagctaaaataaaa

SEQ ID NO: 37745 - DNA, 2043 bp, Zea Mays
aattcccatcagggtccgtcacgaaccggtgggcggagtcttccagaggccaatattctgacacagcggaccccgtgggccgtggccgtctcgtttcccgtctcccgcatagaggttcccaaaccattctctttcgctttcgtctccgcaccctagggtttctgtgcctcgccagcgaagcgatgcagccgccgcaccaaccgccgatgaacgggcaacactcccagcctccgccgcaaggacccgtggtgcccatgcctccgcagcagcaggcgcccccgctgccgtactaccagcagcagcaggcgccgcagtactaccaacaggccctcccgcagccgtgggggcagcagcagcagtacgctgcaccgccgccgcagtacccgcctccgcctcagacgcagcattacgcgacaccaccgcagcagtacgcccctctgccgcagcagcagtacgctcctccaccgcagcagcagtacgctccttcgccatatggtaccacgccgggaagcggtgaagtcaggacgctgtggatcggagatcttcagcactggatggacgagaactacctccactacaacgcctttgcggccgtggcccagcagattgcttctgtgaaaattatacggaacaagcaaactgggcactcagaaggctatggttttattgagttttactctcgagctgctgcagaacatactctgatgaacttcaatgggcagatgatgccgaatgttgagatgacttttaagctgaactgggcttctgctagcactggtgataagcgtggagatagtggttctgatcgcacaatatttgttggtgatttggctcatgatgttactgactccatgttggaagatgtgttcagagctaagtacccttcagttagaggagctaatgttgttgttgataggatgactggatggcccaaaggatttggtttcgtgcgttttggagatctgaatgagcaggcacgtgctatgactgagatgaatggaatgttgttatctacaaggcaaatgaggattggtgctgcagctaacaagaagaatagggatgctcagcagacatatgcaactgacggatgtcatgccatctgcatttaaggcctggaattgtcttcagatgtctatgtaaccagtgcctcggttaggagcataccagagctctaaaggaaattcttcagagaatgatcctaacaatacaacagtctttgtaggtgggttagattccaatgtaaatgaggagtatctaaggcaaatttttactccgtatggagaaatttcctatgtgaagattcctgtaggcaaacattgtggatttgttcaatttaccagcaggtcatgtgcagaggaagccatccgaatgctgaatgggagtcaggttggtgggcagaaagttcggctttcatggggccgtagtcctcaaaacagacaggcttctcagcatgatgccaacaaccagtataatgggaacagctattatggataccaacagccgggttatgaaggttatggctatggtgcttccagtgcacaagacccaagcatgcaaaactactacggatactctggttgtggtaactatgagcagcagcagccaacacaggaacagcagctgcagcagcctccaccaccacagcactgacgattgcttgcacacctctggagtgctatcggattagagtgatggtggagtcacggggcgctgcaatgagacatcctatatagatatgaaggtcatatagtcgcataggagtggttagactttcttggggaccagtgttaatcgatgatggcactccggatgtttcttctgtttgtcgttgagatcttgactgttgaagtgtgctctgttgatattaatgtcttcgtcagattgttaatttgcttgtttcagatgtcccagaaccatttgtacttagggagtgtttgaatgcactagacctaacagatagttggctaaaaaatttgctagtgaaattagctaaataataaatagctagctaactattagctaatttgctaaaaatagttatta

SEQ ID NO: 37746 - DNA, 4194 bp, Zea Mays
aatccaagtcagatttattccacaccttcattccatgcgaaacgaatagaccctcaattctctttaatccactatgatcctcttgcaaccgaacctgaccttatatgctgtacccttttgagtaaaaatacctttttttcagggaatctgtgtttcagaaatctaaacacacccctaatccgattccgatgctgtgctgccgcgccaccgcatccctgccgtctccgcctcccccctcgcatgctgccgacccccacgcgcgcctcaggggcggcggccggcccgctacgaccttccgggcgcgctcgccgccttcgtctccatgtcgtcaccctcctccgccgcccacgcggccgcgggccccgtcctacgcaccttcacagcgctcctcaagctctgcgcggcgcgcgccgatctcgccacgggccgcgccgtccacgcgcagctcgaggcgcgggggctcgcctccgagtccatcgcttccacggcgctcgccaacatgtacttcaagtgccgccgccccgccgacgcgcgcagggtgttcgaccggatgccttccagggaccgcgtcgcctggaacgcggtcgtcgctgggtacgcgcgaaacgggcttccatcgtccgcgatggaggcggtcgtgcggatgcagggggaggagggcggggagcggcccgactccgtcacgcttgtgtccgtgctgccggcctgcgccgacgcccgggcgctccacgcgtgcagggaggtacacgccttcgcgctccgcgccgggctcgatgagctcgtcaatgtctccacggcggtacttgacgcctactgcaagtgcggcgcggtggaggcggcaagggctgtcttcgattgtatgcctgtcaggaactccgtgtcttggaacgccatgattgacgggtatgctgacaatggtaacgccacggaggctatggctttgttctggaggatggtccaggagggcgtggatgtgacggatgcgtctgtgttggcagcactacaagcgtgcggggagcttggatatctcgatgaggtgaggcgtgtccatgagctacttgtgagagttggcttgagctccaatgtgtcggtgacgaacgcgcttatcaccacatacgccaagtgcaagagggcagacctcgctgcccaggtgttcaacgagctgggcaacaaaaagacacggatctcatggaatgccatgatcctcggcttcacgcagaacgaatgccccgaggatgcagagaggctcttcgctaggatgcagttggaaaatgtgagaccagattcgttcaccctggtcagcgtgattcctgcagtcgcggacatttctgatccgctgcaagcaagatggatccatggatattctatcaggcaccaactagaccaggatgtctatgtcctgacagcccttattgacatgtactccaaatgtgggcgtgtcagcatagctagaaggctcttcgattccgcaagggacagacatgttatcacctggaatgcgatgatccatggttatggttcacatggttttggccaggctgcagttgagctatttgaagagatgaagggcactggcagtttgcccaacgagacaacattcctctcggttcttgcagcttgcagtcatgctggtttggttgatgaagggcagaaatattttgctagcatgaagaaggactatgggcttgaacctggaatggagcactacggtaccatggtggatctacttggacgagctgggaagctagacgaagcttggtctttcatcaaaaacatgcctatagaacctggcattagtgtttatggtgcaatgttaggtgcttgcaagttgcacaagaatgttgaattggctgaagaatcagcacagataatctttgagctgggcccagaggagggggtgtatcatgtccttttggcaaacatttatgcaaacgcttcaatgtggaaagacgtcgcgagggtgaggactgctatggagaagaaaggactccagaagactcctggatggagtattatccagctcaaaaatgaggtccataccttctactctggaagcacaaatcaccagcacgcgaaggacatatacgcaagactggctaagctcatcgaagagatcaaagatatgggctatgtgccagacactgattcaatacatgatgtggaggatgatgtcaaggcacagctgcttaacacccacagtgagaagcttgctattgcatatgggctcattcgaacagcccctggcacgacaattcagataaagaagaaccttcgagtttgtaacgactgtcataatgcaaccaagttaatatctctactgacaggacgggaaataatcatgagagacattcaacgctttcaccattttaaggatggtaaatgttcatgtggagactactggtagtgaaatgttgaaggcagtctgaatatccatttccgagatgatatacagctgctatacaagtatacaattagactaacagtgaagctaaatgtacacgatgagatgagcactggaaactgaaggaaataagctaaacgccttgtctgattcagctgacttgtacttgccaattgctgccaaggttcagcaagcttgacgatgactgccttggttcctctccagcgaaaccagacactccccgtaatacaatcacaggtacaggtacgctagaagacgttgtctgttacttgaatcagtataagagaattcgcttaattgtggcgcaatcttaagttgcatgattgagatatactgcaaatattgggaggcatataaaatgagaagagacctgtggtctattagaaaaggagctttctgtatgctgcgttgtcaacaaatatgtcaggtgttgatcctttaagacccacagacaacttttggatctgccagtaagcaaaaaaaaaaaagatcagaaagagtgtacggccggtgagcaagcatgggctgcatggcatcggtgttggctatcggaatgacaggtgaaggactgaaaccctgacgtgcaggccgggccattggttagcctgaccaatcctggtaggtgtctgccatttatgatggctgggctggctctcggagcaactctctccaatgagggctttccgtcattgatgccggtgcagaccgtttttcttcgccttgctctcaggcagcagctagctctttgatccctgttggattggatggaggtccgtggcagtgcacccagcatgaagccaaaggtggagccgccgttggaggcttcacacgactgggaggtgaccccgctgtccggcgacaaccccttcttcaccagcgtcatgcgcaagagccaagtccagaacccctttcagctggtcatcccggttcgcttccaccgccacctcccggaggcgcgcgcgcccgcggtgctcctctgccgcgaccggtcgtggacggtgagctacgcgggcgtcggcaagtggaagaggctccagggggcgtggagggacttcgcccgcgacaacgggctccgcctcggggacgcctgcgtcttcgagctccttgtgcccagtactgatgcaacccaaggagacggagacggcagcaaggatcagggggaggtggtgttccgtgtgcaggtgctccgcggcggcctgccggctgagatcacctcccggggcgccacctccgacgatccactcgtcattgtggactagatccaactgcggggagagtagtacgtagtagactagtagtggtgcagtgcagtctgtagaggagacgagacgctcaggagctaggtagcatcgtcgttgtattttgttgttgcccctgctctagctagctcgctggtcctcgtggatcttgtagccagtttctttctttcagctgcagaccttcctcttcctgtggacacggttgctccatcaccaagtgtgctgatgctaccagctttctgctgtgacagtacatagtagacgctatcaccaagtgtgctgatgctaccacattccagtagacgcggcatgcttgaagagatgtgttcaatgagcatcatcctttgtgtccatccatcgtgtcaataactagagctgaatagctcgaccgagtttagtgtttaggctatctcgagcagcgttatctaaatgaatattctgtgtcctttaaaggaatattctgtgtcatttacagtgcactataaaagattatatcatctatatcatctcgtt

SEQ ID NO: 37747 - DNA, 4361 bp, Zea Mays
aaaatggaaaaaaaaaactcgcccctctcgcggtatcgccttcgccactccgcctctcggctcggctctcgcgtgaaattccactttccccatccgcgtccgctgcccccgggccctccgcgctagctaccgctccctccgccgccgcccccgccctattccccaccgctgccggcgcgcgcgtgctcgactgattccgcgcccccaccccgcagcggatttcacctcccgtcgcggatctggtccgtggcagcgggggaacaaggcgaagaacccgaccgcggttacgacggcgtagggggccatcaacgacgacctagctggggacgacgtccgtcggcgcagctcagccacgcccgaccccttaagcgcgacggcaacagcaagggcggcactggcggctatgcacaaggtattcggttcggctccaagatcacaagactggagtaacaaagttgtgcttcgcgctgcgctgcgctgcttctagcgaatggaagcggctgctcttgctcgtagaactagagcatggaggaactacggtgtctatctacagtcgctgaatctgatgacgctccagcagaacaggagtgcgaccacttctccctgaggggttatgttgctatgcttcagaagaaggatccaaaactttgctctcatattttccataaccagccacaatatgatgagcaccatgattcgtccccagttttggtgtcaaagtatcatcgatgggattgctcaagatgtcttgatagtgtggaagtttcaggccataggccaacatcggaaaatgtttctatgcagcagaatggaatgaatgatggctgctctatttcaattgttcggattttgcctaatagtgttgattccagaagactgttttcttgcacacagcaatcatctcaagggaatgatcgattgaccctttcaaagactgcccaagaatgcaattcaaaatgcagttctcctggcaacaaagcaattactgcgatgaatgttccagtagctgaagaaaatgttccagaggcactcgttgatacgagggttccatctatagaagttttacaggcctctcccaatagtattgatttgtcagcaaacatcttgaatgctgtctcgaagaatgtccgcgatttacctgatgatgttgaagaaaatggcacacagaatccacacagtctaaaaccttgtgtggcgccaaatgaagatgagaataacatagctaatgatgacctcaatgagcctaatgtttgtaaaccagtatctgggcacaaaagcaaacaagtctgcaacatgggtccacgccgagcatcgtcaaaaagaaatgttgaatctgatgatgccgttcaagtggaccatactaacagtgttgatctctgtgagggtggtaaaagaaaaatgcaccttgaggttggaaaaggtaatgacactactaatcagcaagtggacgaaatccagtcaagagctgtcaagaacaaggcaaaatacacaggagtagacaagttagaagatggatcctctctaatgaactggctgaaaagcactaataagaaagttagaacaaagaaaaaagactcagaacacaagaatcttgattcctcttctatttcaaggtcttacccagatatagttgcttctaatgatatgcatcatgattttctaccctcagttggggatgtgggccaggcaaatgtaccatctactaccagtgccaagcatgggaatggaaatgcacagaatgacaaactggagcaaaatatgcagaagatggatggcctgtgtgaaaatgaatctagaaacttgaaacagaggttcttctcaaatgaaaaatcaacgattttgctaaagagaaagctactgtccacttcggttgtccatgatgagaacattgagaacagtaatataaagagagatatgctcaggtcagatgatttgcctcaaatggaacctgaaggctctgtacagagatgtttggcaaaggtttctcttggtaaacaaaagatccagaatgtgtctggcctccacaagaagaatataccaaagaataagaaaggaaagcagaaggtgcacaagaaacagaatgtgatagacgacttccccatggacattgttgaacttctcgccagaaatcagcatgagagacagttgatgactgacaccaattctttggaaaactgtcatactcaacccaaggtagctcaagttgattgtgctgcatttgcagccaagggttgtcccaccaatgcatcaaatgagttcaacactaatttccaaaaatctttggcatcggaaagtaagcagaagtccttacaggatcaagcatcacccagtacagaggctgccaatgtgaatccgcaggatttacatactcagaagtcatcacagtgtcatgcagcatccagcaccagcaccgaggttccaaatggtcagcctccagaatcacaaatgcaaaattcgcttcaggttcatgtgttacccatcaaacggtctttcattgtgtacccttcaaaattacctgtccttgatgacattttggagtgtacccaagaacaacagacacaattccacagggatggaggggtcaccattgcatgtacctcacctatgttttcacatcatcaacatattgctgaagtgcctgctcggagctggaggaataacggggaaaagaagttaatgtgggattctttcaagacagcttcaagaaattcaccaacatcgtcatatggttttcaattcggaaacaggcttcaagaagttcattcatctcccagtcatgcttatggagcttctagtaactatgcagctcaccagccagtaattgtggctgtagatcagccgagaagtgttccaagcacaacatcgactatggaggctggtaggttgtatgatcgaaggattcctggacagtcaggcctctacccaaaagagcctatgcctgcaacacatcttctgagattgatggactcatcaacagctccagacttcacaaactatcaaagagctaacaggcgccagatggaacatcaaacacaaactctggattcacaatatacacagcatgatcagtataatgggtcactgagcacatcatatggaagacacataactggaaaggttccaccgacactgcaagacttatctcggcgtcaggtccagcaaaacctgcacaggcctttacgccctcatcctcgggtgggcgtgcttggttcgttgctgcagcaggatatcgcaaactggtatgaaaactgcgggccgccacagtctggatacaggctgggcgtttctaaagggacggcatcgcttgatatgaacagacatggaaactacgagaccttgaactcaggagtgttcacagcaggatggaatgcccttcaattgggttctgttagctctcttgccgatccagagtaccggttgccaaggtatggtacaggtcagccttgtacaggtggcaatgggagaacggttcacccgttggataagcttgtgcgaaaggatatctgtgtgactaacagaaacccagctgattttactgtaattagtgacatgaatgagtatatgagaagcctttgagtgtgaggcagggaggagcgttgtagttgaatacgtttagatcgataaatttcaccttatcagtgccaagcaatcatcattgatatagaggaaggctttgtcgaatcttctgcaaggctctttgtaagacattgatggatgttctgtttcctggaggcagagcaacagctaccatagagccagataagcaaatgtacaagggaagcatgtgagttttttttttgggtactcctgtcccagaataaactgcattctgcagttcaaaatttgccccaaaggaatggcccatataggtttgagatctaatgcactctagtctagcaggtgtaccagcttactgtaccaacaaaaacaattctgacttgtcagaaaaaaaatccctccgtccggagtatgtaccaaagggggtaagctatgtcatgtggttgagcaatgttggtcaactcgttctggctccgagtgttgtatagcatcagactgccctgatgaacagcctattaaaagactgcactgatgattcttctttgttgtatcgtgatctaagtctgaaaacgcagctggatttcagaagtcatggagtccgaactgtcaggagccgctcacgcggtccagtaggacatcatggatgtagtgttaatgtgatcccacaacacaagctccagatccaggttcagtcagtctgtctctaacaggagactatacacttctctattctaagtatagagaaaatttcattttatcgactccaatgatgttcattaaagtcttctatatggatgatattt

SEQ ID NO: 37748 - DNA, 1231 bp, Zea Mays
tgaagtttaaaatataagttataataaaaaatatatatatgatacgttggagatggcccctacaagtcgtaaaggccctggcccccaccgttgcttccagtaggtcatgatgcagcgcacctgtcctcccgcgctgctccaccccttcccactcctcccatttgcaagtcccagtaccaggttttcaaaaccgccttcacgcagtccacagataaaataccggcctcctcctccctttccccctccgattcccgcgcccgcccctacgctgccaaaagcgggggacaccgcccgtccccctccccgtccgggtctccacaagcgcacctgcgcgcgcgcgcccggcttccgttgcgcagcagggcagctgggcagggcagggcaggtcgccatttagtcctctgcgctttttggcgttggttcttcttgcacaactcttctgctggattccagctctgtttttctttctcctgtcctgctgtcactcggtcgggacgagatcaataaaaaggaagaaagaagcagcgcggcaagccggcggcgtcgcgaagcttaagatcagagacaccgttggttgggcgttgcttcagatataatctacaagaccaagctcagattccatcagtcggtacgtacgtcggaacagcctcacttcgctcgctgctgcgcgttagatgccggttgcttcgtcgctaatggcgatggagttggagacggaccaactcgcctgggcggagcagcagcggcagcagaataggaggcagaccatggtcgtctgcagaaagagcgacgcagcggtggccaaagggcagcagcgtcagaacgcttcgccgccgtcgcccaagcctccgcccgcgggcgggctcagcgcggaggcgttcttggttctggcgtgcgtcgccgtgtcgctcatcgtgctgccgctggtcctgccgccgctgtcgcccccgccgcctctgctgctgctggtgccggtgtgcctgctcctgctcctcgccgcgctcgccaccttcgtgccgtcggatgtcaggagcatgccatcctccaacttgtaactactagttgttttgctagtcaatatccataaattctttttgttcaagtcggcatttatgtctgtgcatatggcataaaatgagtgtaatgaaatggaaatcttgtcttatctttctttttttggcaaacagacgttcaccgttagatcgaacaaactactacgtacttgtgcttt

SEQ ID NO: 37749 - DNA, 1574 bp, Zea Mays
cagaatcctgtttgagtggtctcccgggtgtggggcagacgagatctcggtttaaatccgagtcagcactgcgatcggattggacccagcgaagcgaagcaacgctctcccaactgatacacccgcggacccgccccgcccaccttctggcttctgctcgtctcgtgagccttagcgcttaagcttgccgtcttccgccccttataagaagcccgccgcccgcccgccgccgtcactctcggcctcggcagcaaactaacaaggcacatcgtacgctcgaggagaggagctgcgttcgtggtgtgcatggcggaatcggcgatctaccggctgccggaggagtgcgtggcatacgccatctcgctgacgacgcccggcgacgcgtgccactcgtccgcggtgtcgccggccttcagggccgccgcggactccgacgccgtctgggcgcggttcctgccgccggaccacgccgacatcctggcgcgcgccgacgacccgggcgccgtcaccgccggctgcgcgtccaagaaggagctcttctcgcgcctctgcgacagccccgtcctcctcgacggcgccaccatgagctttgggctggagaggcggagcggcgccaagtgcttcatgttgtcggcgagggcgctcagcaggaaaaacgacccttcgcgctggacgtgggccgctagcccgccaggatccaggttcccggaggtggtgaagctgcaggacgtgtgctggctggagatcagcgggaagctcagtctgtcgctgctgtctccggggacgacctacgcggcgcacctcgtcttcgccatagccgacgactcgtacggcctcgagtgccacgtcgggatgccggcgcttaaggccacggtcaccgtcaccgtctccggcaagacaacgatggcggagcacgacatctgcctgcaccacatgcagggcgaggcggaggccgcggcgcaccggcggacgcagcagtacgtgcgcctccgcaggggctacggcggcggagggaaggcgacggtgctgacgacgacgagggaggccgaccccgacatcaggtgcccccggcggaggggcgacgggtgggccgaggtcgaggtgggcgagttcgccgtggcgggcgacgagggcgacgccgcggacgtggaggtgacggtgcaggaggatagcctgcgctggaagaggggcctcgtggtgctgggcgtcgacatccggcccaagcagcacacgccaacgccatgctagctagctagcgcaatggccggtgcccgctgcccggtggattttattttttatacaaaaatctagggagaaattaacaagctaagtgctgatcaaattagatccagtcaggaacaggtaggcgatgtgcccactgctcaataaggccaagctttaaaacctgtatcttttatggacagactagtgcacttttaaaacggccgtccatttcttagcgctttagcttctctgaatatgcgcatggtgtattatttattattgtgtcagttgcttgcatgcaggctacgtacgtagcccataaaaccgtgatgaaattataggtgtgtttt

SEQ ID NO: 37750 - DNA, 991 bp, Zea Mays
tcaggacctcagaacaatgtagaaacatagcagtagaatctcaattggtgtatgcaactgacaaatggacaagctgccaaagtgagccagccatttgacatagcatctagcgccacaactgcagttacatctgagataaggcagtaaaacaacaagattttggagtgtaatcaatcatgcacatatccatcgaattgaacaccggcctcgtcccctgcctacctcagcaatacaacacctctcattcccctccacacaatatagtggagggaaaaacatttttttcatacgagttgaaacacgagctagccggtggactggtccccaagcacaaaaccagatgaaacaccgtgagaaagaccaaattgaggaagcccgtaaacattcccgcgaggaagcccctcgcccccaactctagaatcacagcaacgcacgcattcctctcgcgcaaagccaaaggtgacttgccagcactcgagcagccaaggttcccgccacagcccaaaataccaccccaaaaaaatgcagcagacgcaagcgcgcaagcagctcgccgcgacacaggtcaaccggggaagtgacgcaacagggagaaagagagaagggaaaggcgcgaccttgcggcctccgagcaagccggccggcagcccaaaaccctaggcgggcgagcaagtccaccagcaggcctcgtcctcctccgccggagctaggcccgcgacaaagccccccactttctcgggagccggagcctccaaccgcgtcgggcgtcggccttatccacacctttgggaaacacttcttcactcgggaagcttttccttcgctcccacctctcttccacctctcccccgcggacgtttttccctttttcttttggcgaatggcgactcggtggagaagacgatggcgacggacggttgaatgggtgcgtgcggccgtaccgatcgggtggtggtttctaaaaccctcggcctcggaccgccctgctgcc

SEQ ID NO: 37751 - DNA, 192 bp, Zea Mays
cggaagacgagccaagtcgaccccaagcgcgggctaatctgcaggataatgctgatggatgaacctgcctgatctagtgctaggacaaggatggttatcaagtggacgtcgtctaacctagtattattcaggcaagccccggtgcattcgccacctccttatgttttaaaatcattatcaccttgtttgatg

SEQ ID NO: 37752 - DNA, 2076 bp, Zea Mays
gttcaaggggaggcgggggagccacggcggcggagggaattgtttaatcccccgtcaccgtctcctatcgccatcaccccacccgtcccccttggtccaggcgcaggcgcgagcgcgacgtccggcgtccggcttcggcggcggagtggagcgatcccgatccccacaaggaattccatcgctgtcgtggcgtttggtggcgctcctcccggccggcaagcaggatcagtcgacgccctcttggcttgcctttggctgtaggaaatcgcacggaggtgaggatacacgggtgcggaacgagagctaggcgaacctgtctggtacctcgcggcggagatggacgagaaggcgacgatggagagcaagctgtcctcggcggcggccttcgtggaggggggcgtgcaggacgcctgcgacgacgcctgcagcatctgcctcgacgccttctgcgacagcaacccctccacgatgaccaagtgcaagcatgactaccatcttcagtgcattcttgaatggtgtatattataattcatgtaataatttaggtgccagagaagctcccagtgccccatgtgttggcagcatatcagcatgaaagatcctatgagccaagagctactagaggctgttgaacaagagaggaacatccgagctaatccttcacgtaatactgctgttttccaccatcaaatgctgggtgattttgagatccctgtaggtgcagatgatgcagaacttgaagaacgcattattcagcacttggctgccgcagctgcagtgcgtaggtcacaccgtcatcataatagaagagatgggcaccagagcagatcagaagcaagtagccacccacagtttctggtgctctcagcagacgagcgcacaatctcaggtcaagaaggggactacgaacaagcatctgctgtagcttctggccgccctttacgtacacttgttgaacaagaacgcactcgagggttagcggatgcttccagtccatctctccgttgttctactcctgctgatagtactggtagatcaaacaataggatttctgggatcgaatctacacctgtggatcaagacggaactggaccatccgctttacaatcaatggtacagggatttcataatcaaagtgcaagtggatggagggagaggtggttttctcggagcaactctttactggatcttggttctgaggtgaggagggaggtcaacgcggggattgctgcggtgtctcgcatgatggaatggcacgatgcaagggacgggacgggagcggggccttctcctacctctgcatcaagatctggttctcagtgaaacactctgcacttgaaaggaccgatgcaaatgtaaagattaaggcaagctgctggaagcgacgtgccaagtggctgggctcttcggtcagcggtcgcgattcgcaagctgccagtagacggagaaggggctgtgataccgaaagacgaacgaactgaactggtgggctggggctgccctggagaggcagagggagccgtccacattattacttggtttctttcttttttttgtttattattgagaataatgatgaatcaggtcaggtgggtgggggatgtggctgtaaactcggtgggctgtcggtgtgtccagggggaaaaaaagagagaaaaggcagcgaaagaaattgtccatacatgaagaagcccagggtcgtcgtctgtgtataggaagggattaaaaaagatgttttgttttcttctgtctttctttgctttgcttgtgttcccgttttgacaatgagaaatatcgggtaaacacacaaccttccctattatacatttcccttcattttattatacatatatactctctctctctctctctctctttctttgtcaagaatgcaacagtccgggcagtggggattgaggaatcttcaggaggatctagtttttttttatatcataaatacaatcaggtgaattcctactttagatttattggaggagaatgataaactctacatataaaccagagatgctccaactcagaagctgctggtgctagtatagtattgatgaagcagga

SEQ ID NO: 37753 - DNA, 177 bp, Zea Mays
cttaggttgatcatggtatgcgggttgatgaattataaagtaactgagacataataggccagatgacacttgccttcactaaaaagatgctcgggatcttcaacctcgtagaaatcgaagaacttgatcacttggtcaccaaggcttgatcgttgattgctcgaagctcgggaacag

SEQ ID NO: 37754 - DNA, 2572 bp, Zea Mays
aatgccaaacatgggaacagtctctcggtgatgatgcagttttggaatatatatgcagctttcaccgtatgcacgaaatcagctgacaaaccaagtttgggagatgaattggatacttctggtccatcaaaggaacatcagaatgatctcattacagagaagcaaaagatcccagatcttaagagaaggaagcatggaagactcagtaatagtttacagaagaaggctgagaggctaaagtaccttgagagtagaaaggctgtcaaggttggaaaacagcgagatattaaaaaagtgctccctttgcacagcattctgaagaagtacacaaaacatacgtctgttaaaatggttaaggaaaaacatgggaattcaaaaggcactggagtcatacaactctgtcgcaaatcagtcaagcgtgtcaaattctcagaaacagatgatgccaaaaagcaatgttccaaaagaccaccactggaaagcatccgcgagcttctctctgctattagttcttcttcgtcgtcatctatagagatgtcaagtgaagaggaacatgttattgcggaaagtagtagttctcacatgacagagaaagctgtcactatggctagcgaagcaaatgagaacacaaatcatgacaatcaatatgagctcagcagtaccagattgtccaccggtttgcttgatctgaatcaagctcttccagaacctacggacttaaacaatccatatgttccaaattcagaggtttcaaatcttgagcaggcacaggtaggaacttggaatctggatcaacaagttcttggtaatggaagaaaaaacatagactcatcttttgatctgcatggacaggaacaactgagacattctactgagttggacaccacatcaaaaggcaagtccccttgtactctgtcaaacggattccaggattcagtgcatctccaacagaattggagctctatgactttgcatcatggtgtctctcaactctcaactggaggtgaaccatcttcctttgaagttcgagaaagtaatatatcacacagtgagaaacgaaattttagttctgaaacgaacgtggaacaagagttgaggccttctgctggacaaaccttgcgcttgatgggtcatgatcttacagtatccgatactagagttgactatttatctgacgcggcacagaatcacacaaataatactgcagaccatcttaccacaaaggtggtgttggaattgccacgacaaggtcagcctttcctagcattacaaactcagagtattcccagtgtttcagcaagttctgcaaggacagctcaggcacattttggatacagaacaacacataacatcagccacccgttgctcgctgccaatgtgttctctggtgatccatcagtatatgaagacaggtgcagggacttcacaaacttgcaatcacatcgaaattctatattgggatatcctcctctttccaatcatggcagtgctgcatttcttcagaattcaccaccttggcgttattactctgatcattccaccaggagagattcactctcagcgccatttacaccaacagtgatgcagcatgtggcaacaccttcagattaccgtgccaatctgcctcatcagtcatatggtgtgtactctggaagctcaacagttcgacctcttaactctgcaagttttacatgcacaaaccagatagtacaagcagttgacagtagggctactgcaaaccttccgtccagaagtccaacaactggaacgacaagaactcatcacaactccaatacttcatctagcagccgtttggttctgagatcaggccctgtaaagctcagtgccggggcgaagcatatcctgataccaaatgagaatacggaggacgacaattctgcaccaatgtactcttgtgtgtcctttggcagcagtggtgggaatgtttcggcagcttatcagaataaaggagcaggttcccataggcatcagaataaaggagcaggttcccgtaggttctgatccaaaagctggattatcttgctcgttcgttttctggacagctgctgggcaagaggctgcatgttttgaaggaactgaagctgatgacctaggcaatgctgagatgaagatgcaatgcgcagttcggaggatacctgagaccgtgttaattaaaggagggtacttggttttgttttgtggcctgcaagactttgacagatccttttacttctgcagttttattcccccccccccccccctttccaaaataaagaagattttcgttgtttgaaaacgataagtacgctcaggttgtgcagcatgtgaactttgtagggcatacctggagtgtctatgtagctaccggtgatgaagtagaatgttaatgcgactcaaaagctggttgattgtacaacctgtgtcatcaggagttccctatttcatttgagccagctagatcatttttatttagcggtcatctaatataatatatcctcaatatatagatattatgttagctcaatattgtttttacaagtattattgagagagttgatgcagcactgccgga

SEQ ID NO: 37755 - DNA, 2052 bp, Zea Mays
  misc_feature (1)..(2): n is a, c, g, or t
nntcttcaagcaagtctcagccatgcaacatcttacagtgatagccttcgtggctgcttctctcattgcaagcattccacatgccaaaagtgctgatctgaactctgacaaacaggctcttctcgcatttgctgcatcactgcctcgtggcaggaagctcaactggagctccaccacacctgtctgcacttcttgggtgggggtgacatgcacgccagataagagccgtgtacatacactgcgcctacctgctgtaggactttttggtccaataccatcagacacccttgggaagcttgatgccctggaggtattgagccttaggtcaaatcgccttactgtcgacctccctcctgagaataactcactttctggacctattcctgacctccaacttcccaaattgagacatttgaatttgagcaacaataacctcagtgggccaataccaccttctttgcagaggtttccattaagttccttcttagggaatgcttttctgtgtggctttcctttggaaccatgttttggaactgcacctattccttctccagtatcaccaccatcacccaataagatcaagaagagcttctggaaaaagatcagaactggtgtgataattgcaattgctgctattggaggggtattgttgcttattttgattctcatgctcgtgatatgtattttcaagagaaagggacacactgaacctaccacagcttcgtccaaaggaaaagctattgcaggtggaagggcagaaaatcctaaggaagactacagcagtggtgttcaggaagcagagaggaataaattggttttcttcgggggtagttcatataattttgacttggaggatttgttgagagcttctgctgaagtccttggaaaaggaagttatggaaccacctacaaagctgttcttgaggatggaaccacagttgttgtcaaaagattgaaggaagtggtggttagcaagaaggactttgaacagcagatggagataattggcagggttggccagcatcaaaatgtcattccattgcgggcttattattactccaaggatgagaaattgttggtgtttgattatgtcccatctggtagccttgctgttgttttgcatgggaataaagctgatggaagggctccattgaactgggagacaagggtcaagatatctctggacgtagcccgtggaatcgcacatcttcatgctgagggaggagggaagttcatccatggcaacatcaaagcgtcgaacgtccttctatcgcagaacctcgacggtcgcgtctccgagttcggcttggcacagatcatgaccactccacagacgtccctgccacagcttgtcggataccgagcaccagaagtcctcgagacgaaaaaaacgatccagaagtccgacgtctacagctttggtgtcttgctccttgaaatgctaaccggaaaagcccctctcaggtctcccggtcgcaaggattccgtagagcacctcccaaaatgggtgcggtctgtggttcgcgaggagtggaccgcggagatcttcgacgtggacctgctgaggcaccccaacgtcgaggacgagatggtacagatgctccagatcgcgatggcgtgtgtggccgccgaccccgagcagcggcctaggatggacgaggtgatcaggaggatcacggagatccggaattcttactcttcttcttctgggacaaggacgcccctggaggacaggccagagaccgcgcaagcaccgtgatagtagtttagcaagagatgttagctaggttgcatagtgaattggttatagagcttcggcaaagttgatagccacctgcatagcgcagtttccgtcggttccatatcgtttccagtaaatctgttgtgcattttcttttttccgtcggttccagtaaatctgattgacagtccatgccattgtattgctaagttaaatcagtatctcttctgattttcataggatagtgtcgttctgtaatttgacataatctcctgaggccgtgattaatgatttgaatttcccttctattt

SEQ ID NO: 37756 - DNA, 1432 bp, Zea Mays
taggacttggggcttaagcagtgaggcgttggtggctactcatacttgcttgagccactgtggtgggcaggaatggtaacaatgattgttggcgaaatcgctaactttgcagcttatgcatttgctcctgctatcttagtcactccacttggtgcacttagcataattatcagtgctgttcttgcccatataatgttgcgggagaaacttcatacatttggtatacttggctgtattctttgtgtggtcggttcgacaacaattgtgcttcatgcccctccagagcgtcaaattgagtctgtggcagaagtgtgggatcttgcgaccgaaccagcattcctgtgctatgcagctgttgtgcttgcagcagcttttgtgctcatattccattttgtccctgagtatggtcagacacatatcatggtatatgttggcatatgttctcttgtgggatctttatcggtcatgagtgtcaaagctcttgggatagccttgaagctgacattttctgggatgaaccagctagtctatccacaaacatgggtgttctcatccgttgtaaccttatgcattgtaacacagatgaactatctgaacaaggccctcgacacattcaacactgcagttgtttcacccatatattacacaatgtttacatccttgaccatcttggctagtgtaataatgttcaaggattgggatcgtcaaaatccaacacaaattgtaacggagatgtgcggcttcgtcacaatcctttctggaacttttcttcttcacaagacaaaggatatggtggatggtatgtctacatttacgccccttttgacctgtaactactcacgttcataatgtcttattggttcgcgtcgtgacaggtctcccaccaaatttaccgattcggcttcctaaacatgcggatgaggacggctacgctgctgaaggaattcctctcagatccgctgctgacggtattccgctcaggtcaccaagggctacagattcatttcgctcgtcatgatgccccgctgagatttgcatgcgcactcaaatcgtgtcacttgaaggctcatacccagcaggcgtcagtcctatatatacatgggaagggaatgataatcctccattcactcggttcgatacacaacgtaggttttagctgtaggattcaaaaggtaacagctcggctgcccccttgtaaattctgaggcattggtacagaattttgaggattatatcagttatactcgtccgggtaagatcaccaggatgaccaagagcccaagtttttgggttgtatacttgtatgtatattgcggtgagccatataggtcactatcttgaattgctgtattttttcaacacaactctcagagtacaggatgttgaacaagcacatcatgccactaaaccatttaccagttttgtctgagca

SEQ ID NO: 37757 - DNA, 1912 bp, Zea Mays
cacgagtccccactcccacgtgcacctcgccgccatttagcgtgcccccggtcgtctgctccgcgccctaggtttctctcttcgtttcctcctcatcgaatcggagcttcgcatagtgtccctcgtcgccgccggcgccggcgccggcagccatgtccatgctccttatacagaaacaacccctccctctctccgttcgtccccgcacgactctccgccagtgccgtctccccacgactcgattctccgccgccgccgccgactcggctagccgcgctgcccccttcgccgtcgaggactacctcgtcgccgcatgccacctaaccccggcgcaggcgctcaaggcctccaaggtgctctcgcacctcaagtcaccctcccgacccgacgccgtgctagccttcctctcgggcctcggtctctccgacgccgacatcgccgccgccgtcgcctacgaccccaagcttctctgctccgaggtcgagcgcacgctggccccgcgtctcgcggagctccgggatctcggcctctctccgtctcagatcgcccgcctcgcactcgtcgaccccgcgcgcttccgccgccccaccgtcgtctccaagctgcagtattatgtccccctcttcggttccttcgagaacctgctccaggctctcaggaacaacgcctaccttctcagctcggacctcgagcgcgttgtgaagcccaacgtcgcgttcctggtggagtgcgggctagatgcttgtgatattgccaagctgtccatacccgtccctaggttgatcaccaccaacccagaacgcgtccgggcaatggtggagcgagctgaagctgtcggtgtgcctcgtggcactgggatgtttaggcacgcactgctggctgttgcattcctcagcgaggaaaagatcaaagctaaggcagagtttttgaagacaacatttcggtggtcggatgctgaggtgggcgttgcggtttccaagctgccattggtgctcaagcactccaaggacaggctgcgccgcatgtcagagttcctgatcaccaaggttgggttggagccagagtacattgctcacaggcctgctctgcttacatatagcttggaacgccgcctcatgccccgacactatgttgtgaattacctgaaggaaaatggattgttggagcaggaccggagctactatactgctgtccagatgagtgagagtgccttcatggataagttcatatgcccctacaaggaagctgcaccaagcctcgccctagattatgctgctgcttgcagaggagaggttgatgcatcatatgaccattcccatctccttggattttattccccctttttaccgtgtaggggaaaactggaagccattttgaaccaaagacgattcagaaataagactgtctgggagattaatccactctggacttcacaaaagcacttgttatcggaaaggtttaaagtcttgaaacatctcctacccaatacaattatttgataaagtattagcataatttagtgattttctgtacttcacttttagttttgtattggattatcttaaagttggccaaacctgctacctacaacaaggctctttcggtgaaattctgaaagcaaattggcgaggaacacccattgctgtcaaacgcattcttccatccttatctgatgacaggctggtgatgccaatgcagaaagtgttcactctgaagacgccccaacttgttcatacagtagtgtactttcagttattttgtttttgttattggtttgtatgaatgctgtagttggtttcatgtttggatatgcttgtatgattattaatctggaaatggtacaaacaattcagatgaacatttttagtgtacgaaaatatggtttaatttgtttatatgcctatatatttga

SEQ ID NO: 37758 - DNA, 2713 bp, Zea Mays
cgtcctcatacacatcacaagagcggggcacacgatgcgttgcattgcatggctccgccacacacaccccttgcatgtaccccacccaccacggcggcataagtatctccgccggctacgcgcgatccaggcccggccgcgtgcgtgcgtgcgtgcgacgactgcacccatacacacatatacgcgctctggctggctgcctgcctggcttgcggagctccgtttcggccggccatctctcgctacgctacgagcgcgcgcggcccccgcgcccgtgtcttcccgctgtcgaccgtcgtgttgatcgtacatgcagctgctagtagcgaactatagttgcagaccgcatcagtgcgtgacaagaggatatatattatcagacacgcacgcgatcgcgcggagatgaaccagtgcgtgccgagctgggatctggtggacgacccgacggcggcggtagctggcggcggaggcggcctaaaccatcaggtctcgacgaccgggggcgcgcaccggggcctgctcctgcaggcgtcagctggaggagcaggcggcgggggcgcgttcgctcccgtcgtcgtgcccatgtcgaaccagtactacgaggtggcggagctgacgtgggagaagggcaacatctcctcccacggcctgctcaaccgcccggcgcacaataagtacccgcccgccgcggcgccgtcgtcggctcagctgcatgccatagcaggaggaggcggccgcggcggcgggtcgccatccggggaccgcgagacgctcgaggcggtggtcggcgaggcggccgcgcggtcgcacttcctctcgcagccggcgccgccgtggctgatcggcgccgacgccgtggcgcgggccgcggcggacgcgctagtgccgtgcgccgcaagggcgggcgagtccgctgcagacggcggagaagcgggcgcctcgaggaggaagcggccgcgcgtggtcggcgacgacagtctggtggtgtgcgccagccaggggagcaccgcgcctcgccgccgcggcgagagcgcgctgctcacgcagctggacgcctgcggcaccgaggccgacgacgtgtgcggcttcagaacgaccacaaccaacaactccacgtccatggaccgtgacgacaaaggctccccggatactgagaacaccagcatcggcggaggggccagtgattcgcgctgtttcagccgtcgctcacagagagacggcttatgcgacgacgacgaggagaacgtggtgatcaacggggacgacggggcgatgaggtcgtcgatttccaccaagaggagccgggctgctgcgacccataacgaatctgagcgttcatcagaaaggaatcgccaaaggtttcgaagcatcccagcgatcgagacgacaacggctatagctgttgttgactgcggactccaaataagatgcaatactacaccgtactctcttttctctctcttcagagccttttgtttttcctttaattaaattccttaagaactttgtgctgtcggccgagaatgaaaaggacgctccaactctcagcttggcatacggcttttatatgggccctatataggccggaaaccaatgcgccaaaacgaagggacaggatcaaccagaagatgaaaacgctgcagaagctcgtcccgaactcgaacaagacagacaaggcgtcgatgctggacgaggtgatcgactacctgaagcagctgcaggcgcaggtgcagctgatgagccggatgggaagcatgatgatgcccatggcgatgccgcagctccagatgtcgatgatggcccagatggcacagatggcgcagatggcgcagatggcccagatgaacatgggctccctcggccagccgggctacgcaggcctcacgccgcccatgatgcacccgccccccttcgtccccgtgtcctgggacaccaccgccaccgccaccacctccctcgccccgcaggccggcagcggcacggtgccagcggacgccttctccgccttcctagcttgccaagcgcagcagaacgggcagcaaccgggtagcatggaggcgtacaatagaatggtggcgctgtaccagaagatgaaccaaacgcagcagagcgcgcccagcaacccgtccaagcagtgagcatgacattctttcctctcaattgatgaggcctggaactgtgtaacagaggtgtgaaacccgtcgacgcggtacctgtagcatcatgtatttgttttggttcttgaccactctatccttgtatataaggagaccagacgttgcgcaaccgttgagcggagaccaactccagcagactctctctccgtatccgtatttaggacggccaacagtttctctctcctctccgtatccgtctccgtttctagcagactccgtatttacactccgcatgcagtctatgacagctggggcccgcgagcaggaggtggcgcatgcagtcttctgcagagaggagagagaaatcgtggaaaaagggagtgcagggaaccgtttgtctgcctagaatattgtcacacccggcttttagaagaaacacaatacatatgtatgtgttcccagtaaattactcacacatactacgacatcgttaatgataatattacactataccggcttactagagcatgcaaaacccacataaatgatatatatcttaagagatatcaagtgggtaagtgtaaaaaataccaaag

SEQ ID NO: 37759 - DNA, 255 bp, Zea Mays
tcgcagccgcaatccttggccacggcagggtggtgccccacggtagagcaatgctcccagtaagaaattgggccgaagatcgtggccaatccagcccgacgaccccacgaaaagcttgaatagcatccagcgatcacccccgactacttctctgtcccccaacctggtatactcgcagggtgacgccggcgcaagctcaacacggcaatggcggactgcgaatatctctatctcactggcgagaccctcggttgg

SEQ ID NO: 37760 - DNA, 1530 bp, Zea Mays
gtccaaattagtttcaatttgatactttctcacgttttacttcatgtttttatcgtttgggtttactaaattgcttagagttcaacatctttccctcagaactcactttttttgtctttgttcgactttcatagaattagatacaatttcctgctcgttccacacaaatttcctcctctcattgtttttatgtgagtttccttagatcaatacgtgtagccaggtcaacacatacaggttgtgtttgttgctacgtaaagaatgtcatctaggcacgaggactactatctctaatcattggagctttgtttggcaaggtcaaccatacctaaggggtactacaacaagttcatgatacttcaagcctggaattcctgaggcgcatacctactacaacaggttgcaaaacaatgacctccaactaatacaacccacaacagctgaagaagaaattcagctttctcaaccaccaaatttggaagacaagaccgttgaaaagctgctcaacatagatccggatatgtttcccgcagaaggctatagatgtattgttactatatcacgcatcgtgcaaaatagcagatggtggtacccatcttgctccaggtgccacaaatcttcatctcaaatctcaactggatatcactgcacatcatgtggctgcacaaatattaagtttagatacaagctcagcttcattgctactgatggaacatgcgaagcagagttcttttttttgatagcatagccagaaaaatagtaggagaaccttagggcaaccttgttacagcagttacaacttctgagagtcccagcagccctagccgctattgtgtgtctgaaatttactcttgcagttgccatcaatatgtcagcctactatgtcatgaacagagtattctctattctatctattttaacaaatcatggaagacagaccttcataccatctaacatgcctagccatcctcaacaagagttgtatacacaagatgaagtacctagccttccggtcggccacacaagactctccagcaacatcaatggcaaaactatctacctgtagcaacgaaagaaacgaggcacgatgacgtgttctaatatattcagatatgccacatgacacagagggtgatgacagcgcataagtgaactcaacaagcaagagatatcgtcaccaccaaaatggataaaacatagccacactagcaaaggcataccagatcttacaaaccccaaaaagaaaagctcctaaatcgtcatcaacttcgtgaaggtgtttgctttttgcgcacctatcaggagcaccatcacttttggatcatgaatgctttcctatagatatgaacctactgttatactatttgtggatatgtacatattgacttaacacctgcaagcacattgttgctaagtgttgatgtatggtagttgaatgctacttagtatgtattgtagtctaaatccactctacagctggtatcaactattatataaaaacaacgtcatatgcttatatttggtttcctc

SEQ ID NO: 37761 - DNA, 579 bp, Zea Mays
tcccagccgccgccgactctatctctcccttccctctcaccacctcctcgtcatcctcagcgtgcacgctgcgcgtggccgtagtgggggtggccccgcggcacgtcggctgccgaggcgctggtctcgccgagggcccagatgcaggtgctctcctctaccaacctcgccgctgacttctcccgcgcgctgccgcccggggcacccatccccatgctccgccgtgaggtgctccactccttcctccgccgtcgaggccgagctcgtccagggcctcatcacctccgccgtgaggtgctccactccttcgtcttcaagctctcgccccaggggtgcgctagtgccaggtgcggcgagccagcagatcaaggaaaccgcccgtggccgccccaagcgttacatctgcactggctgctgctggtgacaagcaagaacaaccaaaggatgcaaacatgtccagtgacactgatatgagtaaggtgtttgaagacagaacgtttgtgtcatctatccttaattcgcaactctccgttctaaggggagaaaacatgagcaccaagcaaaaggacttcgtctttg

SEQ ID NO: 37762 - DNA, 2154 bp, Zea Mays
cgccgctggagtggagtcctccatctcctcctcctcgcttcgcccaaacacaaccggctgctttgctttctcaacccaccagtcctcaatcacctcacaacacagcccctgtcagatcgtcccactgatcgggccgtgcaaaaccccccaaccttttcgacaggaccctgctggcgctacagtcttctcccggaggcagaaactctttgcttccgcctggctcgcgatgcttgtttgggtgcgcgggcctgcggcgaggtgaggcgacggcggcgccgggcggttgcatggtggccgatggagagtagacggggagggtcgggggcggcggcggaagatgcgggcggggcgatgccgagctttgggccaacgcagcacgccattcgcgcaggcgcagatgtgaacagcatgcaaccttctcgagttactgactttggggcacttgcacagtctgctggattccgaatagaagatcttgctaaccttaatgcaaatgccttgttcaatctgaagccaaattctcatacgattgacaacagtcctcttcagtttggaaattacggaaagtctatttctcctcatataaatactacagaagcaacaacagctgcaacaagaattgaccctcagctgtcagcacagcaaacaggagcacaaccaattctggtggcgttaccaactggtaacatggagaattggggagagtcagctatggctggtagccctatgactgacacatctacagatccagacactgatgagaggaaccagatgtttgaacaaggacttgttgctgtccccacagcatctgattctagcgacaaatcaagggacaaactagatcagaagacacttcggcgtcttgcccaaaatcgtgaagctgccaggaaaagccgattacgaaaaaaggcatacatccaaaaccttgagagtagcagactgaaacttactcagttagagcaagagcttcagcgggctcgtcaacagggtatttttatttcgacatcaggagatcaacctcaatcaacaagtggaaatggagctttggcatttgacatggagtatgcacgctggttggaggagcacaataaacatgtaaatgagttgagggctgcagtcaatgcacatgctggtgataatgatcttcgttgtattgttgatagcattatggtacattacgacgaaattttcaagctcaagggtgtggcagctaaagcagatgtttttcatgtgctgtctgggatgtggaagacccctgctgagagatgtttcatgtggttaggtggcttccgatcatctgagcttcttaagttactggcaggtcacctagagcctcttactgatcagcagcttgttggtatatccaacctgcagcagtcctcccaacaagctgaagatgctctttctcaagggatggaagcattgcaacagtcgcttgcagaaactctagcatctggatccttgggccctgctggaccttctggcaatgttgcaaattacatgggacaaatggcgatggctatgggaaaacttggcactcttgagaactttctacgacaggtcaatatcatcggagggaagctctgtaggaggcatcgaacttctcaatctcatcaaaacatgccggaaggtggcagcatgacgtatcttcctgcaccaagagcaatgttcagaacgccatcctcccatactactcggccccttgagatcgtgatctccaccattccctgcacgaacgaaatgaacattagtacatgatgcaccgagaagttgcaagttccacattaagggcatatttagtttgttgctaactatgtcacattttgcttaaggttagtcgttcgaattgaagaactaaatttagtcacaaaagtgtggtaaattagccagcgaaccaaatatgctctaaatactgctgattcatatgtgcaaaaaagaaccgacctttcctctccggccctcgtactccctccatctacatgatttagttgttttagatttgtcctaagtcaacctctatcagagggagtacacattagtgttggacggtgtgtgtgagctgagaagggttaagtatttgtatcattgttgtttgccaattgaacaatgcattttgatacgacaaactgctgctaaactaaaccatggttcgag

SEQ ID NO: 37763 - DNA, 3469 bp, Zea Mays
ctcatttccacggcgctgcccacgcccagtataaaatgttgcgtaataagtacctcccctgaacatcaccatgctcatgtcacctgcggtttagcgaaaaacactccgaggggaagggagcgcgggtgcttgattcatccatcattccatctacgatggagtacgagcgcggggaccgggccaagcggggccgtggaggtggcggcggcggcggcggcggcggaggacgcggaggtggcggcgagtacgggcggcagcacggaggcgcgtacggcggaggcggatggcacgggcacgacgaaggaggaggctacggcgggggccgtggaggcggtggctactatcaccaagggcctcgcggccgcggagggtggcgcggccccggcgcgggcggcagccaggcgtacgggtccggcggcggccgcgcgtgggcgccggggccgggtgaggggagaggccttggggttggccgcgagtacgcccccgtcaggcgggcagcgccggcgcctgcgcctgcgcctagggaggttgcgactgcgcccatggtcaaggaagcgccgagttcgtcgggatccgttgaacgcatcacatctagtgaattggccggagtagaaccactagcatccacactagctgcgacatcttctgttggcacacgagtgccaatgcagagacctgactgtggtggcgcattatctcaagcaaaggtcaaactcttggtgaatcactttattgtcaactaccaaaaggtgtcaactatttttcactatgacataaacatcaagcttgatgaagcttcctctaaggcttcaggcaaagaactctcgaaggcagaatttctttctgtcaaggatgagctcttcagggaaagcagtttacggcgtctttcctcatgtgttgcttatgatggtggaagaaatctcttcacttctgctgaactgccagcaggtttatttcgtgtgagagttcgatcaaaggcctacattgtatcagtagatttgaagaagcagctgccattaagtcaactctcagatttacctgtacctagagaggtcttgcagggtcttgatgttgttgtgcgtgaggcctccagatggcgcaaggttatccttggtagaggattttactcaccaagcagcagtatagacattgggcagggtgttgtagctatgaaaggaacccagcagacacttaaatacactcaacaagggttgaacctgtgtgttgattattcagttatgccattttacaaagctggaccggtgatggaccttgttcacaaaatagtggggtaccttgattatcgaacaactctgaacaagaggcaaatggaaaatctggttgatgagcttaaaggccgacgtgtaactgtgattcatcggaggactaatcagaagtacacagtgcaaggcttgacacccttacctgccagccagatgacctttgtggatgctgaatccggacaaacaaagtgtcttgtggagtattatgctcagaaacatggcattgtgattgagtatcagatgctgccatgcttggatttgagcaagagcaaggacaaaccgaatcatgtcccaattgagctctgcactcttcttgaaggacagaggtttccaaaagcaaacttggataagaattctggcaggatactaaaaggaaaggctctaattcctgcatccaatcggaggaaagagattctagacttggtgaatgcttcggatggaccttgcagaggagaaattgcacagcgatttgggatttccttggatttacgaatgacagaagtcacgggtaggatccttcccccaccaaacctcaaactcggggcatccaatggccagacctccaaattcagtatcgatcagaactgccagtggaaccttgtgaagaagagactcgtagagggccgggatcttcagtgttggggcattgtcgacttcagtgctgagccgtctgacccccagcaggagcccctcaatggaaggatgtttattgagaagattgtgaggaagtgctgtgagcttggtatccgtatgaactccaacccatgcttcgtacacaaatctaagatggcagtgctctccgatccgcatcgactacaggaggagctaaacaaggcaaaacaggctgcagtgagcaagaagcagaggttgcagctccttttctgcccgatgtccgagcagcatccagggtacaagacactgaagctgatttgcgatacacagcttgggatcatgacccagtgtttcctgggcgaccgcgcaaacaagccgaatgggcaggaccagtacatgaccaaccttgccctcaagataaacggcaagcttgggggcagcaacgtccagctgttcgactcgctcccacgggtcggtggggcacctttcatgttcatcggtgctgacgtcaaccacccgtcaccggggaacgtggagagcccatcgattgcagccgtggttgcgtctatcaactccggtgtcagcaagtacgtgacaagaatccgtgcccagccgcaccgctgtgaggtgatccagcagctcggcgagatctgcctggagctcatcggagtcttcgagaagcgaaaccgcgtgaagccgcagaagatcatctacttccgcgacggcgtgagcgacgggcagttcgacatggtcctgaacgaggagctggcggacctggagaaggcgatcaaggtgggcggctacgcgccgaccgtcaccgtgatcgtggccaagaagcggcaccacacgcgcctgttccccaaggaccccagccagccgcagacgaagaacgggaacgtgccgcccggcacggtggtggacacgggcgtggtggacccgtccgcgtacgacttctacctgtgcagccacgccgggatcctgggcacgagcaggccgacgcactactacagcctggtggacgagcacggcttccggtccgacgacctgcagaagctggtctacaacctctgcttcgtgttcgcgcggtgcaccaagcccgtgtcgctggcgacgcccgtctactacgccgacctcgcggcgtaccgtggcaggctctactacgaggcggccatgatgccgtcccaccagcgagggacggggtcggcgtcctcgggctcctccgctgggacttttggcgtcactaacttcccgaggctgcacaaggatgtggagaacaacatgttcttcatctgacaccagtattttcttttgtgtgtacgcgtcttgccttttcttttgtgtggttatgagtttttttaaaaaaaaaagcgtacgctgcagtgtgcaaagttcgtactgggtatacgctgcatgactgtagatgaaggaaaagaagcaggtttgagttgtgaagaactgaagatagcgctgtaattgttccagcacaaggtccggttggaatgcaggcgttctatttcgagcgcatgtctggcgggcactcccaggcgtggttcaggcctgtcacaagatttcgg

SEQ ID NO: 37764 - DNA, 1822 bp, Zea Mays
tgacattctgcgttaaccacaaatcaaagaaaacagctggcagaacaggcacaatctaatttgttcggtcctcggaataaaggaaccgttgcttcacttgcaagctagcactgctcatgggcatatgacttcggcatctagaacaacaacactttacacttcaggcatctagaacaacacagcgtgttaaagacgacgacgacgacaacgggggaagctttcatgctcatgggcaacacgtggccggtgggcatggcgggagggaacacggcggcgacgctgtggtgcagccactgcggcatgggcatcgcggcgccggcgcccgggtccggctctatcgtccggtgcgcgttctgccgcggggtgacgcgcgtcgagcaccagcgcggcggcgtgggcgagagagccatgacgacgaggacgctcgcggctgcagcctcgctgccgcggcagcttccggtctccgcggggcccgtcgagatcccggccagctaccccagggtgagcggcggcaacaagaagcgggcgctcctggtcggggtcagctacacgggcaccgcgcacgagctcaaggggacggtcaacgacgtcaaggagatgaggaggctcctctgcgacaggttcgggttcccgggcgcctgcatcctggagctcaccgagaaggagagtgaccccaccagggtgccgacgagggagaacctgctgcgggcgatgcggtggctcgtggaggggtccagcagcggcgactcgctggtgttccacttctccgggcacggcgtgcagaagctggacatgaacgacgacgaggtggacgggtacaacgaggcgctctgccccatggacttcgagcggagcggcaagatcctggacgacgagatcaacgacaccatcgtgcggccgctcggcaagggcgtgaagctgcacgccatcgtggacacctgccacagcggcaccatactggacctcccctacctctgccgcatgtccagaactgggtactggcagtgggagaaccacgcccgcccttcgggcatgctgacgaagcgccccaacggaggcctggccatctccatcagcggctgcagcgacgaccagaagtccgccgacgccagcggattttccgatgagtcgtcttcgatcggcgccatgacggacagcttcatcaaggcggtggaggccgagccggggacgacgtacgggcggctgctgagcgcgatgaggacgaggatccgtgacggccaggggagccgccgcctccccggcaggcttggctccttcgtccgctggatgatcccgtccagcagcgtgcaggagcctcagctttgctcttcagagatgttcgacatctacaggaagccgttcctcctctgatttggtcgtcgtctcgtcggctgcgaattccaaacttgatctgagtgatattgttgtgctgtgtaactccatcagttcaacccttgtgcatatgtgccatgtaattatattttacgcgtgaatcaagtcatgcctctcgccaaacgcaccagcacctgccagatgcatgcactactagcagggtcagaaatttcgaactcacggcctttttgcagagctccaccgtccggctctaaattcatcatattcatctaaatccatcatgaaacagctacacgtggatctaagttttatgcaagtatttgcattggtacacctccaacttagggatgacaatgggtacggtggacgggcgggtaacgggtatctgccggatagcggatacccggtgggtacggttatgggtagagatccatactcacgaacgtttatgggcacgaatatggtttaa

SEQ ID NO: 37765 - DNA, 1514 bp, Zea Mays
ataaccttcattccattttgttcctgcatgcagacccatgatgttgtattgtctaatccagtgtgcaattcatcatgtttcttatatcttgatgattctgattttgattttaagtctaccctgcgagaataaacgttaagaaaaggagaaagcgtatgaagcatgtcaatacatcaacggacagagatgtcttaaacctgcaggataatgtgtcaagtgtcatggcaagacagtgccttcatatctcaagtcatagaacgtcccagagcacatcaaagcataagggaaacttgtcacacttgcttcacaatgaagttcctatccggatgggagaaaggaacaatcttactgaaaactctgaaaatgatagtttgtctgacagcttcagtgaacctcagacttcagatactctgtgtatagaagctcaaagaaaatcaagtgcaccatcatcatcacttagacaaagtaccctagattctctatatgaatttggtgaaactagtaggcatgaaccagcaggaagaaaaaaactagacaacgttgaattaagggagacttcaagaagcttacttccatttgatttgtcaggacaggaaccagctttctgtactcaggagcaagtagataaatgtagccttggcactctagctgataaaaaacccatggaaaaatcatctaatatggaaaggcaaccagaattatcatgtgtcatatgctggacagatttttcttctacaaggggcatcttaccatgtggacatcgattctgttattcatgcattcaaggatgggtggattgtctggcttctaggggtaaagtctcaacatgtcccctttgcaaagccagtttcacatgtatcagtaaggtggacgaggcaggcacctcagatcagaagatatactcgcagaccattccctgtgaagcttctactgatgtttttgtgtcgggcaatgtaggctacgatttctctcgaccaacgtctgggcaaggagcatgctaccagtgtcacttccgtgagcccgaggagcttcttctaagctgccacgtctgcagatcacagtgggtacactcgtactgccttgatcctccgctgactccttggacatgcatgcactgcagagacctgcgtatgctgtttcaccggtatcgttagccccagttatggtactcatgtcaaaccttaattgttggaggaaattgtatcagaaggcatgaacaccatttgattactgagatgtaactgccaagttccatttgatgtctatactctaacattgattactgagggtcgatgtgagcttttttatctcagtatcttctctgcataaagaactggaaactagtgtcaaatgttgcctcccaaaaatgtgacctcccgaaaacggttcgcgcgtccgcccgagagatgggctggcagggggctcggcccagcgcggggaaaaagtgaagggaggattgggcccggtacaggggtaaggagcagttccctttattctttacttatttatgagac

SEQ ID NO: 37766 - DNA, 1725 bp, Zea Mays
ctttagcatgccggcttgggtcgcctttgcatactggtgtactacgtgatcacaactgtgttccaaatggggaattaaactagcatgctggttctatgattgaagggaatgatccagtcacgggtcatataatctcaacaaccattggagggaagaatggagagcctaaaaagactatcagctacatggcagagagagttgtgggaactggatcattcggaatcgtcttccaggcaaaatgtctggagactggtgagactgttgctatcaagaaggttttgcaggacaagcgctacaagaacagggagctgcaaatcatgcgatccatggatcactgcaatgctgtttccttgaagcattgtttcttctccaccacaagcagagatgaactttttcttaacttagtgatggagtttgttcctgagtcactacatcgtgtgctgaagcactacagcaatatgaaccagaggatgccgcttatttatgttaaattatatacctaccagatatttcgaggtttagcctatattcacacagtacctggtgtttgccacagggatgtgaaaccacagaatcttttggttgatccattgactcaccaagtgaagatatgtgattttgggagtgccaaaatgttggtcaaaggtgaagcaaacatttcatatatatgctcacgttattaccgtgctccagagctcatatttggggcaaccgagtacacaacatcaattgatatttggtcagctggatgtgttcttgctgagctgcttcttggccagcctctcttccctggcgaaagtgctgtggatcaacttgttgagataataaaggttcttggtactccaacacgtgaggaaatccgttgtatgaatccaaactacaccgagtttagatttcctcagatcaaagctcacccatggcacaagattttccacaagcggatgcctccagaagctatagatctcgcttcacgtttgctccagtactcaccaaatctaagatgcactgctcttgaagcgtgtgcacatccattctttgatgagttgcgagagccacatgcgaggttgccaaatggacggccatttcctccactgttcaactttaaacaggaactagcaaatgcctccccggagctcatcaacaggctgatcccagaccatgctaggcggcatcttgggctcactttattgcccaccgctggaccataggcgaaggctctatggtgtttaaaccttgctctttctgattcttcgttgtgccataggcaattcaaggtgtagaatctgaccattattggaaagccaaacacgagctggcgccaatgtgttgcataaggagaggcggtatgttcgtgcagccagccttttgccgcctgttttaatgcaaaatctgattttacttaagcagtgtgaggggaagtgggttggtgtattgttaagctattgaaggaattcaatccctggtattgtattactttctccaacgttaaatgttgtagttcgcctgtaagtgttccacatcgcctgttatcagtccgcaatccttcgtgtaaatgttattaatgaaaaaaatacatcttgctatgttaccgatcgactcattccaatcacattccgtcctgttgcaaacaaattcttgttttcattgtcagtcgtgctgatcgggaattgtttccagcatcttcctgcaaggaagtgttaattctgaatggttgtaccacttccg

SEQ ID NO: 37767 - DNA, 3230 bp, Zea Mays
gacgatatatacccaccctccactgaaatatccattcatttccatacactactaccattctcccaggcaaggcgaggcagggagctttccaggctccgtcgtcccgatgactgcgcagctataacctcgggggcgcggcagcatgcgtcttaacgaaggataaagacctgctaagatggccatggccatggccaggttcctctcgtggttgttcacatgcttcgcagctctcgccgtcctggaggccacggtccctgctcgttcatggcgcgctccgagtcccaccccgaggcacgaagcgaggaggttcgagcagaagacggacaggttctgggagtaccaggagcagagcaatacctgggtacaagtacgcgcgccgttcgacctcatgtcctgcatcaacggcacctgcacaaaggtaggatcgatcgggcggctggcgagggagcctggacgacacggccttcctcccgtccagagccaggaggaggaggaggaagacacgcggcgggttcagggagatggtgcagaagaagaccctgtcctgcctgtaaggaggagaatttccttgacaagaatgtcagagtcgtcagtctgggtgacagggcagagcggctccatctacgagaggttctggaacggggtggtgtgggtgattgctcctcatgagctccctgcctcggctgggtatgccaccgcaactttcattgtcaatacaactatccttgctctgtctgaagctggaaccctctaccagttgcagctaaatgagcatgcccagcctatctggacagagatggcattcaactcaagccagcagtcagcgaatcttggattaaaaacacaaagtcaagctatgcgtataagaaatgggattgtatccaatgatggaaggaaacttttcctgtctatcatgaatggatccctgcttgaggtaacagaaattcagcctctaaggtggaattaccatgggcgtcctccaggtgcagacgtgtcgtatatatctgatgctggaaatctgcggccagggaccctgttcacagtaagtgcagttccactggagacctctatgagtttgacaaagaaacaaagccatcatggaaaaagcatatatggagtgaagaactggcgaaaaatatctcattaaaatcatcggctggctttgctttgcatggtttgtcagggtctaactcagtgtctcttttcctgataagcaaggatggccttttagtggagcggcgcttgcatagaaggaagtggaagtgggacaaacatggagctcctacgggtcagagacttagttcaattgcagaagttcagaaggatgaacttaatgatgcgacttcaatgtttttaacgacaaccacaggaaaagtatatgagtatcagtttccaaaatatacaggtggggcccagagcaataagataagaggacaatggataaatcacatgtcccctgagcatgcaaaggttgcaagaaacgtcccaggtgtacatgttcaagtcggcagaatggtattcccactagatgatggtaggcttggggaactacattttcctgggatggggggtactgattttggtccgagtgcccaaagtaccataagaagaaaactatcaaacaagtacgagtggtccatcctagacgcaccagaaacagaaggttggaatgcagaatattgcaccgaagagcacggtccgacaaattgtattagtggagcaaagaatatagctgcagacacagaatcaaatgacttgagcaataacccaccttccaggaggcgtaaagtagaagagaagcagcactacctaaatgttaacagataccagcagagtgatgaaactgaatcatacaactttctatcaaggaccattgatcttaacttccacatgcgggtgatgcatgcagacagatcgcttttccttatagcagacaatggattgacttttgaatatctaaacagcaatggtgtttggttgtggttaagacatgaacatgttacagccatgaaaggaacactaggaagctacaatggcagtttgtatcttgtcgacgtgcatgggaacttacacattagagaaagaaatggagatgaactgttgtggattaactgcacagcgatgaagaagggaagacaggttgcaagtgggtctccatgggatggcatccctggtttattgcgcagagtgacaacagatgatgcactcttctttgtcaacaagcgaggcaggctgctacagttcacggttgcgctgcggaaattcaagtggaaggactgccacagtcctcctgacaccaagattgctttcatagtggaccaggaggtcttcagaagaaacatcatcttcgtgggacggccatgcggccatcgccgctgtccctggccggctccctgttcatggtgtccgagcacggggggctggtggagtaccacttcagcccacaggacgggtgggagtgggtagagcacgggacgccccaccggggcgtgaccctcgtcggcgcccctggcccgtgcttcgacggctcccagctgttcgtggtcggctccgacgggcacgtgtaccggcggcacatggaggggaggacgtggaggtggacgagccacgggcacccgccgtcggagccggccgccgttgacgaacagagctgcgccacaccggacacgggcgccggcgcgcactacgccgacgggttcagggggagctgcgacgggaaggtggcagccgtgcggccggtgccgttctcggaggacgccgtggtcttcgagctgcgagatggccggctggcggagctgcggcggccgccctccgcggacgggtgcggcgggtgggagtgggcgcggattatcggcacgccggccagcgcctgtatgaccagctactggacggccgtcgccacgtagccgccgccgggcgcgactcacggagctggcagtccgctggtcgcttggctgattgaggtctccttggaagttggaaatgatccacaacaacagcggtcacgtccatgtttcctcgaaagacggccacgtccacatgggtctaggccgtatgatggccagatttgggcgcccaaagaaaggcagaaaggaactctctcgaaaaaaaaaacggctaaccgttacattacatttgattgtctgtttggtaatgcatttttagaatactatagttttaaagcatatagtactatagtttacaattgtatataacataagtattacaat

SEQ ID NO: 37768 - DNA, 3033 bp, Zea Mays
ctcaagtggcttgtggaattagcacttggtgggtttggtgcaagtggcccatatgttgcgcagaggagcactggtgaagcctaagaaccctttatgtcgatgggggcggtctcgagggaggtgtcgtcagcatgtgagaggctctgcttcatttgcccatcactgcggacgaggtcccgccatccagtcaagcgctacaagaagttgcttgcagaaatcttccctcggacacaggatgaaggaccaaatgatcgcaagatagggaaactgtgcgaatatatttcaaggaatcctatgcgtgttccaaaggtttatttccttttatgctttgcccgtatagttttaagtgtaacatgagttcaattatgaaaaccatcgtgaagtcccattacagattacagtttacttagagcaaaaatgctacaaggaatttagggctgagcgctatggttcagtgaaagttgttatggcaatctatcgaaaggccactttttgccaacagcttgctaacaattgtagagacattattggagcaaaatagacaggatgacttgcggaaattagcatgtcaaacactttttgactttataaatagtcaggttgacagtacttacatgttcaatttagaaaaccagattcctaaactatgtcatctggcccaagagatgggtgaaaaggagaagatatgcattcttcatgcagctgggctacaagctctttcatctatggaaaagatatgttgcctcttaggacctgcttgaaagaggaggatttttttttgtcaaacttgaactaaatcctttggatcttaacccttcttcctcttacaaaaagatttggtttatgggtgagcactcccatatgtctgcagagcttgataatgttgtttctgcagttctggaaaattatgagagcccatatgcaaatgctgataatgatgctgctgttgaggatattcgaactcagtgggtggatgaagtgctcaaagccgaaggtcatgaacctcctgctgttaccattttgaccagggttccttcatggaaagttattagagctgttcatggtgaattaagtttgacaatagaagaatcaacaagcccaaatttttggtcagggatttgtctacataaccttgctagaatatccagggaaacaacaacaacgcgacgagttctggaagctatatttcgttattttgataataacaatctatggtcaccttctaaaggatttgcgctgtgtgtcctgctggatatgcagattgtgatggagaaatctggacagaatgctcatatattgttgtctatgttagtcaagcatcttgaacacaagaatgtattgaaacaaccagatatgaatctagatatcattgaagttacttcacgccttgctgaacactccaaagctcagtcttctatagcactaatgtcttcaataagtgatatggtcaggcatatgggtaaaagcatgcaatccttggccagtgatgcaggtcctggagacaacatggtcaaatggaatagcagatatgggaaagctgtagatgaatgtcttgttcagttgtctagaaagacaaggaagattgatctccgaaggacattatctagaacaacatcagtgttttcatcttctgctgctttgtttgggaaacttaaaagagatatgctttcatttcgtgaaagtgcactccaggataacacaaagctactgcccatcagtgagaatgcaaatgagatcagtgcaaatgatgcaaaattattcaagtcacagactattcaaaggatggttagtacaagagatatttctctcccctcttccacagatacaagtacttcgagtgaaccaacttcatatcaggaaaaggatgctgtcaccctcatgctcagtgttcgtcaggcaaatcttcttctttcctccttatggactcaggcactgtcacctgaaaatgttccacggaattatgaagcaatttctcatacttacagcttgatgctattgttttctagagccaagggctcaggtgctgaagttttggttggtagctttcagcttgctttttcattaagaagtgtttcattacaagcaggctttcttccaccttcacgcaggcgttctctttttactttggcaacttcaatgctcgtgtttttttcgaaagcttttaacgttcttgcgctcattccagttgtgaagcaagtgttgacagaaagtacagttgatccatttctttgtttaatagaagactgtagattgcaggctcttgatagtgctaatgagtcctgcacgaaactctatggttcaaaagaagatgatgagctagctctgaaatcactgtcgaacattgacatgaatgaaaatcagtcaaaagaaacatcagtgcctcttatacttgacagcttggaagatatgtcggagtcagaattgtctgctattaggaaacagttgcttgaggaattttcagcagatgacagctgtctgggatctcattttactgaaacaccttcacagtatccagcacaaaatgggaaactgcaccataagtctatggaggttattccattgggatttgtttttgaagatgatactctcgctgaagcatctgacagctcagtagaacctcacttgcaacatccgccatgtaacaacattcttgatgtcaatcggcttcttgattcagttttggaaacatctcagcatgttggaaggtcgtcagtgtcaacaaaccaggatctgcctttcaaggacgtagccaaccaatgtgaagcacttctgattgggaagcagcaaaagctatctgcgtgcatgagtgtctgtgaaaaagaggctggtgaatcttccgtcgagcagtcatctcggcaggatcctcaagcagatacgtttctctgcacagctgatgaacaatggcaccccaattcctggcctgcctgcaggtgcgttttcaatcctaaacccggtgtaatgaaggtttcatggaccgaactgaaaaatagtctttacaagcctgaagacctcgttatgtctcaccagggatga

SEQ ID NO: 37769 - DNA, 2892 bp, Zea Mays
gtcggatttcgggctgagcagggcaggaggcgaagacaggaaaaaaagaagggagagacatgagagcgaggtccttcttgccttcttgttcgtttgctgctctccccgctgttcctgtggttatctcctccttttgccttcaatgctgccgcgttactactggatctgactgacagacacactgcgtccgccgccttgaagctaatcttggtgacttggtcccgggctcccggccggcctccccaagattctcttgttctttcggaattccgtcattcctttgcagcctctccttcgcagcagaatccgcgtggaacaagtgctgcgcgtgttgctggaggtgagttttcacctcctccgcgttcttcttcaccgccaaaggcccaagaggaatttcgattggttgaagcgcgaatccgcggggttggcaggtcgatcctcccttggattgcagcgtgtgccatggttctctcctccaatcccaccaacaaggcagcagctcagctgtcacagccggcactgtagtgctttctagcctgctgctgggctccaatggcgtcctcaccttcgccttccccgggcaccatcagggcccccttgccgccttccagcgcaaccccgtcaccggcaaccaccacgcccacgccggcctccccggccccggtgacgcagcccaatgctaccccggccgaccctccctcgtcgccggtcgcgcctccccccgtcccctccgcatccacgccaccgccacagctcacttctccaccgccctccttgcctccgcctcctccagacgccgtgccaccaccgccacttgttgcctctccgccacccgccccagcagccgtagtgcccccaccctcgccgccggcgccggttgcagtgcccccaccacctacacctgctgccccgccaaaggcgtcgcctatacatataaggccccctgcggccgcgtcgccacccccaaccattctgccaacgcccaacccgccggctgacccaacgccgccgacattagcgcagccacctccaccacggcgccggccaccaagaacgcctcagacagaacctccacccctggcaccaccaccttctggaattcctgtcaaaccctctacgagcagtccctcaccgacatccgcagatcctttgatccccactccctctagcccctcacctccagggacgacaacgccaggctctggtagcactccatcggtgccagccccagcaatggcagccgatccagttcgcccggtaacgactgggggttcaaacaagtcgtctagtccagcctcacagagcagcggctccccagtagacagtggcggaatgtcttcaggtgcaaaggcaggcattggtgcagtcgttgccattcttgtgcttattagcttcgttggagctgcattttggtacaggaagaaacggaggagagttcatggataccatgctggcttcttaatgccttcgcctgcctcgactactacacaagtgctagctaaaacgaatttcagtgctgggagtcctgaatcaaaagattcaatgccagagttcagcatgggcaattgtcggttcttcacttatgaagaattgtatcaggtcacaaatggtttctctgcacagaacctgcttggggaagggggaacgcgagttccatgctgaggtggatattatcagtcgtgtgcatcatcgccatctagtatctcttgtagggtattgcatttcagatgagcagagattgcttgtctatgattttgtgcccaacaacacgcttcactaccatcttcatggacttggagtaccagtcttggaatggccatctagggttaaaattgcggctggttcagcacgcggaatagcctatcttcatgaagattgtcaccccagaataatccacagagatataaagtcctctaatattttgctggataataacttcgaagcactggttgctgattttggtcttgcaaggatagctatggatgcttgcactcatgtaactacacgagtgatgggaacttttgggtaccttgctccggagtatgcctcaagtggcaagctgaccgagagatctgatgtattctcatttggtgttgttctcttggagcttattactggtagaaagcctgtcgacgcgtcgaagccattgggcgatgagagccttgttgagtgggctaggccattgctcacgcaagcgctcgagaccggcaatgctggggagctggtggatgcccggcttaataggaactacaatgaagtcgaaatgttccgtatgatcgaagctgctgcagcctgtattcgacattcagcatccaggaggcctcggatgagccaggttgtgcgggtgcttgatagtctcgccgacgtcgatctgactaacggcgttcagccgggcaagagcgagatgttcaatgtcgcgaacacggccgagatcaggatgtttcagcggatggcgttcggcagccaggatttcaggaccgatttcagccagtccagctggagcagccagagcagaggccttgacgcatctggttccaggccattgtaaccctcgtcgtcgtagattcctacatctaactagctagggtgtttcgtgatgggttttgtacgtcatgtaattctttttgattggatcaatcgtgtgattattcttttgccatccctgtcttgtacgactgacatagatcatgtgctgcgctgaggccctgcttgcctgtgcgaagacctgctaactgatgaagagagactgctgcgtttagtcccaattagtgaattgctgtatcgaatttcctgtaattagcagtgcttttgaaatcagcggtttttttacaaggaacgctcagttcgagctgaacttttggggaaagattactcagatgtgtgccttttaga

SEQ ID NO: 37770 - DNA, 2015 bp, Zea Mays
tagccataacccataccagagtgctcgcaatcacaagagaaaaaaaagaaacttaataaggagagagaggagcttagcgctgtctctctctcgctcgtgcgtgcgtgcccaattgcaggaaagccacaaagtctcgtgttcctgggggcagggatctcctctcctctcctctggctctttaaccggagaggcgaggagtagtacggagcagcatgaggctgctgtcacctccattgccgtccctgcgctcttccgtcccggccgtcctcctccacctcctcctcctgctgctgctgctgtcctcatgcccctccccggcaaacggaagggccgcgccgtcgtctccgggcgctacggcgcctgtcaccagtgatcatcgtggagcgccaccgtcatttccaccgtgagctagtcatcgcctccatcctcgcctcaatcgccatcgtcgcgattatcctctccacgctctacgcgtggatcctgtggcggcggtcccgccggctgccccgcggcaagagcgcagacaccgcgagggggatcatgctggcgccgatcctgagcaagttcaactcgctcaagacgagcaggaaggggctcgtggcgatgatcgagtacccgtcgctggaggcggcgacgggggagttcagtgagagcaacgtgctcggcgtaggcggcttcggttgcgtctacaaggcagtcttcgatggcggcgttaccgcggcggtcaagaggctggagggaggtggccctgagtgcgagaaggaattcgagaatgagctggatctgcttggcaggattcggcaccccaacatcgtgtccctgctgggcttttgtgttcacgaggggaatcactacattgtttatgagctcatggagaagggatccctggacacacagctgcatggggcctcacatggatcagcgctgacctggcatatccggatgaagatcgcactcgacatggccaggggattagaatacctccatgagcactgcagtccaccagtgatccatagggatctgaagtcatctaacatacttttagattctgacttcaatgctaagatttcagattttggtcttgcagtgaccagtgggaacattgacaagggaagcatgaagctttctgggaccttgggttatgtggcccctgagtacctattagatggtattgtgtcagcttaattgtcaacttcgactcacatacataaacaacttcattatcgacagtgaagttctacttccatcccgtatctttcagctactgtgtcgatttcagggaagctgactgaaaagagtgacgtatatgcatttggagtggtgcttcttgagctactaatgggaaggaagcctgtcgagaagatgagtcaaactcagtgccaatcaattgtgacgccatgccgcagctgactgacagaacaaaacttcccaacatagttgacccagtgatcagggacaccatggatccaaagcatttgtaccaagtggcagcagtggcagttctatgtgtgcaaccagaaccaagttacagaccgctgattactgatgttctccactctcttgtccctctagtccctgtggagctcggagggacactgagggttgtagagccaccttccccaaacctaaaacattctccttgttgaggcgtcccgatcagtcgaagatcacagctacatgctgatgaacttggacgatgtttatcagtaactttatcaccctagctgtgtgccagaggatgacggttccaacctgccggttgctggttggatcgagagagaattctggtttgaaaagagttgtctcctgtgggtttgcttgtacaaagaagtgaaagaaaacaacactcttttccttagaattttaggtcccttctgtacagatcaaagtttgtccaacactatttaaaagaatttgagaatgacgagctttgggttccacatgggtacccgagcactttggtttgctgcgatattttgcttcttgtcgtacttcgataaaactgaaaaatgatt

SEQ ID NO: 37771 - DNA, 1435 bp, Zea Mays
cattggaccattgaatgatcacagtccacatcttctaacaatacgtgaacggatttctgttggaaatgatggaggccctgttccagtacgactgttgagtgatctttttgacgaggctaagaaagccattgatgaagcaatagaatcggaaaatggatccctgacacattttgaggtttttactgctctctcatttcttctattctcacaacagaatgttgacattgccatcattgaagtcttggtggagctagggatgcaacaaatgttattcgaagtactgaattagcagcatctgtcataacaacagtagggagggaacatctggttgcattgggtggctccctgcaaagcatagcaatagcaaagtctggaatcatcaaacaaggacgaccggttgtgattggtggaccattttcagaagatattgagcaaattattcgtgacagggcattcttgacacaatctcccgtgatatctgcttgtggtcatggcatcaagagctttacaaaatgcatagattgggataatggtaagccgtatcaacgctgttacatcagcattaagatttcaagggatgtacccttgtcgattgaaatgcatgacataaacctccagctgctgggagatcatcaacgtcagaatgctgtcacagctgcttgcgcagctctctgtctctgtagtcaaggatgggatatctctgacgcttctatccaagccggcttagaggagacccaacttcctggtaggagccagtttctcacagcagaggaagcctcggcacttgggttcgatagcgcatccactgtactaattgatggagctcatactgaggaatctgcaaaggctttatcaggcgtgataaaaactgtcagaccagaagggcctctagcgcttgttgtcggaatggctagtgacaaggagcatcttgcgtttgccgagcagcttctctcaggtcaaacgcctgacgttgtgctgctgacagaggcgagcgtcgccggaggaacctcccgcgcaatgccagcctcgtccctgaaagaagtatggatagccgcggcacgcgatcgtggcatcgagtacgtggacatcggtggcgtcagtggtgctgaaaccccagagcacattagtgatctcttggactgcagtccatcgtcgaattccggaagaaagcccatggtgatcgggtgccaagacgtggcgccgttctcctcgaacctgatcgttgctgcctcccagctcctggagagcagaggcacggctccaggcctcatctgcgtgaccggctccctgcatctcgtcggggccgtactgcaacagatgggacggcattagaggaaacaaccatttcatctttcatgccatataatacactggatgattgtgtctacactgaactcggagtggtgggtggtgctgctgctgacgaatctctagt

SEQ ID NO: 37772 - DNA, 340 bp, Zea Mays
cgggtccgccgcgtcgtggggataagaccttggactctccgcagtttcttccctgcgagacccatgtgcagaagctctgcaccgctctagccgccaggtaccgatatcgccgtctgtgagggagagccgagtgacatcgccgccatgggctgttccccgttcaaccagtcgacgtgcaccgcccaaccctgtcattgtgcatgggagtgagagagctctgttgttgccgagagctggcggctactccaaccgcgtgccgtcgggatcgggcttccggggagagaaatcgaggagagagggattaggggaaagctctggtcttcatcatccgctaacgtgg

SEQ ID NO: 37773 - DNA, 4552 bp, Zea Mays
ataacaaggagtcctttattattattcttattatcttagtgtaaatattattattattaggggcgtttacagcgtagcaagttcactcttgcaagcaagggacttttacaagagcatgtagctagttagttcatttggagtgtgaacatgtcttatttgcacacttgcttttttcccctctctttattttctccatcttcaggatggctattattagctcctttgcatgcgttcatggaattctgcgtcagaaaaccaaaacggaaaatagcattattggtcagtgtaatatacatgatatatatatgctacggtggagttattaggatgatatatctctactactacttatgttagtagtgtaggcgtccacacaccctctcggcgcatggttctgcctctgcagccgcgacacccgcgcgtgccttcgcctccgccgccgcgatggccgtgcctctgcccccgcctcctccgccctcgcgacgctgcgccctcccccgcgatgcctgcgccttcgtccccgtgatgctcgcgcctacccccgcctcctctgcccccgcgacaccgcgcgcgcagcctcctccccgcgatgcccgcccaagctcccaaatgccggcccccgtctcctccaccgcgactcccctcgctctcccgagactcccagatgctggcccccgtatcctcggccctgatgccgccgcgattcccagatgccggcccccgtatcctcggccccgcgctcgctctcctgagctccgacgggctcccgccctagcccctgacaccatgttgtgcccaaccctaaacctagccaccacgccgtcaacaacgccaccttccttcctcgccaccacaccttctttagatggaaggcgcgactggtggcatcttcctgatctcggagcacgtctaatcctcgctccaaatgctgctccgcccccaatccgtgcggcatcttcagatggaagccgggacaatgccccatccccctctcccgagccccgacgactgacattccagggatgtcgctctgcgatcctcacctcctcgtcgttggcggtcgcgcgacctcctgaccgtcgtctccgcccgcgagatccccccgactcgcccacctctccgtccacagccgcctccatcacgcacctccacgccgacgagaaggctcgcccacctctcagtccacgactgcctacgacgcgtcttctgaataaagatctctcgaagcacccggtggatgggttctctgctgggctggtcgacgacagcaatgtcttcgagtggcaggtcaccatcatcggaccgcctgacaccctatagattggttgttggacctgtttggtgttcttcatgatgggaagaagtcgtacccgaccattctggcatgtatgttggtagtttctctcgagaacttggtttgcaagttgtgaacaatgttgatgatgcagagtttatattagcccatggtactgaagtctttggttcaccttctagcaatcctcttcccaaaagtctcgagaagcttgagcaggttctaatgcttggcctagaaaagggacttccaatggtgctgcctaatccagaattccagattatgtcactgtcgaagcttgagatcttcgtgtcatgtctgggtttggaggctcgtcggcaaccggacaggaaaacagcaaggcggaagggcattgctcgatcgctggtccgatgagtggcactgtcagggagcgtgacaggggcgacaaatctagacctccacgtcggtaagatgttgtggcaaaatgtcagtgagctcacattttgaggagctgagggtcaatgtcagcgagctcactgttgaggagctgagggtccctgagtacctgcagttcaaggaacaacttatggaagaaggctttaaggttgaggctgggagaacttaccatcggacagttctagagatacttgaccaattggaaaaaatttggcttacattgatggatgaatatgatttatatgaagttcctggtatctatcggcttcatggtatatctctactactcttaagaagataccaggtatgttcctttcctttcttttattttcttagccccatctttatcatgttttcaccattacagagtttgcctaccgcccccgttcgcccgcaagcaaactctagccgaggaagacgcggtttctcacctctgcgccctcgccagtcccacgagccccgccttccctagcctctcaatgcctccagattctctaccccttgccccccagtcgttgtttccgcccgcgccgctgacccatgacctcgcatgcggggctagggtttccacatgcgatggaagtagcggtgatgactttgctgttgtttgcatctgcctcgacttcctcggtccggtcttgccatctaccagcgctgcctaggtttgcctctcctgtcctgcagtgctgaagttccgcgtgtgctggttggtgtgtgttacgcgtcttggaacgagagggcaacttcgatgcggggctttgattggctgttttgtttgtggtgggggtagttgggtttgcgacattttttaggaaaccgattggtttcgtttcagcttgttttcagagaagggatagtggatttgtcaacactagactggattccataaaaatttgatagaatcagtgctttcagctttgagctagactacacatttttctgtgaggttgcaccatttttccctagataacttctatgttgaaatggtttagttctgaagctgtcattgttagataataacaaggcaaatagatggttactgtggcagtcaaaagtttgaagccagatgcgcttcaaggtcatagagaatgggtggcagaagttgactttctgggacagttgcatcataaacaccttattaagctgattggatattgtattgaggatgatcaaaggttacttgtatatgaatttcatggcacggggaagtcttgaaaatcatcttttcagaaggactcttcccctaccttggtccaacaggatgaagattgctctaggtgccgcgaaaggactagccttcctccatggaggtcccaaacctgttatttacaaggattttaagacattgaatgttcttcttgatgtggagtacaacgcaaaactatctgatttcggtttagcaaaagctggtcatcagggtgaaaaaactcatgtatctactcgggttgttggcacctatggttatgttgcaccagagtatgtaatgacaggtatcagggataaacttttgacttcagtagctacctatagcagaaattatgtaccttgtttatctgttgcatgttggttctttacactgttttctgagcttgtagttattctcgtgttcactccatattggatagtaaattggcttaacatttttgtccgaagacataaaactaaggtgccattacaaatgttcttctttcaagtgaaactgtgtttttcgtttttacatgcagtaaaggttgtaaggctgtagacttatataatgaatcttgcgctccacttctttgggacatgatttaacatttcttaacatttctcactctataacgctttcagatcacttttcatatgttttttagatgcactttttttttggagactaagccctaagggcaacaatggagatgaccagcgtcttggtttatcaagaggaagttaatccctctcaactgaaactcccatcaaatttggggcgtagtgtgtcgattcagttgtaactattatatgtcattttgggttagcaaactgtatctactaatttctcagacttatgccttttgagctagaaacttgtgtaagaattttttgcactcagtgacatgctggatagtgcgagtagcagattacaatagtgacggatgaacattgtattttactttacatgatggatttttttgatgtgtaaggcttttaaggcatgtaaaaattcttaacttttaaaagatgctaacacgaatataaaattgcaatcattattcttgaatttcaatgtatcttatcataacatgttcactccgtagcaacgtacgggcatttacctagtatatatatatatacgcacgtggtgcagtcgaagttgagggtgagcgggaacggcagcggcgcgccgcactgcgcggggaggtcgcggatggcgtcggcgttgagcggctggtaattggccgccgcctgcttgacgcactcgcacgcctgccgccgctccgccgggccggacggcatggccctgatccgcttcacgccggcgcagcactcggcggccggggccgcctccttgcccgtcacgtagccgacgcaggggcgcaggcttgcgtccacgtccgcgcagttcacgtccgccctaaccgccgccgccgccagcaggaccaacgccactgctgccaccgctgttgttgcggcgccgcccttcttcttcatcatcgccatcgatcgatctgtgtctctctctctcccgaacttgacttgctgctgctggagctcgatcttagcttgttgctgctgcgttcatggagcggctcgagcgctggggtttta

SEQ ID NO: 37774 - DNA, 1271 bp, Zea Mays
attgccaagcatctgtctcaaagttactatggtttcaacagagctagaagtgtgctccttcatttgaaaaagcaagttaatgaacactatgccatctgtatttggccatagtaaatcgacagctactacttctggtaccattaaagggcaagataacgtttttgtaaggtcatactctgataggttgctgaagtgtgacctcactttggatatgctatcagaaaatgagaagataaagataaccgagagattggtaaagatccagaatgatggtacagtggaggtagatgtgacgcgcagtgctcttgttgcctcagaactctcggagattgatgcttttggttgtgtaccacacgatattgaagaagttacacctggaatcaccaaatcagtcccaaagctgaagattgctatacttgtagttggaacccgaggggatgtacagccttttatagcattagctaaacgactgcaggaattcggtcattatgttagattggcaactcatgtcaattttcgtacttttgtgaagtcagctggcattgatttttacccattgggtggtgatcctcgggttatggctcagtatatgacaaaaaacaaagggtttttcctggcggcaccgacagagattgccattcaaagaaagcagcttaaggaaatcatcttctcacttctacctgcatgcacagaacctgatttggatactggaacacctttcagagctcaggcaataatcgcgaatcctcctgcttatggtcatctacacatagcagaagcacttggagcacctctgcatatcttcttcacttttccatggacgccaactaatgaattcccacatccattggcacgaatgcctcaaagtgcaacttataggctatcgtatcttattctggatttaatagtttggtggggctccaggggattcataaatgatttcaggaagaaattaaatttgccccctattgcttacttcagcacataccatggatctatatcacacttacctactggatacatgtggagcccgcaacttatgccaaagccaaaagggcataaaatatttcttgtgcatatgcaaagctagagggatatactttacattgaacaaaagggaagtcatgtaccgtagttctctgttatcataattatacagttttctgcgtttatcaattttgttagatgaatataccttggtggcattcaaattaatttatgaatttcataattagcaaactgtgtccctgtgctagcataatcatgcttac

SEQ ID NO: 37775 - DNA, 1414 bp, Zea Mays
gggtactagactatgctgcctctctgccgtacgtctactctgcgtgcagactgttggccggcggcatcgtcgacgacagaccgcgcggcggcgattccgacccatccatggggcggccgccgtgctgcgacaaggagagcgtgaagaaggggccgtggacgcccgaggaggacctggtcctcgtctcttacgtccaggagcacggccccggcaactggcgcgcagtccccgccaacacagggctgctgcggtgcagcaagagctgccgcctccggtggaccaactacctccgcccgggcatccgccgcggcggcttctccgaccaggaggacaggctcatcgtccacctccaggcgctcctcggcaaccgctgggccgccatcgcctcctacctccccgaccgcaccgacaacgacgtcaagaactactggaacacgcacctcaagaagaagctcctcgctcagcagcagcagcagctgcgcgcctcgccgtcgccgcccaaggggcagtgggagctcaagctgcagaccgacatcaacctcgccaggcgcgccctgcgcgacgccctctccatcgacgccggcccgccagggatggccgtcgcgggctcggcggcgccggcgccgtccgccggcccagcagcgccacaacaagcgtacgctctcaccgcgcgcagcgtcgacaggatgatgctggacgggtgggcggcggcggctccagcggcagggaggaggagctgcgtcgtcggtggcaccgtcgtcatcccggccccggcgacgacgcccggcgcggccgagagcgcgtcgaggtcgtcgtcggagctaacgacggcggagtgttctgcctccatctccagcgcctccgatcagcgcgccgcgccggtggccgaccaccagctgctcgcgtccgaggagaataattatacggcgtcggccgtgcagcagggagaggtgccgctgtcggcgatcgagtcgtggctgctggaggacgccggcgccggcgagcagaagctggcgcacgatggccccctgctcgatgccgcgctgcatagttttggcttctagtaaaatgtcaaaatgtgttactagaaatcgagtgtggttaattatgccagtcggtgccactactagctagtccttttctgccctactaatttagctcactagctgttctacttgtcatccgtagtacacagatgacgatttgtgtcactgcatgaagcaatgtgcaagtgggtgatcgtgatatatatactacgtcgaaagtgaaatgtaacacgatccgtctgctcgttttgtcactgcatgaagcaatgtgcaagtgggtgtgtctttattgtagtttttgagaaacgagtcgttctattttgcgtttgtcaaacatatcacatcagagtcactcattcttttggttg

SEQ ID NO: 37776 - DNA, 1385 bp, Zea Mays
aagtcgttcggctcggcgcactgggtatagcagtagcagcactgccgcggttgattttcgagctgcggtgctggagaagtgaagagctcatgctgttctcccgttccccggctgccacaaatcagccactcgtcccttcccgccggacgctgctcctatcgccatgcccgcgagccggcgcgaccccggcaccggtggccgacgctgcgctcctaccgggcgggctgcgtgcggagtcgctgccgcggcacgtggctgtggtgatggacgggaactcgcggtgggcgcgcgcgcgcgggctgccgtccgcagccgggcacgaggccgggcgccgcgcgctggaggaggtggtgcggctctcccgcgcctggggcgtccgcacgctcaccgccttcgccttctcccacgagaactggagccggcccaaggtggaggtggaattcttgatggggcagtttgagcgagcgatccgcgaaagcgtagctgaatttttgagctttttgctctttacattttacagagaaggaattcggctacgcgtaatcggcgactcctcaaggctgccggtttctcttcagaggaccgcgagagaagccgaggaggccacgcggaacaactcgcagctcgacctgacactggcaatcagctacagcgggcggagggacatagtgcaggcgtgccggaccctagcccagaaggtgcgcgacaagctgctcgagccggaggacatcgacgagtcgctgttcgccggtgagctcgagacgagccacgccaacggcaacgagctcccttatcccgacctggtcatcagaaccagcggcgaactgcggctgagcaacttcctgctgtggcagtcggcgtacgcggagctcttcttcacggacacgctgtggcccgacttcggagaggccgattacctccaagcgctggtctcgttccagagcagagacaggcggttcggcgtaaggaaattgtagcggcgcagaggcagcgccatgtggaaggcgtgcttcaaactgtcaatagcaggaaagcgtcggtcaataaatcgtaacgcgagaccaagatgagtagatggagtattaaagtggtggtttgcatgcagcggtgagagtgagagtaatgtagcatatcaactcaagatggtaggtactacagctagagttcaagctcacagacagcagtcgtcgttgatgatggtggctagcagctatctgccgatggccacagatttattgttaaaaaccctttgctattgcaagagtacgtcaaatgccctttattaagtcgtgataaaataatcacttagaagatactacttccgttctcgaatatttgtcgctcgctagtttatttttaaactaaacgacgataaataaaaaaga

SEQ ID NO: 37777 - DNA, 519 bp, Zea Mays
cggccatggaggccgcaagcccgcaagcaatcaggagccggggagatgtggagacgccggcgacgaggcgaagaagaaggaggcggcgcttgcatcaagcaggctcctcgacccggcgttcaagccctccaaactatcccaggaccggctcgacaagtttaaggaattacacaagaaacggttacagataactgaaaagccgaagtataaaagaaaactgaaaggaaccgctgggagaagtaccaaagtaaccagtgattacaaattcactaatacggatgcatctgctgatagttctccaagagatgtacatcatacgtcatcaattacaggaatccaagggccgaattgtctcctcccccggagccctttgagtcacaaacaaaccccaaagcaaaaagtgaagatgaaattattaagatggccgaagctattatggacaaagttgtacctcaactgctaaacgaagctgcggaagtagttctgaaagaagactagctattgttgtaaaaacattcg

SEQ ID NO: 37778 - DNA, 1444 bp, Zea Mays
ccccaccactcagtagcacgcagcgtgcgggcaacaccacaccaccacccacggccaccaggcagcagcccaccgccgtgtcctagcttcgtaacgacacaaccggccgggttatccctatcgccagcaagccgccaccaaaaacaacacgcccggacggaaaggtccgccacggacacagcgacacgcacgtctccctcccctagtcccctcttcgccgtccgggtcgggtgtttgcgaagcgagacaagccaccggtcgccgcgcgactagggtttggttgcgatggagccggcctcctcgtccgcgcttccttctcctcctccggccgaggcgaggcggacgccgccggaggagctgaagctgcggcggaggacgcttgagacggtgctggagcagtgccagcgcgcgctcgagatgatgcatgaggacggtctggggacggctgcggagggggcaagcttcaaggaggtggaggtggaggaggaggaggaggaggaggagggcagcggcgacagcggcggggtcgagagggcgccgcccccaccgccctcggaggccgactacgaggcggacgagctatgcaatcttctgaaatcaagggttcaatcgcctgaatttctcgagaagctagatactcttcagaagtcagtatatcaacatggtgcagtggatgaaacagtatcatgggatattataagtgcggcagatatatgggatgataagagtatgaacgttagtgatgattcagaggacggatatgttcttgttaagcaagaggacatagtcgatggtattgcatgcttcatggctgcatacttgctgtcgctgaaacaaactaaggacctgacacccaaccaacttcaacaagctcttagcaagacattttcagctaaaaagaggaaaagcaaactgcagaaggcatgggatggaacgaaagttgtttataatatagcatcatggagcgcgacggctattggaatcctgcgattgtgcaagcagcaactgcagccttctggacatcctgtcgtgtaatatccaagtttctgtgactagtcatggctggacctggacggtgcaaatatgcaaacattgtgtggctgtggcctctccgtttctaaagatcaaccgaagatgaaaaaagttgccaaactccgtggcgtgcttagattatgatgtaaataggctgcaagttcgttgattgatttaacagcgacatcagttactggtgatgagcaatatggggctgttcgacagtatctcacccatataatctaaaggtatgaatggacacaccaccatctatttgccaataccagctgtatccgacaatcaagaaccgatgtacataagccctcccgcgcaacattggtatatcagtgtgattgtaaatatttcgattcatttgaataaattcgctcgcatgtgtttcaccccttcgcag

SEQ ID NO: 37779 - DNA, 1443 bp, Zea Mays
gaacacagtaatttcacatgaattgctagatgccgtttggtcactgggcccgaggctcggtcgctcggaggtgccagctgctgcttggtcactgggcccgaggctcggtcgctcgcggttcgagacgaaatccggctgcgagtgctccaaaccggttggctccgctgcttccgcccggcctgcggccgttgccggaggcgcccgcagcatatcataagttcctttcttccgccgcaagaagcccagccaccgccacctgttcggcttccttgatataaccgtccatctcgattcgatccgcctcgtcactcacgaacgcacgaattcaccaaccaaactccactgtctccaactctccatcgcgtctgctacgcctctcctgcaggacgaccaatggcttccaggaagttcttcgtgggtggcaactggaaatgcaacggtactggcgaggacgtgaagaagatcgtcaccgtgctcaaccaagccgaggtgccctctgaagacgtcgtcgaggtggtggtgagtccgcctttcgtttttctgcagcaggtcaaggggctgctgcggctggacttcgccgtcgcagcgcagaactgctgggtgcgcaagggcggcgccttcaccggcgagatcagtgctgagatgctggtaaacctgcaggtgccctgggtcattttgggacattctgagcgcagagctctgttgggtgaatccagtgattttgttgctgataaagttgcatatgcactcactcaaggtctcaagaaaaaatatcagattggacaaatattgtgttggcatatgaaccagtttgggctattggtaccggcaaagttgcaactcctgctcaggctcaggaggttcatgatggtctgagaaagtggctccactccaatgttagccctgcagttgctgaattgacaaggataatttatggagggtctgtaaatggagctaactgcaaagaacttgcagctcaaccagatgttgatggattccttgttggtggagcctcattgaagcctgaattcgtggacatcatcaagtctgccactgtcaagtcttcatctgcctagtgttttgactttcaatgcacctggatgcttgtcgtactgaatgctgttgatcttttaaagctattgccattttaccatctcgttttggtattctagctccagtgcatcgtttgtatatcatcatctcctgcgtatgtgcacagagtagtcatttacctgaatcatccttgtgtaccctttggaactgcataattgaactgcgctattctagatctgtcctctcatggttacttcaatttatgaggtgttgcatcatgagtcaactcttcaaatttgatggaataattccatttatcatactagtattagttattgagtaataataaggtgatgatgcatcaacttattctatgatgcaaaccaaacc

SEQ ID NO: 37780 - DNA, 1662 bp, Zea Mays
aatttaattttagctaggcgtgtgatgcacgtgggaatgggatttgcggggagggggagaatgagaaagacagtgcggggagggggtaatgggaatggcagaacaacacagaatggcagccgggaagacagtgtgggaatgggaatggcagaacacggaatggcagcctaccccttaccgccttaataagtagtagagatatataccacaacatgtatttgatgtttatggaaatcttttttctttctatgaaacttatagacggtaccagcggcggctctaaccctgccgtatgacaatggagcaatgcagtaagcgccgaggagggcgagactcagaggggaaaacctgacagccgtcgaggaggagcaatggaggggcgagactgggagcaattgagccgctcgcgaggagcaatggagccgatccgttttgtggaacggatctaagaaaaccagtcgtaacaacgctcagtatacgaagaaagcgcgtttgagtaaaaaaaccaagacggaaggtgttgtaatactacaatcttaattgtcacgttcggaatactaattttcggaagcccagtaaaggcttgttcggttctaccccaatccatatggattgagggagtttcaatccctagtaaggtgtcgttcgtttctttcggaatggaggcatggaataattcgtagccggtttgtttctctaatttatataagttttgatcagctggaatgatttctagtccattcctggacaaatgagcaagacataggtcaaaatctctttcaatccgtattaatccccttcaattcatatagattgaaaataaccgaacaagctacaactacaatagaagttgcttggttcaaaaaaaaaactcgtctctctcggggtgctcacctgctcacacgtggttaatttctcgctttggttgcaggcaatgtcgtatccttcggcctcttcctctccccagtcatttagctgtagtgagatggatatcctttatcagtgtaaggaggttttgaagatccagaagtttcggcgtatggtgtcatatgctggattctactgcttcacttccctcattacttatgcttacacaagcaatacgacaagggctgggatgtcaagggctgaccagtattattcctcctaccctgctggtactgaactactaactgacactgcaaagctttacaaggctgcattgggcaattgttttgaagtagatgaatggggcccaatagagttctccatcatggcaaaacattttgaccggcaagggaaaccaccatatgcctaccatgctcaatatctggcacaccttctctcccatgggcagctcgatggaagcggttaaatgcaggatgtattgttggtaactgcatcaacgcaactagaatttcactatatcttgtataaaaatgttgcctttgctagaacaatgagttcagactgcaccagtttagaagttacagaactggcatcagaaacaagttctgaatttttttggtcattggctggtacgatatcagtgttgaatttgtgcgatcgccgaacaatttctgaaaaaaaacatgaccttgtcttgttggaacatttacactgtccttttattgttgaataaaccactgaatgttaatgcatgcattaattcggccgttgtgt

SEQ ID NO: 37781 - DNA, 1109 bp, Zea Mays
atggcctattgtaagcctctcattttactctacagctattcatcgttggggcctttcaatttccagaaccgcaggcagcaggataccgtagctcctctgcatggcggctaccggatacccaaatgccgccgcatggacacggccagccggaacacccgacaacccggaccagaacagccgcgtcgaggcggccctcgagacccccggccccgacccatcccaccaccacccccacccccacctcgcctcccggatccgcacccgatgggcagcctcggcggcgacgcggagccgcagggcgcgaggcggcggccgcggttcctgtgcctgcacgggttccgcaccagcggcgagatcatgcgcaagcaggtgctcgggaagtggcccgccgacgtcacggcgcgcctcgacctcgtcttcgccgacgcgccgttccccgccgagggcaagtccgacgtcgagggcatcttcgacccgccctactacgagtggtgccagttcgtcggcgaggatttcctcagctgcaggaacttggataggtgcttctcctacctcgaggagctgatggctagagaagggccgttcgacgggctgctgggcttctcccagggcgccggcctgtctgccgtgcttgcagggctccaggagcaggggctggccctcactggggttgctcaggtgaagtgcgtgatagttatagcgggggccaagatcagggcgccggcggcggtcgcgagggcgtttgacaccaagattacctgcccatcgcttcatttcattggtgaagaggactttgtgaaggttcacagcgaagagcttgtccgagcatttgcggacccacttgtcatacgtcatccccgaggccacactgttcctaagcttgacgagaagggtctccaaactatgctcacttaccttgacaagattgagagggagatatgggagcattcgtcaactgatgctgagatcgtgggctcaaattaaacattctgcagttatgaaaaattcacgaatttacagtatatgctcaacaatataaaaggttaatgggagtttcagttctatttctcaatttcccatcgctgggaacttttgctacttcgactccg

SEQ ID NO: 37782 - DNA, 2943 bp, Zea Mays
ggccacagcacctcgcaagcactcgcatcattccgcaggccacgccgggcgattcgccccgctacggctgccttgctcctccaatccgcgatcggggtacgtgatccaagcgcgatctcgcgggtcggcgcggaattgggagaggaattcaaacggtgtcggaagcgtgcggttccccggaagctcccagaacgttcggggcctccctgctccggtccgttatccggctacacaagacgacctaggatttctcaaggggttggcgcggtggatttgttgggcgcgcgcgcgagcggttggaatgggggcgccgcgccacctccttgacgtagcgatgctctgcgccttgttcgtctccgccgcgtccttcaccgacccccctgatgcgttaggacttttggggttatatcacacattggagtcgccgtggcaactttctggttggacattccagggcggtgacccatgtggtgagggtggtgggagtaaacactggcgaggcgtcttttgcaagggaccatccattgttgcaataaatattagtgggctcggagttggtggatggcttggcccagacctgctcaagtttcagtcattgaaaaagctggacatgagcttcaataacattgctggcgaaatcccgtccactttgcccccaaatgttgaatacttaaatctggcagccaacaagtttgaaggaaatataccatcatcattaccctggttgcgctccctgaaatatttgaactttagctacaataaactctctggagtaattggtgatgtttttgttaatatggatagcttagaaacgatggatctgtcattcaatgctttcaatagtgacctaccaagatcgtttagctcattgactagtcttcgctatctttatctacagcataacgagttcacaggatctgtgattttgttagcaggccttccattgtcatccctcaatattgaaaataatcacttcagtggctatgttcctggaacatttcagtccattcctgagctgaggagactaagattatttcacatcaaaactcatattttccattttacagtccctacagcgaatgaggtcttgtactcttggagttctctattgattggcagtgatacttcctctagtaatggcattacatctgaaagagttcccaaaataaaaagttggttcaaggcatctaaaaaacttctaactgcaaaacagtttccagctgcagacattctagcggctaccaaggacttcaatgaagaatgttttattggtgaaggtctcactggtcgagtttacagaggtgaattttctgatggccagctccttgctatcaagaggattgacatggtagatctgtcattgtcagaacaagatgaattaatggacatgctttggaatgtctccagattaaaacaccccaatatcagtgcgctcgtgggatattgtgtggagtttgaacattgtgcacttctatatgaatatgcagaaaatggctctcttgatgatattttgtttgcaccagccacaagatccatggctttgtcatggaaagctcggatgaagattgctcttggagttgcctatgctctggaatacatgcacttgacatattcccctccagttgcccatggaaacattaaagctagaaatattttgcttgatgctcagctcatgccctacctctgtgactgtgggttagccaagttaagccattttgttagcaccacgagaatgaaggattcagaagctatcatcagtgctaaaggctatgctgcccctgagcttagtgatcctggagcaaatgacatcaaagctgatatttacagttttggtgttattttgcttgtgcttttgactgggcaaaaggcttttgacagttcaagaaggcaaagtgatcagtttctagtagattgggcagctcctcatcttgatgatcttgattcattggaaagaattactgatccaagaataagtggctctatgccacctaaagctatctcttcattaggcattatcatcttgctttgcgtcaagcaatcaccagatctccgcccgcccatgacaatcataacggacaaattagtaaagcttgtcgaatcaacaggtcttcaaaagattagcacaacacgccacttggagattgatgctcaggatccctctttcataacaactcgaccttattttgagccgtcctctactgtcagtcagggtggaactgagagctgcatctcacggtgatgaatgcccgttcttcctctattcttctgggtcttatgctgccttatatagtcgatggcactccaagtatctcgagttctcaaccgtcgtcgcacctctttctgcatttcttatcatgccaattggtgatggtcaaagctgctgtgatgcaacgctctgactaccatggacgactggaatacaggtagacaccgccattgttatcaacggagaaaggactagaacaaaccccgccatcctgtcctggagaaactggttcaatcttggttagcggttacccgtacagttactactacttacgggagttctttgcccgtctatttgggacaagagtaacctgagctcgcgtggggatgatattttggatgctcttttctggtttgttcatatacgcagcaagcaagccttattagattgccacccatgtgcttgggataagaatgtcatggccatttgcttcaaatgctttaaagcctccatcaccatagaatgttgttcgtgtctctacaacttgatccaagattgtaactagtgggtagtagtgaaaataacatgcggaggagtcacaaagtttttttttgaaaaatcagattgtttgtactaggccacagagactgacagatggttgctacttctagtagggatatttttaatttttttgtcaaagtgttaaagcgaattctcgaacatatttgaggtggatg

SEQ ID NO: 37783 - DNA, 6394 bp, Zea Mays
cttggctagcgagtactaaccgaaaggatttggcgagtatagtagcaactcacaacgcctcgtccccctgcacggccgcatcttcctccctgcccatccccttcctctcgtaatcccggaaatccgcgggtccctcgcaatccccaaccgcgcgccgccgccgatctcgccgcgacccaggccctagcgcccgatccgtcgccgcgctggcctccccgcgctccgcaaaccctaggggttccgcgcgcgcgggagggatggaggcgctggtggggcgggcggtacggaaggcgttcccggggttcggcacctacgcgggcgtcgttgagtcgtacgaccccggcgcgggctacttccgcgtgctatacgaggacggcgactccgaggaggtcgacgccgacgagatggcccagattctcgtcggacccgcgatgccgcgcgcgcagcagcagcgcacctcgccgcaggatgccgcggggaggcgccccaagaagcgccgccgcgggaacgaggacgacccatccccgacctcgactccagacggcgtcgtgctggccgttgccgccgccgcgggcgaggagaccgagcccgcgacgcccgttatggaggcggtggcggagaagaagccgagggtcagcccgggaccagagtcgtccaggccgctgcggcggagcgcgcgccaggcgaaggcggccgagcacgcggccgagatggaggcggcggtggccgtcgcggctgccgcggaggccgaggaggaggctgctgctgctgcggcggcttcgacgccgcagcagtctgggaggaagcgaccccgcgcgattgggagtgggcggtaccgctcggtgtccagggacttggaggaggccgcccctaagaaaccgctgccaccgccacctaagccggagctgccaccatcgtcgcaggccccttctcactggagacatttgtggctgcgttgcggagcacctatgtcaacccgttgatcgactgggtgcatttcacgctgctgcgggctctcaagagtcatctggaggactcggccaatgaaggagacccgtcggcggtacactgcattaggaatcttaactgggagctgttagacctagcaacttggccaatctatcttgctgaatacttgctaactaggggctcagaattgaggtatggtatgaagcttacagatttaagtttgctgagtacagagtactataggcagcctgcaggggtaaaactcgagctgctgcgttcactctctgatgatgttctagagatcggggctatacggtcaaggttgtcagagtcagatggaaacgacgagggcttcagaagcactggtgtaagaagaaaaaagaggggcaggggctcttctgctaaggtggcagtgggttcttctcaatttccagaaggatctgctgaagtggatgatggaaacagcgatgaatgttatctttgtggcatggatggcaacttgttatgctgtgatggctgtccagctgcatttcattcgaaatgtgttggggtggtggaggatcttttgcctgaaggtgattggtattgtcctgaatgtttgatacggaaggatggatctagaaatattgcaaatccaatgagaggagcagagattctaggaactgatccacacggtcgactatacttcttcacttgcggctatcttttggtggttgactcatgtgatggttactcaccatgctattattatggtcagatcgatcttcatcatcttgttgcagttttgaactcatgtcatccttcgtacagctcaatggttaacacaatttcttcattttgtgatactgcaatcaagtcacccaatcttaacagtcgttaccagagtagcagggaatgtagtacatctgatgctgagatagactcaaaacatttatcattattgaagcaacctagtgatcatgatcagtttaaggtagaacaaagaagctcctttgaacacttgaattctggaaaaatttctacctcaaattctgatgatttggatcaagatttgtcacagcatagcattaaactaagatattcacttatgtctcgaagtggaattgttgctgaaggtgatttgaatcaaatacctgaaaatagatcctctagtgccaagaatgataactgcaattccccaaaagatattgtttattcacgtgctaatggttctcttgcaaagaaccagaaagattcaccacctaaagaaaaaccaagagattggcagctccattctgatcctgctaggtacataaactattacagtttcggtcaaatagcagcttcagctgctgaagagctaaaacacaagctgtctgaaaacaaggacgtgaaaaaacctgttcaggatgtactctcgttccatctgagaacaatatgtaaaaagtatgctaacttttttgcactaactgatcaaaagctttctgctgaactgcttaaagaaaaatgtggatggtgcaattcctgccaaattagtggtggcgttgattgcattttcagattaactgatattaagtacatggaaggccctaagccacatactcttgatctcggagcagaaaataatatggaaagtcatatcatccttgctatgtataacattttgtcagttgaagaacggttgaatggtttgctgagtggcccttggcaaaatccacaatatagcatttgttggcgcaatgcggttctcaaggcttcagatgtgtcatcacttaagcagcctcttctaatgttagagtccagtctgcgacgtgttgccattactacggaatggcagaaagcggcggactctgttgaagttgttggttctgcagctcatattttggtccgctcgtctaataagtctctaagtcatgtaagtgctactgctagaaagccagggagaaagccgtctcctaacggtgaacttaaagttgactctcgtgatgttggtgtttattggtggaggggtggaaaattatctcgccaagtgtttcattggaagaggttgcctcagtcattggtcaacaaagctgctcggcaagctggacgtaggagaattcccacgatttcatacacggatggttcacaatttgcgcggaggttcaaatacatagcctggcgagctgctgtggaaatggcagaaaatgcggcccagctcattttgcagattaaagaacttgaatggaatatcaagtggactgagatactgagcactctcccttctagccttatgaccaaagaaacccagaaaatagctaggcttttcaagaaagttataattcgcaggaaacgcattgaaggaacaaatgttgaatatctgcttgattttggaaagagggagaacattcctcctgttatttctaaacatggaacaaaacttgaggaatcctctagcgagaggaacaggtactggttgagtgaagttcatgtccctttgaatctgttgaaggcttatgaagccaaaacatttgctcgcttactgaaaaagaaagaaactgacgaactatctaagaagactaagaaattgtgtggctcaaaaccagaaatgccaagaaagacaggctttgattacctctttgaaaaagcagaaaaaagatccaccatgccttgtggtcattgtcacaaagaggtgattgcaagtgaagctgttaactgccaatattgtgcagctcttttccatagaaaacatttcaaggtccctagaggtgctacaaatgctgtttatgtttgtaataagtgcttagatgagaaggttctaaaggtggagtctcctcagaaaaagactgcaccaaagaagctgtctcccaaaaagaagcagaagaaacaaaagaaacaatcacgcaagattgagaccaggaggaatcagatagttctgaaatgcaaaacgaaaattggcaaaaagggtaagcgtggccggcccaggaagaacccaacggatctgtcaaagaatgaaccatcaaagatccatgaaagtgaaccatcaaatgtttccaaaaatgaaccagtgaaacgtatatcaaaacgattacatgataaatacatgaaaagtaactcaaatgtatccgagaatgcagctagctctagcaagaggaagaggactgtttcacagtattcatactggttgaatggcctccgatggtcacaaaatccacatgatgaacgagcaagaagtttcaggaaagaaagagtagtttttccatcagaagatgctgaaatttctgaagtcaacccagtatgctgcttgtgtgaaaaatgctataatgaagaggatatctatattgcctgtgaaaaatgtgaagactggttccatggggatatatattctgttaacattgagaatgtgaacaatctcattggtttcaagtgccatagatgccgccggagaagtctacctgtctgcccgtatgcagagactgtaacagttgtcaaaggccagtcagatgaggatcattgcatcaagcttgtagatcaatgtgttggcaagtttgtggaggatgaggatcccaattgtcccaaagatcttggtgctccgggtagtctgcaagagcttcatgatcatgaaattgagcaggggctcaatgttcatattactgagatagaattcagttacgataactgtctagaggagctgaatgatcatggctgttcgaaagagtttgatgctcatagcactgagaaagatctagaggacgataaaagtttgagaaaggtagacatccataatgagttgagggcgcttgacgatcttggctctgagaaagaacctggtgatcattgtaatccgaaagatctcaacagtcacatcaatctgaaagatcctggcaactgtagaagtgacaaagagatgaaggataataattgtctaaatgaactagatggagacaacaattggaaagcactcgacagctataacagttggaaactgctcgacagccataacagtcaagaggagcttgactgtactacaaatagcaagttttctcctaaagaaataccatgtcctatggaacttgacggttttagtagcctgaagcttgtcagtcataacatcttggaagaacttgataatcataactgtctaaaagagaacggtaatgaaaatagttctaaagagctggacaacaatggaagtccaaaagattcaggtgactgtctagcagatcacttcaacagcagtaggatatctggcaatgaggcactggtccttacacctgaaactgattcggtaaatgaatctcttggtttgcaatccaaggatgatcctgggaagtctgttcctactgagcatgagattgatcttcaggtggtggtgactttatagtgtactttggacagtcagaaaccttccagcctcagcatgagtcccattagttccactggtcatttcttgatgctgttctggttgataattttgttgaccttgcctcattgccgtaatctacaataaggaaaaaaagctattctttatttcctttgggaaatattctgatctgactagccaagcgatagaataattaactcttgaggttaagttatattattcttaatagggctgacatagggaatagttagggtttcaatgtttcatttcctttccaagcttcacattgcctgtcagaatatggagtcatgtcacccacgattatgcattgatttggatccctctaagtacaagtgactggtatttggctgccctgcagtaatatatgatgttcaagggagatagcagccacagccgccgcgaagcatgaggaggcaatatattccattccccattgtttcgttttgtgggccccttagatgttgcacaagatggatgtgccaaaacctgatgattcaatgattcattctttcaactttgctcctaacagtgagttgcaatctttatctgtaaaaaatgctccaagggaactcgtctggacagggttaattggattttgtataggtttgcgttatcagccttcctagttacagagttcactctagcatggaatcggtttggacaatgctgttttggtcctctggttacattccgcttcagcgttagattacgatcgattcttcgcggcattgcgcgcgttcttttgataaagagacgctcttctagtcgctccaaaaattctgtaattccatctcgtgtctggaatggtcggccatcgagaagaatggtagaagaacgagcgaggagccaaggaaggagacgagagtacctcagaaaactagttcctacgaaaactcctgtatagttggtgctttatagcatctccaacgacatgacataaaaatgtcctataatttaaaaaagtgtattttattgaatttagggcataaataaaacatcttgctccaacagaaaaccttaaatctagattgtagtgtagcatactggtgtagtatatttgag

SEQ ID NO: 37784 - DNA, 3407 bp, Zea Mays
caagtcgtctccctcccgtgtcttgtccactgtgcggcatccttcctggcaaaatcacctccgaggcacggcgttgcgtccacctgccgtgtacgcattcccggcgcggctccgttgcgttccagtcagtgcggcgacgccgccaacgtctcacatggcttgtcggatctcaagggattgcaaggtaatggtgataaaagcatggaatctgatagagtagtagacaacaacaatgaaatgtcaatgcaggatgaaataacccacggtactggctttctgtccgacagaattccaacatctaaacggaaggatgcctctgattgggtgaagaattttcaacttgttgaacgcaagtcagaaatgaaccaactcggtaactatattgctaaggcacgtgtctatggtttgcaaatactgtctgtgtgggggatagctggtgttgggaaatcagccctcgttaggaacatgtactttgacagaattcatcgaaatgaccaattatttgagaagtacggttgggttgatgtaacccacccattcaatttaagggacttctcccggagtttgcttttggatttccattcagaacctgttcaagccatgggaatcaaagaccctactcaagagtgtcataagattctagaagataaccggtgccttgttgttattgatgatttgcagtccattgaagaatgggacttaatacaagctgccttggtgtctagaccttctagaagtattatcattgtcattacaactgaagcaagtatcgccacatattgtgcagataatgaaggggtcgtatttaatgtcaaaggtctagaagacaaagcagccctcaagcttttcaaaaagcagccatggggcatatttggcattggaatccacaactcgtacaagaagagtggctggctctcaccatttctccaatttaccggaaatctcaaatttataactaagttgcatggtaaattatgcatggtacataggcaaaaaccatcatctcctataaaggactccatagatgaagagctacaagaacttattttgaagtgtggtggtcttccaaaagttatagttgccgtagctaactttttggcacctaaaacagtctcatggatggacagtgcaagttctatgaatctcaaatttatgcaagagctggagagcagcccagagtttgcttgcctgcagccactctttggttggctgcactcctactttcgaacatgcccggattttctcaagccatgtatcttctatctgtcaatttttcctcgagatcacagtatccggagaaggcgattggtgagacggtggattgcagagggctatgccagggacacggacaaaatttctgcagaggaaagaggggagcagttcttctgcaggctcctcgatctgagcataataatgcagaaaccatattcagtcaccaccggattcagagacagcagaatgactttgtgtcaagtcaacagttttgtccgagagtatatcatctctcgtcaaatggaagagaaccttgtatttgaactgggaggcagttgcaccctaacctctcagcgcatggggcgtcacctcatcatactgaaaagctgggacagagacagaattgtgtttgagagcattgacttctcaaggctacgatctttgacagtgtttggagaatggaagccattcttcatatctgataggatgaggttgcttcgggttctggatcttgaggatgcatctgatttaaaagatgaagacctcaaacaaatgatgaagctgctttgtcgcctcaagtatctttccctacgaggatgcactgggatctatagcctgccgaattcattaggttgcttgaggcagcttgagactctggatgtcagacatacagccatagcaaccatgccaaggactatcaccaagctaaagaagttgcagtacctccgcgctagtaccaccaaaccaactaaggaacaaccaacacccgatactgctgttacacccaaaccaacaaagaaacaaccaaatccacacacctcggtatcatggacgtcatccttgttccacagacatcgacaactagagggtgttgtggttcctactgggctagagaaattgactgcattgctcaccatcggtgttgttaatgtcaattctgctcgggggaggtccatcttgaaagaggtcaggaagctcacccaattgcgcaagcttggagtgtctggaataagtaggaacaacagcaaagatttctgtttggccatctcaagtcgtgcgcatttagactccttatcagttaagctcaagaaggacaatcaggactgcttgtgtgtcaccccagatggctaccttccccccaagaacctacagagctttaaattgtatggccttgcagacagttttccaaaatggatcaatcaacttgaaaatctcaggaagttagttttggagatgactatattaacgcaagatactatcaagggactcaaggatcttaaagtatgtattctgcgtctaattaccaagcagcttcctgatggtaagctcaatttttgtgtcatgttgcatgggcagcaattacgttgctatgaaacagtgaagatactcgagatctcttgcagctccagcttagatgtggcttttggatcacaatcactgcaaaatcttgagctgctgaaagtttcctgctgtagtggttcagggtcggtaatgaagctctctgggctagaaaaactgtctgaatctgaactcaaggaagtccagattaagggttccgatgatttcatagtaaaaacagatgtggaggaacaacttgccaggcacccaaagaaacctgttttgaaggttgaaaaggtactgtcgtccactggggattttgagctctagagtgtcagtttcctatcgttacgatatcaaggattagtgactggtgctgtttgcttcctcttatttcttcagtgctattcgatccaatctaaccgattagaaagatcagttatgcagccatcgtgccaataataaactgtgaaacctgaaagcttccttcttggccacatattgatcagtctatttttcttgtgcctgtggtttatttattcctactgcatagtcccagtctggatttgttctaaaagatatggatggtgtgcaaatgtgtttatgtatatagagaatgttggaccagtgaattgctattgtacttttctgttgctctcatgtattgtagtttcgtggtgtatcttgctacatccatgttctcttgtggttgtttgtgtgtacatttgttttgaatggtttttgcgatgttactgttggtgcctttttggggacgccaatcactgcgtgagaaccggcggcggtgccctctgcagaggctcggatggtccgtagccaggggccggacggtccgcgac

SEQ ID NO: 37785 - DNA, 578 bp, Zea Mays
gccggggcctatcttcttccctgcgttctcggtaacagacgcggcgccagtagataaatgaagaccctgcgcttccgccattaacgcagtgaggaaaaaaaatccagttcgccgccatcgctggaaccgagagccaacgccaaatcgaggggagaactgtgagcagagagtaccaccaacgtcgccctcggcctcagcttgcagtcggggttccacagggggtctgggggcttcaatacgttgcttggggggcgctcgtggccggagaaggagggaatgaccgttggggcggccagaatttcatcaccgggcacaagatccatcgcgcgccgtgtgtggagttcgtagcgatttgaatcactgtgagtaaccctcgacgaagcctggacgtgattcgctttatgtttccgcgtttggatcggattcggtcgggaatcggggcttggggaacctcccggccatggtgccgccgtcggtgaccgcatccctccctggagtgcgtcggcgtgtgacccatcggtggcgatgatgtgttgaccgtcgatctcgggttggtcggccacgattagatgggagcg

SEQ ID NO: 37786 - DNA, 2515 bp, Zea Mays
atgccggtctctgcggacgggaacgcgggagtctgttgcgcaagacacagagtgcacgcgcttcgctcgcgtcggggatttggctgggaagaaggctctggtgtgtggaccccgatcgtcagcaaaaagcacccaacacagcacaggcggagagagaaacgaaagcgagggcaaagaagcaggaacaagttccctactaaaggacagactgttgttgtcgatgaggttaaccttattggtgagcccactcagcctgagggcgtacattcccggtttgcaagctcgataagagcaacagtaagggacattctggattgctcaataccgacttggtcccttgttctcgttggtgagaagagaaaaatatggaagaagttgttggaggcatttggtctccctcgtgatcctggagacctagtcgagaagtttgcaatgaaacaggcagcgaaaactttcaagacgttggagcagccatggaggcagcaatacagtcactttctcaaaagaaaatgcaaggagaatttataccgagacgagaggttctacgcggcggaggtggtggcggcgctggagtacatccacatgatggacatcgtgtaccgcgacctcaagccggagaacgtcctcgtccgcgccgacggccacatcatgctcaccgacttcgacctctccctcaagtgcgaccccacggctccaactctggcgcacgtcatctccgacccgctctccctcgccgcccgctccggcgccgccgcgtcctgcgccatctcctcctgcatcgtccccgccgcctcctgcttccagctcttccctggccgcggccgccggcgtcgatgctggcgcaccaagaagctatcgtcgaacagcggcaacaatttcgcctccagcggcggcggcggcggcagtagcggcagcgggctggagctggagtttgtggcggagccggtggagctgcgatcgatgtcgttcgtgggcacgcacgagtacctggcgccggagatcgtgtctaggcaagggcacggcaactcggtggactggtggacgctgggcgtcttcgtcttcgaactcctctacggggtcacgccgttcaagggctacgacaacgagatgacgctggccaacatcgtggcgcgcgctcaagttccccaaggacccgacggtcttgtctgccgccagggacctcgtcactgcgctcctcgccaaggaccccgctcgacacctcggcgccaccgttggcgtcgccgcaatcaagcgccaccctttcttcgccggcgtcaactgggcgctcctccgctgcgccgcgccgccctacgtgccgccaccgttcagcgtcgtcgccaacgccaaggctggcggtcggagcaacggcaacgcagttgtggacgacgacgacgacgacgtgtcggacgacagttgtcccggcacgcccgtggagtattactagaaagaagaagccaaggagaagaagcgtcgaccgtgtccgtccggcgtcgtacgtgcgacgcgcacaagaaagaagccgctggtcggttggttccgtcgtgtcgccggagcggggtgggccccaatcaggcacctcctcttgtccgagtccggcgggggcaggcacgtgcacgtggtgggggcatggatggaccacggcgcatggcgcgcacgaggcggccggccggccagaggaggcaggggtgcgctgtcgcctcaggcttagtttggatactctagtaatgagtgggattagagtggattgacatgtattgagcgggtatttgatctattggggatttataccctcttcaatccctccaaaacactctaatcccaaagtatccaaactaggcctcaagtggctgccggctgcgtgtctccggctccgagagagctcgagctcgcgtccggggattttaccaataacctaatgctgtttcttgttgctgcatggctgcaacacgcatgtcattagcatggcacctgcctgccttggtcagtaccaccctgtccctgtagttcttgttctaatataaatagtactacctccgttctcgaatatttatcgctcgctagttcatttttgaactaaacggtgacaaataaaaaagaacggagggagtagtatatatgatgttattattagggggttctgcttggaatgcaggaaatgtaagaggtgaacatcttgtgttccaagcaggacctccatcagaatttgtatcatgttggaatcagtcaattgttgtattatgttcatcgtgagtactagtacttgctagcactagcaagatggtagtgcaactgtgcaagctactgttttttttttttgggagagagagaaggatagaatccaaactgttcttggtgttagaacggtaggggatggagacatcagacgacatgagacatgggcatgctaattgtaacacccaaaattcctatgatggtaggtttgaagaattctccaacaaaaacaagtaaaaatgtcttataataagaattttctctacttttgaaattactcttc

SEQ ID NO: 37787 - DNA, 983 bp, Zea Mays
tggaaagctgttaagaaggctctaaggtgctgtcgcaaggagggactccactcagatcacaaggaggatgagggcaaggaaagacggccggcgctacgaccatcgccgccaccgcgctcaactctaatcaagaaggattggtattatctttctaaaactctatccgaacgtgaagcttttgcttttgcagcaaaatcggggctggatgttgtaactatttgcccgtccttggtatttggacccttgatgcagtctatagtaaatacgagcagtaaagtactccttaattatttcaaaggagatcgtgagactgttgaaaacagactcagaaatatggtggatgttcgtgatgttgctgatgctcttgttctggcttacgaaaatccagaagcatctggacgatacatctgcagctcacatccattaaaagtttctgatatgataaacatattgaagaccttatatccatcttacccttatcctaaaaactttgtggaaacggatggcaacatcacctgcagttctgagaaacttcagaagctagggtggaccttcagggctatagaggaaaccctgcgtgatagtgttgaatcctacaaagcatttggcatccttaactgagcatccgactgggacagtgagacagcagttccaacagtccaatccctatctcgttcatataaaccgtgaaacagaacatgctgttcatgtaaatttgcaataaaaatttgggaaatttgtagccctctactgaacacttgatcccagcaagaggcttgcaaggttgtgttgtctggtctgaaaaatatgctattctgaggctgtttggcactgctctactctttatttttcaactctgctccattcttgatttatcaaacatcctcaacttcaggatctctacaaaaaatatggagttaggacaaactccaaagaggtgctatcaaaattctgtacaatatgctcttggagcgggcgaattt

SEQ ID NO: 37788 - DNA, 3224 bp, Zea Mays
ctaatttctctgtttgttggggctgctgtgacagtgatgtatgtatgcatcgagcccgttgttaattatccatccggatgcaatcaatcaagcggagaaggacctgggcattggccactgccaacccgccacaagtgacggccgtcatgccgacatgccgtggccggtccaccactaccttcccgacgggccgcattggattcctcccgtcctcctcccgtctcgccatcgcttcctgttcctcttcttccgccgccgccgtacgatcacactagcaccgccagccgcaaggtcccatggacctcgacccggcctatcccccatcagcctgcgccgacgcctggccctttgactcgctcaccacgtccctgctcttctccccgcagctcacgccgataccggccaactcatccttctcctggctcaccccacactcgccgctctggctcttcgaggaccgccacctgctcccgctcgacgcgcccgccgtcttcgaagaggtccagcggccacgctccgggaattctcacacttcaagcaagccagctgaacagatcagtcacagatggcagtttcatctgtccctggacgaagatggcacagacaactccagcttgttcaaggagaagctgacacacgctcttcgctacttcaaggagtccacagatcaacatctgctggtccaagtctgggcaccagtcaagaatggagaccgctatgtgctcactacttcaggacagcctttcgtgcttgaccaccagagcattggcctacttcagtacagggctgtatccatgacctacatgttttcagttgatgcggaaaatgttggagacctgggcctacctgggcgtgtctataagcaaaaggtgcccgagtggacaccgaatgtgcagtactatagcagtgataaactatgcctgcgaggtcgataaagtctgcaaagcacttgaggcggtaaatcttaaaagcactgaaatacatgaccatccaaatgtccagatatgcaatgaaggccgtcaagctgcgctggtcgaaatactggagatcttgaccgtagtatgtgaagagcacaagcttcctttggcacagacctgggttccttgcaagtatagaagtgtcttggcgcatggtggtggtttaaaaaagagctgcttaagttttgatggaagttgcatgggggaggtctgcatgtcaactagtgatgtggcgtttcatgtgattgatgctcatatgtgggggtttagagatgcctgtgtcgagcatcacctacagaggggacaaggagttcctggaaaggcgtttatctcacacaaaccttgcttttcaaaagatatccgcaagttctgtaagttggcatatccccttgtacactatgctcgcatgtttgggttggctggctgctttgcaatatgcttgcaaagttcttatactggaaatgatgactacatattagagtttttcttgccgcccgattgtagtgacgaagatgaccaaaatgccttactggagtctgtattaactctgatgaagaggtgtcttcggagcctaaaggtagttggtgacagagatttgagtggggtctctcttcaccttagcaatgtgctaaaacttgagaatgaagaattcaagacagatgcacagtttgataactctgatggttccctttgccaatcacctaacggtgatagacatggaggatcccatgagtttgatggtgggaacaagaaggttttggatgtgccagagggacaattgttgactgatgacttctctcaaggcaatggtacttctgctggcagaccaaatggtagcggtgcttctgattcttctgtgcttcacaaaaccaacaaaccccctgaaaggaaacgtgggaaagccgaaaagactatcagtttagaggttcttcagcaatatttttctggaagcttgaagaacgcagctaaaagccttggtgtttgtcctacaactatgaagcgcatttgccggcagcatgggatttctcgttggccatctcgaaaaatcaataaggtcaaccgatctctctcgaaactaaagcaggtaatcgagtctgttcaaggctccgatgcggcatttaatctcacatctatcacaggtcctctccctattcctgttggcccttcattggattctctcaatgtagagaaattaactcaaagtaaagtggcagaactttcaaatatcgctgttgatggtgacagagattctttgcaaaagtcacttggaaatgatggccattttggtatagtcatgccccagcaaggatctacagaccataacaatgacacacagcttgaagctgacaaggcgtctcactcgagaagttcgtctggagaaggcagcataaattcacgcacttcggaaggctcatgccagagaagtccagcgaaccagacatttgtttgcaagccaattgcttcaacattcgcagaacctcaacttaatccagaggagttcaataaagagcctttccaagaaccacaactaccactttccaggatgctcattgaagattctggtagctccaaagatttgaagaatctcttcacttcaacatctgaccaaccatttttggcccctcccaataatttggtgccaatgaagcattcagggtctgtaacgataaaggcgagttttaaagaagatattgtgaggttccgtttctcatgctcaggcagtgttattgtattgaaagaggaggtagcgaaaaggctaaggatggatgttggcacgtttgatatcaagtatctagatgatgaccatgaatgggtaaagttgacgtgtaattcagacttggaagaatgcatggagatctcacggctttcgggtagccatgtcatcaggttatctgttagcgatattgcgacacactttggcagttcttgtggaagctccggttgatatgcctgtcagccttttgctctgatcaatgggtactcgaaagtgcttgtaccatgagttcagttccacttgaagagttgtacttttgttgctagttagcattactgcattagcgggagcattagttgcttcattgtgtttgataaatgtatcattgtatttttccgcaaaatgcatgtaattgtgcagaatgcacttgtagtcaactttgtatatgttatgtgcaagaaattctatttcaagttataaactagataattgttgtctagagtttgcacagtatattgcattggaaatgaagc

SEQ ID NO: 37789 - DNA, 354 bp, Zea Mays
tgtcgcttcctcacctaaaaacaacggagggataaaccctgagtatggaattactcagcaagtcttacccgactaaggaaaagactctcaagggtatgctggataaatagggatcaaggagaggctttagcaagaatcaacttagatacttttgcagaaataacttactagagtgagtccttactttcaatattttaacgccaaattaaatatcaatagactctgtttgcctctagtctaatttcatcatctcatcaatacaacatcatttttattcatgaagttcacatcctgacttaggttgtaggtcagtgatcaagtctccactctccggggatataacggcgatccgaa

SEQ ID NO: 37790 - DNA, 2042 bp, Zea Mays
catgagttcatcgtctggaggttagattccatcctcagcgttctgatattcttgctagtggaagtttggattgtgaagttcgtctctgggatgctaaaacatctcgctgcacagcagaactggtcttctgccagttgcatcaattgcatttcatgcaactggggagcttctggcagttgcatcaggtcacaaattgtttttatgggactgcaataaacgatgggaaactttggaacttccaatcatactagaaacccgccgttcactgagagctgtgcagtttcacccccatggtgccccatatctacttacaggagaggttcacaaccttgattctgaagattcaacgatgacccctgcacttctgagcaattattccttcagagacacacctctccttggtggttctggggtagataacttgattagtgaactacaatacatgcagaattttgagcaggttggtgcctcatcatcagttccagtcactactggcagttttgatgggtcaaggctacatgatacctctggccatcatctgatgacctctttacctagtgttgggaggccccttctgggtactcatgctgctgaagctcctgccatctcattaagtgtcgggtcagaacaaactacgtctctgcttggtggtggcaccgaattaccttgtacggtgaagctaagaatatggcgccacgaaatgaagaatccatttatcacattagggcctgaggcatgcctcttgacaattcctcatgctgtactttgcagcgaaatgggtacccatgtttcaccctgtgggcgatttttggttgcttgtgttgcatgtgtgctgccacacagttatggtggccatggaagtcagttgcatgaacattatgactctactggggctggaacatcaccaactcgccaagcatttccgtctcgccaaattatatatgagcttcgggtttattctcttgaggacgcaacatttggaacagttcttgcaactagagcaataaaggctgctcactgtttaacttccatccagttttcacccacatcagaacacatactattggcatatggtcggcaacatagttcactgttgaggaccattttgatcaatggggagaccagagttcctgtgtacacagtcttggaggtgtatcgagtttcagacatggagcttgtaagagttcttcctagtgtaggagaggaagtcaatgttgcatgttttcatccttcccctggatcaggtcttgtttatgggactaagcaagggaaggttaggtttcttcggcaccatggtgcatcattcacttgctggggagaacgttcatgagatttagaggcatgtgctacaaatgcagttctggacataataactgaatttgagcatcgcattcttgtgctgctgaatcttatcttgattatggcttcggcaacatcctggaagaggaatttatggtcaactgagatcatctccaagaccgagagggctaacagaaaacatcagatttcagcatccaattactcttgactaacgttccactctttgcaaaaccattgtgccggcaaggagggctactattttaggtccggttaacgtgtgtaagtagccccgtctatgagaaaatggacaaggaatcgcagcctcattcagcatgaattaccaacgatggttgactactactagtacaaggagacctcaagggatacggtcgcctgtacgaatatggatgcgagccatatactgacggccggcctcccaaagatgcgatgtgttccttagttcgatgattttttttttgaaactgtatagaagcctgcgaagaaatgtagtggttggctgagtgaagtgagggaagggataggcattatttcccttgggtgacattgaccctgtttggatcagattctagccgcgagaatctgattttcgtaataaaaaaatcgaaatcgaagtggtttacggtctatttgttttggccgaataattctttccatttggcattaaatcgccaaaaaccaagaaaaaaagcatggtcctaaat

SEQ ID NO: 37791 - DNA, 343 bp, Zea Mays
gaaagacaaggaccaaagctgagtcgaccacaagatgtcgctgcgcgtaagcttctccacaagatgatgctgatggacgaacctgaagatggatggatggagcaagtatcggaacaaaagctgatcgccaagtggacgtcatctaacaaacactaacgtagtgtttatttcaggcaagccgtactgcatcatcccttgtgttttaaaatctttatcaccttatatgatgcattaggtgataggagttgtgtgctaaacaattgatgcatttccttccttggaaatttgatcaccattccttgactcccttttataaaaaggatttttatgatgcttagccttg

SEQ ID NO: 37792 - DNA, 2883 bp, Zea Mays
gaaccagctaaccaaacagaccgcactctgctcgctcggcgttgtctgatctctcctcgcgcccgtcctccgctgcccgactccggcgtcctccccaccgacccatccacagctcaagccaacattcacccgtatcccgcgcgcgcttgattcgccgcatctgagcgtcacggccgcgactgcgcgccctgcgtcgcctcccgccgccgccgcacggccgcgacggatgctcggccaccgcttccccgccgcgctcggcctcccgcgcggtctgctgctggggaggagcgtcacccgccgcagtctgtccgccatggccggtggcgaggcggagggcccgctcgggggtttcttcgattacatggagcggctgcgcaactacgagcgctcgggcgtgccgcgcggcgccggcaccgactccgacgacggattcgacctcgggcgcatgcgccgactccttcgtcggctcggcgatccccacaccgacttcccggctgtgcatatcgccggcaccaaggggaaaggttctactgctgcattgctgtccaatatcatgagggcgcaaggctacaatgtgggaagttattctagtccacatcttctaacaatacgtgaacggatttctgttggaaatgatggaggccctgttccagtacgactgttgagtgatctttttgatggggctaaggaagctattgatgaagcaatagaattggaaaatggatccctaacgcattttgaggtttttactgctctctcatttcttctattctcacaagaaaatgttgacattgccatcattgaagtaagttacagaacatctgttactgccctttatgacctctcagattttgtgctcattgctgttaaatgtcaagactgaaataggaagtaatgcaatcgatatcactgattttaaagaagtcttgaaagcaaagggtcttgcttttcaaaattgaattacattctcaacatcatctgttcaattcagtcgtaaaaatgatatcaccagtttttgcttttatctatttattttctaggcaggtcttggtggagctagggatgcaacaaatgttattcggagtactgaattagcagcatccgtcataacaacagtagggagggaacatctggttgcattgggtggctccctgcaaagcatagcaatagcaaagtctggaatcattaaacaaggacaaccagttgtgattggtggaccattttcagcagttattgagcaaattattcgtgacagggcattcttgacacaatctcctgtgatatctgcttgtgatcctggcatcaagagctttacgaaatgcatagattgggataatggtaagccgtatcaacgctgttacttcagcataaatatttcaaatgatgtacccttgtccattgaaatgcatgacataaacctccaactgctgggagatcatcagcgtcagaatgctgtcacagctgcttgcacggctctctgtctccgtagtctagttaaggatgggaaatctctgatgcttctatccaagctggcttgagggagacccaacttcctgggaggagccagtttctcacagcagaggaagcctcggttcttgggctggatggtgcatctactgtactaatcgatggagcccatactgaggaatctgcaaaggccttatcaggcgtgatagaagctgtcagaccagaagggcctctagcgcttgttgtcggaatggctagtgacaaggagcatcttgcgtttgctgagcagcttctctcaggtcaaaccccagatgtcgtgctactgacagaggcgagcatcgccggaggaagctcccgtgcaatgccagcctcatccctgaaagaagtatggattgccgcggcacgccatcgtggcatcgagtacgtggacatcggtggcatcagtggcactgaaaccctggagcacatcgccgatctgttgggcagtccttcgctgagttccagaaggaagcccatggtgatcgggtgccaagacatggggccgttctcctggaacctgatcattgctgcctcccagctccttgagagcagaggcagggccccaggcctcatctgcgtgaccggctccctgcatctcgtcggggccatactgcaaaagctgggacggcattagaggcgccaaccatctcatctttcatagtaccatatactagactggaagagagtggaagctacactggactcgtagtggtgtaccggcgagatggatcattcgtgtggtgtacattgcgggactgtttggatggaatctaccaaaatgcctgggccaggcatccatcccaggcgcccgattttgaacatttgggccaggacccaggatgcatttgactgaggcagggctcccatccaaacggacggcaggcaagcaaggcatctgtgctgatgggatattgggatcacgtcctgcgttgctgccaacttgttcgtggctctttctaagctgacaataatagattgtaaataggctgattatctgtactcctacaaaacacaccagtttttctggtttataccttcgtgaggtatattcctctacccctctcggctcggctaactagtgtataggtgtacatttgggccgggtttgatgggtcggcctggagcacggaaaaaagagcacggcctaggcacggcacgactcgaaatattttagtgttgggccagcacggcctgatatatcgggctgagtttgggccgaggtcacgacatatttaaggcaggcacgaaatgactcatatagagacacgaaaaggcttatatatttattaaaaccacacttcattccatactttcatgtactttataaaaacacaaatctagagataattctagttagatgttttttgtagctttgaa

SEQ ID NO: 37793 - DNA, 320 bp, Zea Mays
atcactagttgcataattcatacttgtgcaattttcatgctgcctcttgttatgataagaaaatgccaggtgacatctagactacaggtatcaagatttatctttcaattagtatgacaatattcatttgatatcttggacctatgtcaaaattataccaacaagagcttgcaaaagaattgtaaatccaacacaagtttggaactccccttgaaaaggtaaaatgcaaaggtacatcacttcatgtcacttatccattgcctttgtgccatctaaggaccctcttcatgatagtgtgttcaaatcttgcttaatcacaa

SEQ ID NO: 37794 - DNA, 2238 bp, Zea Mays
ccttcaagacgaaaaggagaggaaaaagatacggaccgagaaggagagcgcaacggaaagcaacccaagaatttcctagctgaagtcccaccgcttctcgatcagccgggcgccatgggcctctgcctgggcaagtcggcagcggtccaggagccggcggtggcggaagacaacagcgtagccgatggcgcggcggcgggctgcggcgatgggccgcccgtgaaggcgcctcggacgcccaagcagcccaagttctccttctacctgccgagcccgctccagccctccagctacaagggctcgccggccaactccagcgccgcgtccacgccggcgcgcggcgggttcaagcgcccattcccgccgccgtcgcctgccaagcacatccgtgcgctgctggcgcggcgccacggctcggtcaagcctaacgaggcgtccatccccgaaggcggcgagctggacctggggctggacaagagcttcggctactccaggcacttcgcggccaagtacgaccttggccgggaggtggggcgcggccactttggcttcacctgcgctgccaagtgcaagaagggcgagctcaagggggaggacgtcgccgtcaaggtccttcccaaggccaagatgactactgctattgccattgaagatgtcagacgagaagtcagaatattgagttctttggcaggccacattaacctagtgcaattttatgatgcttttgaggatgaagaaaatgtatatgttgttatggaattatgcaaaggaggtgaactgctggacagaattttggctagaggtggcaaatattctgagggcgatgctaaggttattattcaccaaattctaagtgttgcttcattttgtcatcttcagggtgttgttcaccgggatctgaaaccagagaattttcttttcatgtcaaaggatgagaattctgccttgaaagtcatagactttggtttgtctgactttgttaaaccagatgacagacttaatgacattgttggaagtgcatattatgttgctcctgaagttctccatcgatcttatggcacagaggctgatatgtggagcattggagtaattgcatatattttgctttgtggaagccgccctttctgggcacgaactgagtcaggaatttttcgagctgtcctaaaagcagagcctagttttgatgaaattccatggcctaccctttctgctgaggcgaaagactttgtaagaaggctactcaataaggattaccgtaagcggatgactgctgcacaagccctctgccatccatggatccgtggcacacaggaagttaagattaatctagacatgataatctacaggcttatgagggcttacataagttcatcttctctacggaaatctgcattgagggctcttgcaaaggcactgacgacagatcaactcttctacctaagagagcagtttacattattaggtccaaacaagagtggccatatatcattgcaaaatatgaagacggccttgattaaaaattcctcgggtgcaatgaatgattctaggattcttgactttgttaactcaatatgcaatatccaatatggcatgattgattttgaagagttctctgctgcggccattagtgtatatcaaatggagggcctggagacctgggaagaacatgctcaacaagcatatgaattgtttgacaaggagggcaaccgaccaattgtgattgaagaacttgcatcggaacttggacttggcccttcgatctcacttcatgttgttctcaaagattggatcagacattcagatggaaacctcagtttcctcgggttcataaaactactgcatggagtttcttcacgcgcaatcaccaaagtataagataaccatttgcatcgagcaatccctgatctctggctagtgcatgccatggctggttgtagaagttgcatgaaaccaatacaaagattaacagatcatcttagcgcaataggtactctcagtaggtgtatatttgccctgcttttcgcaacatggatcgacattgtcctcaagatgttgagaggaatgtacagatttgatttgggaagaatggaaaccctgaaggatttgaggctgttattttgtttgttagttccagtaatgcaggcattgccttcatttgtgttgtgcacctatgccgcttaatgctccatttacatatgctattgttgcatttattatataaatattctagaatgagag

SEQ ID NO: 37795 - DNA, 683 bp, Zea Mays
atcctttcacccttcagcccgcgtgccctctgtttctctcccggttcttcccctctcttgcgacgacagggttgggtaacgccgctcgccgccgccgccgccatacgcaggtgccgaggccttcgtcgatctcttagccgtcgacaagcacccaagagatgcaggatagaatgagacggcaggggcaatatggtgaagcggatattaactctatggttgctgcccagttgcatcactaccaggcacagcaaagggtacagaaacaccctgagaatagctacactggaagagatcctgcacaagcttctgcggagcatcagtacactccccctaaagcaagacagagtcaatgggatcgaggtggaccaaatgcgccaagccaggttccatcatatgcatataacgaagcccaaggtgctggaggtgcgcaatccttttatgatgggcagagatctgatacaaaggttggtctagaaaagcagcccagcaaggagtctagggagcaacctcgtactgaacgaactgaaacaagatacgagaattataatcttcctcggacattcgaaggtcttgaacaaagtttccatgaagacattattttgctatccaaggaactacaggaggcagaggatgctgaaaattctagacacatggaggttgatctattctatgcacgttctcag

SEQ ID NO: 37796 - DNA, 2840 bp, Zea Mays
ggggggctcttctccacgcaccggggcgcgctcttgtggctccgccgttgccaaagcccactcttgtcgacactagccggcggcggaggccggagcgacgcgccacatctgcccgtactcatcgtcggagctggccctgttgggctcgtcctctcattcctcctcaccaaattcggtgattcctcgagcagctgctgggtgttgtccatcgcaacatcaatagcttgttgggcacctgccggcgtgcttggtgctcttgtggagattgtacaggatctcgggtagactgcacagcgccaactttcttcaccacggacatttttttagtaccagcacagacaccttgctgcctccacaatcaacgaattgagagtgcaggaggacatcagctccagcacgtgcagggcagcacaggtgacggtgccttcatgcttcgtgggaagaggcattggggcaacgaatggaggagcaggcgaggaggtgcacacatggcagaggtggccccggaggttccaaggtgatgcagctctccagcctccctccactccgagcaaagcgaaaagtggtgccaaagcttgtgtttttttgcctccaaaggagcagagaaggtggcgggggcttgtaaaatgtggcacaatgagcatgaggtgctttgcccttcgatttgatatggacgaccaagattgtgagactgctacagttgcagtctctagctactgcaccagatccagggatcaaatgtgcggtgatagagaagaatgtggagttcactaggcacccacgagcgcacttcatcaacaaccgcacaatggagatcttccgcaagttggatggcttggccagggacattgagaggtcccagccaccagtagatttgtggaggaagttcgtatactgtacttcactctccggttctgtccttggatcggttgatcacatgaaacaggaaggccagttcagttcttatcatgtcgagtgctttatgtcttgcacttcactgattttgacaaggtcattagtcctgtatccgttgcacatttctcacagtacaagttagttgatttgctactcaagaagcttgaaggtattggtttccagacatgctttcccagtgagattggtaactcaacacaagatttggtactggaaagcaagatattgatgggacacaagtgcacatcccttgatcagactgatgagggcattctggttggagcatcagttaacaatggagggatgataatagagagaaagctacactgtggtcttcttatagggacagatggcgcaagaagtacagtgcgtgaattggcaggtatatctatggaaggtgaaagggatttgcagaaactggtcagtgtgcattttcttagcagagatctaggcaggtatttgtccagtcagaggccagggatgctgttcttcatttttaatccaggtgcaattggtgtactagttgcacatgacctagagaatggggaatttgtattgcaggttccattttatcctcctcagcagatgtttgaagattttagtgctaaggtatgcgagcaaattattttcaaattagtcggatgggagccagcagatgttcatgttttagacataaaaccatgggcaatgcatgctgaagttgcagagaagtacatctgctgcaataatcgagtaatcctctctggtgatgccgcacaccggtttcctcctgctggtggttttggaatgaacaccggtgtccaggatgtacataatttggcttggaaattgggcttactgctgaatggtgtcgcctcaccatcaatattacaaacttatgagtcagagcgccggcctgttgcaattttcaataccgaacttagcgtggagaatttcaaggcagctatgtctattcctacaacccttggccttgatccaactgttgcaaactcagtgcatcaagttataaatagaagcctcggatcaatcattccaagaaatgtgcagaaggcagttctagaaggattgttttctcttggtagggcacaagtctcagactatatcctgaatgagaaaaatcccattgggtcgttgagactagcaagattgagaagtattctcgatgaaggcaaaagtcttcagctgcagttccctgcagaggatcttggcttccactatgcagaaggtgctctagttgttgaagctagttgtgagaagactcatgaaggagaaaaactacagcattctaagagggcatcaagagagtacatcccatctgctaaggttggttcgcggcttccccacatgctagtaagagaagtgcctgcttcgagtgagggcgcgttctcaacactggacctagtgagtggggataaactcgagtttgttctcatcattgcaccagtgaaagagtcatatgagattgcccgtgccaccctcaagatagcagatgagcttacgctatcagccagagtatgtgtaatgtggccacgaggttcgactgatgctgaagtggaagagagcagatccgagttgacaccctggacaaactacatcgatgtcgaggaagtgcctagggtgtcgggtggttcatggtgggagatgtgtcgtattagtaggaagagtgtccttttggttaggcctgatgagcacatagcatggctaacagaactggacagggtgagggatgctgagtcagaaattaggagggtcttctctcatgttctgtgcctaaatagccaccgggtgtaagaatttataaatttccttccatttaggctttgtttagatactttggtattcactttaatccacatgtatggaagcggattaggttataaattaaattaatttacatcctaatccac

SEQ ID NO: 37797 - DNA, 1903 bp, Zea Mays
caacaaagtagacacagcccacttgcttaacgcgagaaaccctcctcctccccccatttcctacatcttccagactaaaaccccaggcctcgcgagtcgccgccgaccgccgcaaccacgcgctacgcccccgatggctcacctccggctcctcttctcatacttgcggcggaacccgcagcgccaccgcctgctctcactcttccacttctcctccgacgccaagtccagctccgcctcgccgccgcctcctcccatcaagcccgtctcctacgctccgaagccgcagcagcaggccccgcccgaggagtctgccgccccgacaaccccagacgttgcccctagggaccaatccccactgccacgacggcctcagcagccgatgccgccgcgggagtggacgcggcaggatatgcggtacgtgaaggacgcggcgcccgcgatctcgcccgtctcgtacccgtccagggtcgcgccgctgccggaggaccgtccggtcggcggcgaggtggaggaggtgcaggacggggggctgcagggggagtcggagcggatccagatgaacgcggcgcgtcccaccaggagcgtctttgggatgcacgaggaggataggctgccgtacccgacggtcatacccgtcgtcaagcggccgcagaaggtcgccattgatttaatcgacgccatccgcctagttaagactagtgcaaacgagaagaagcggaattttgttgaaactgttgaagctcatgtgatattaggtgttgatcctcgtcgtggtgaccagatggttcgtggcgccttaacattgcctcatggcactggcaagactgttagggtagcagtatttgctgaaggtcctggagcagacgaagctagagctgccggagcagatgttgttggtggtgatgagttgattgaggagatccgcacaggaggaggcaaactaagctttgacaagtgcatagcaaccccaatgttcatgccccgattgtcaaaggttgctaggatattgggtccacgtggtttgatgcctaatcctaaggatctgtgacgaatgatgtttctggtgcggtcaaagcggcaaaatcaggacgtgttgatttcaaaatagataaaactgctatagtgcatgttggccttgggaaggtaaactttactgaggagagtttacgtgaaaatattggtgcttttgtgcatgcacttttacttgctaagccagtgggcttaaagaaaacttcaaaatatgtcggatatgtgaagaagttcacactgagtagcacaatgggacccggacttcctgttaccataccatcactatctgtggccgccgatcactataacaaggttcaagtcagctaagtcaatacagtagaacatcgaatgtagctttctttctccaatagccgtggcctgcagatggcggtggagcttaaccagtcagcaaggttgagatttgggtggcttgctgttttgttattggggataataccttttgtggacaaggatcattcaacaaacatcataacctataactttattttatccttgtcactgcaattttgagattgcgttgctggtctacctgtgttatccagagtcttgtcatttgttgcacgaaatgtaatatcgaaatacggtagttttagggcattacttttgataataagaaatgaagtattgaaccatgattcgattcagaatccggagcgtacactcacaatcgagaataagctagctggcacgatgtctggagttattgatcagtttcttttaacttcttttcgagttatatttgatagggctggaaatggatgtctggagattcgaattattcgtatttgtatttgttacaactgctaatatggatatccgtattcgatttcaatatgaatgttaaatagat

SEQ ID NO: 37798 - DNA, 5120 bp, Zea Mays
gcgctttgatttttacagaagcgtctctctcctcagtcctctttccctctcgctcccggatctgaactcctccgaaaaaatcgtacccgagagaaaccctagcactggaggttttccgccgtggcgcctcgccggagacctccgctcgccgtggccgccgacgcgtcgccctcgtcgtccccccggaagtccggcgaagatgcgccgccgcccgccgggagcacgccggcggcggcggccggcgtcaccccgtgcgagcaagccaggaaggcactgtgtgtgcggtcgccgtttgatggggaggaggctgctggacgggacccctggctgccatcccgtgttgccagatgggcggcggtgggcgacgtgcggaagaatcataagaagagccagccccaacagcagcaaccggagccatcccctcccctggagcagaacccgagagtgcctgccgggcgcaagggcttttgggagaagttggagccctattttcgagagttcacagtggatgatttggaggaattattgacgaagcatcatttctgtgctagccagattgatccatgttttgtgatacctgttgtgggctctaaggagttaggggagaattcagatctatctcatgcttttgaagtagatgaaagtccagagttgagctcgaatttgggcaaccataacaaggatttggataggagcaaagatgatattcaggacagcttggattatattggaggcagtgtagagctgattactcaagatgagagtaataaagataattgtgatcaggacatgcaggaagtgattgtgcagcaagaggagcagccggttgaaatcgctttagatcaaagcaggactgatagcattgttttaccgggatccagagaagatcggtggcgttctctgagctggctcttaggagcaaggggacggtttgtgctcacttcagagcgtccaaacaagaagaggaagctcttaggtgcagatgctgggctagagcaacttgtacttctgccatcccctgaaggcgaggctggttcagtctgtgatgtttgttgtttgggagaaagtgacatggtgtctaacaggatgcttcattgcaagaactgtgagatatctgtgcaccagaagtgttatggtgtgcatgttgtgccagatcgtttctggttttgtgtttggtgtacccggaatattgggatgccacggaggttgacacggagcgatgcgtgcaggactgtgttaatgccctgtgtgctctgtccaaaggagaaaggtgctctgaaacctttcaaaagggaccctggtccatccatagatggaggaaaccaggaatttgtacatttattttgtagtctctggagaccagagttttatgttgaggacatggaatcaatggagcctgtcaccaatgtagtagatacccaagagaatcaatcaaaattggtgtgcagcctttgcaaggtcatgcatggtgcatgtgtccgctgcagccatggagcatgcaggacttcctttcatcctatatgtgcaagagagttcaagcttcagattgagatatgggggaagtttggtcatgataatgttgagatgcgagcattttgtgcaaagcattcttctgtcaaaagcatcagctccatacagaatgacaaaagtgtatctgaactggactccgctcaagttgagctgcatgatggaaagcctgttactgggaaggaacagcaagtgagatttacgcgcagtaacaaggacaaatttgtgaacagcacaattactactagttcttgtagcctaaacgaagcacatacaaatgaagtggctaccatttcacccgttcttggaaggactcaagaaacacaaagtgcagatatggctgctgatcaaccctcttcagatgggaatcttatgagcgattctggagatgtttccggaattcttagaaagctagtcgaccaaggaaagattagtcttgatgacattgaattggagccaagtcttcgttcagaatcagtggaagctgctttccagccggagacaactgcatactcccctggtttgaagttgaaaatgatcaagtggctgcagaactctgagtgtgcaccttctgttcaggttaagtcatttaaagagggttcattggcacaaggtacattgcctaggagtgaaagcaagaacttaaccactgctacatttcaatcaggacaggaggaagccatttcatcgattgaccatcattttctggaaaatgataatgctaataacggggatttggttcaaaatggctttcatagatgtcctgatcctgatgtaaatcagatttctggccgacatttgctcaacatggatggttactgttgctatattcatcctatcattgagaaaaggttgcaaggtttgtggagtaatagtttggagcaaactatacagaaaaatggttatcatgaagagttatcttggtctcttcatgacgaggactttggtggttcatcaacaaaacttgtgcaattaacaggcaaaactgccatggaagtctgtaaagcacaatcatcagatactctcaagctttcacctgatgacgaaatagaaggggaaatagtttatttacaatccaggctacttgatggtgttgtttctatgaagcagagatatgaagatttgatactcaaggttgtccagaatatttcttatgagttggattctttcaataaaagaaaatgggatcatatcattgtgaatcagtttcttcgtgatctgagagaagctaagaagcgcggaaactcagagaggagacacaaggaagctctagctattctggctgcaactgcaccttctgttacaccgacctcacgaaacacaacagtgaggaaagagacagaaaacaatgtgacacctgctaaacgagagaacatgccaagaagcattactggatcctcaagaattggccaactatcttcttcaccacaagcaaaggatttatcattttccaacagtgatgtctcagacgaaactaactttggcattttcaatctggcgaagttctccaagaaaagtgctcttccctgtgatatatgcatgcgatgtgatacaatattgaaccgtatttttgtttgctcgagctgtaaggctactgtacacttagattgctaccagagtctggtgtatcccactggcccatggaaatgtgaactttgccatgagatgccctcagattctgttacctctggtgaacaatcagaccaaaatggtccgaaagcttgtttggtgcaatgtggtttatgccatggaacatctggtgcttttagaaagactgtgaagggtcaatgggttcatgctttctgtgctgagtggctgttggagacaacattcagaagagggcaacataatccagtcgacggaatggagaggcttcatcacaaggataaagatacatgctctatatgccaccgctgtgttggtgcatgcttgaagtgctgtacattagattgtcaaattacttttcatccttcatgtgctagagatgctggtctttacatgaatacaaaaagattgggtaatatgttacaacataaagcatactgttgtagacacagtattgaacagagaaaggcctatagtcaacaatatggtcctgatgaaatcaagggcatgaaacaaatgagggttgaactggaactattacgtttcctttgtgagaggattgttaagagagaaaaagtgaagaaagatttggttggatgtgcacatgacatacttgctgcaaggaggataactgccgtctcttctttgtggacttcatgttatacttctggacctggagcaagttcagaatctgccactacttctgttaataacaaatcatatggtggaacaattcaaaggtctgatgatgtcacagtgagattggaagatgtcacagtggacagtacagttaccaaaaaacatactgtcaggttttctctgcataacagggacactgataggaacactgctgacagttccacatcaacaatatcatacaaacggaagttggatgatggggaatcacttgcattcaagagtcatcccggaacaccagctactgccttgttggagtcacgggatgcagaaaagccaatagataaaaagggatatgtatcaaaaggagcttgtcatggttacttctcaccaagctttgttgaagaacaagacccctccagagagatatgtttacactcgccgcagctccatgtccaaaaggaagcaatgtagtcagcatgtagttcaaagacctggtggatgacagcaggcgaagtcgcttcttgggatatctggataataatattcttggaagctcgatgcagaaaaggacaaagtaaatacagcaagcggggctggccattaatcatgacagccgcaggggctggcgcgtggccgcactggaatcggaaatttggtgcaaattgggctcttcgaagatttgaccaattgagcccatgtcaccttggagtccaacatgcgctgaattcattcactaatttagtcaagggcaggttttgtgaaatacgcccaattgccagtatggcgtcttcacattatgtcgaagaaggaaatcgattgagttatgtgtggtgaaagaaagtgggtagacaaatattactgactggtgaaagctaccaataggccatccgcacattaatgaccatgtttaggagttgttgctatgtactaacagaactgcatgttttgttgtgtggctccattctgacttgtgaaatgaactctcggtaagtcatagggcatttcatgtttgtacaggcatgtaggtttagctttctggtatgtagctaaattcaaagcatcatcttgtagccttatgtggttaaccagatctttgatctattagttaatttagtaaaccaagagctgccttgtgttcgtatgggttgagtcgggcttttactgtattgatatctattattagcgtgaaggctgtttattgccgatgttgagcttcataagcattatctttttttaacaaaacacagtgcttgttttgtgaatacttgtaacctcgaatgtgtaataaatgtagcacgtctattcaactcaatggctcaagtgtcatatatggtcaaccttgcatgtcc

SEQ ID NO: 37799 - DNA, 3158 bp, Zea Mays
tgctctctcccaatttcagtcagttcgctccgctcccacatgcctcctccgcctccctctcgccgtcccggcatacccaatccctaggcaccccgccgaaaccctagattctcctctcctgctccgatggctggggcagcggcgtcccccgtggcggcccacgtggtggaacggttccgctcgcggctgcgcgaggaagcgggcagcggggagccgggcgcctccgcggtcgtgcgcttgtacgcggaggcgctccgcgagcttaccttcaactgcaagccggtcatcaccgagctcaccatcgtcgcaggccagcacgccgcgctcgccgccgggggaatcgccggcgccgtctgcgcccgcgtcgccgaggtgccacctgatcagatattaccatctttgtatctgctagatagtattgtgaagaacataggtggggaatatgtagagcattttgcaattaggttgcaaagtgtatttgttgatgcatactacagagttcatccaaaccagtatgcttcaatgaggcgcctctttcgtacctggtggccagtgtttccttcttctgtgcttcacagcattgaggatgaccttcaattttcgccctcagagaataaccgtcccaccacatcgacaaatgtgcatcaaacagagtcgttatctcctagaccatctcatggcatacatgtaaatcctaaatacctagaagcacaacataagttcaagcgggtcaatgtggcgcaccagtcagcagctcaggacactaggcaaatgtctgatgtgcaggaggatctgataaatggactaacatcgaatagttcacaaggacggccttcagtgtttcagaaatcttctttacagtatgctgatgatcctggtcaacaagagatgtttcgacctcttgctggagcaataagggcaacatcgccacatctcttgagaacacatgcatctgatgtgaatctagatgggccattagccaattcaaggagaaacttgtccagatcaccacctcttgatgtgttccctaggaatgtttccccaaagagaccactagagaggctaccaccatctcattctgtattgggacctgatcccagaaaattgcctgatcgaaatggcaggttaaggtgggctttggacgatggtgcacagtggcctacaataagtatgcttgatgaagagtacaggaagcaaagtgcaagggaacttattgatgcatatggaaattgtcaaggacgagatgctgatgaacgacttcctaaagtacagcgcctggattcaaatggtatgactagcaaatctggtgcacgaaattggttaacttcagaggaagagtattcatgggaggatatgagtccaactttgactgatcgagtcagaagcagcatgccatcttttcctcctggaaccatgagaattggatttcctggggcaaatgcagggctactggaatctgatgttgggaggcacaatttcctaagccaagctactagatcatcagttgatgtttcaccatttaatattgaagataggatttcagctgcaagtcatgttgacatttccacaaggagatatccaagcaattttggtgttcagaatggagctcttttggagtaccagaattctgaacatactctaaatcatgggagaattgctaccatgccagctccaccttggcaacagcctattggtcttccattgcgaatacaaggacctgaacatccttcagtacttggtagaataccacagcctgtcgacggtgaaatgccagtcaagaggttggacattagtggcacgtacaatggtttgaatgtagataaacccttggtgaagcataggtcatcacctgctcctgccccgacagaatggctcccccttcaccatgcccaatcacaaactttaccactaattccacctgataccaaacatgttagaagtgcatcagatagtttagaaattagttcttttgttagccatggaggtagttcatcagtatttgttccacggcatcagtatgatgccgtggatcggaaaacaggtaccagtaacttagctcaaccaccatcaccatatcagaaccaagatttgttgccatcaagtcaacaaaatcaaggtacaattttgggaaaccaagctcatcctcatcgtcccctaaagttacatccccatgctcatcctcaccatcaggagacctttagaagctttgcacctggcatgtctgtatctccattccaaggacaaggaggtaatgcaaccatgacaccagtttctgttctgccaacgtctttttctgtacctcctgctgtgccaccctatggcgtgctgtctgcacctgggtttcctatgccaccattaccgcctggaccaccagcacctgtctcactgcagatgggttcatcatcatcacaagttggtggcccccaaccatttgtctctggactgttgagtaaccttatgcggcacggtgtaatttcactggaaccacctagtcaatcccaggattctgttggagttgacttcaatgtagacctcaaggtacggaatgaatctgtcaccaatgctttgtatcaggatcttccaaggcagtgcaaaacttgtggtcttcgatttaaatgccaagaggagcatcgtgctcacatggactggcatgttacaaagaacaggaattcaaagaatcgtaagaaatcttcacgtaaatattttgtcaccgctgttgaatggttaagagcagcagaaacagtaggaaacgatggagttcctgcttttgtgctctcagacccagtcccagacagacaggaagagaaagaaattgctgttcctgcggatgaggagcaaacatcctgtgcattatgtcaagagccatttgaagatttctacagtgatgagactgacgagtggatgtacagaggtgcagtttatatgaatgcaccagatggtaatatcgatggtttggaatggtcacagttgggacctattgtccatgctaaatgtcgatctgggcccggcaatacttcttagggtgggcatagctgtggtgagagctgtcttagtgagcactaggttacgggttcgaagcagtctctccacatttgcggaaggaacgcttgcctcggtttatcccttccctagaccccgctaatgtgggagtctctggc

SEQ ID NO: 37800 - DNA, 1365 bp, Zea Mays
ctactcctcaacctggttcggtggtgtgattatctccctctaccaggcggttccgtagtaaacaactcggcccggcagtcgttcccagggcgagatcggatcgatcgagagcttcctagacctggacctgcgctagacctcaaagactcgatcgcaccgcatcttctctctctgctcctcgttcgcttcgtcgccggcgaccccgccgccagcttccccttccgctggccgccctttgcctcgcccctgaggcgtcggtttccactgcataggagtggggcggcgatccgactggacctagggttgcggcttgagcaggagtccggattctatttcaacatgaagtactttgaggacgaggtcgtcaatgggaattgggatgaggtggagcgctaccttggtggattcacaaaggtcgacgataaccgctactccatgaagatattctttgagatccgcaaacagaagtatctcgaggctcttgataagcatgatcggtcaaaggctgttgaaatcttggtcaaggaccttaaggtatttgcatcctttaatgaggagttgtttaaggagatcacacagcttctgaccttggagaactttagggaaaatgagcagctttctaagtatggcgatacaaaatctgcaagagcaataatgtttgttgagctgaagaagctgattgaagctaaccccttgttccgtgataagctacaatttcctagcctgaagaattctaggctgcggacacttattaaccagagcttaaactggcagcaccagctttgcaaaaatcccaggcctaatcctgacatcaagactctatttgttgatcattcatgtggacaaccaaatggtgcacgtgctccatcaccagcaaacaatccattactcggatctatgcccaaacctggaggtttccctccattgggtgcccatggaccttttcaaccttcaccaacacctgttccacctctggctgggtggatgtcaaaccctccagcagtaacacatcctgctgtgtctggtggtgccattggatttggcactcctacaaatcctgccgctttgttgaagcatcctagaacacccacaactgctaatcctggtatggattatccatcaggagattctgatcacatctccaagagaactagaccagttggcatgtctgaggagcaggtgaatcttccggtgaatatgctgcctgtgacttatccgcagagccataattaccaacaagatgatttccataaaactgttgcacggaccttgagccaaggatcaacaccgatgagcatggattttcatccacttcaacaaactcttcttcttgttggtaccaatgttggcgacattggattgtgg

SEQ ID NO: 37801 - DNA, 1573 bp, Zea Mays
cggcagttcccacaaacatcttccccaacctcgtactagccggctgcgagatccaacgacctccgcacggcagttccattagagatgcctctagggaagagatccacacgactatcctagaaatccgaagtaacatttctagctgctagcctgctaccatggtatgatcagtaacatttttctggtgccttacactgtggctgcgcgaatgactcgctctgagccttcagcggcctcctcgctcggcaaattctccgccgacgacagggagaaggtgctcactgccgttggagtacacacggcgatatctattgcacaacctacttcctagatacaggaagatggtgataaccacactgggaatcatggcaaaaatcataccaaggtcaaatagaatgggcaggcaacttgaatcgttaagcagaggactgggaatcaagattccaacccaaatcactgaagggaacaaaagccagagccacctattcaagctactaagtttgcattagagctagagggatggtcgccaaggccagggatttactgtcgaggtgtacaagtccatggcagtggctgtttgtggagattagaagctgatgagggagtctcgtagcagaacttcaatgttgagatatggaaaagctacatatgtatcaagatatgtgaagactgtccgcctcaaacaagaggagtattttggtggagcgaagtttatgaagactctattcctgcttgtacacttcaatgctttgcttgggcatggaggtactgctggtaacaagttctggatgtcattaggtctaccattgatagctactgtgaactgtgctggtaacactggagccaagaacctctacatcatttctgtgaagggaatcaagggcgccttaacaggcgtccttctgcctgtgttggtgaccatggagaatggaaagcctaaccttaggaagaagaagcaagacaaatataaggatgctgaacctagtgcaatagatctttttaaggagatgcattgcagcaaaaagaaaggttttagcaaaaatgttcagaaagctattgttgatatggaagaaatggtggcaacatcagttcaagatggacaacaaccgaaatatcctacagaagttgtttatagtgtgcaactgggctccagtgtgttcttatgcaatcttggtctttagtccgtctccaagaaaagctcaacatcaatagtttttataaaggttcaacaacttcaggatcgactggaggccaagaagcaagaaaaagatggactttgggaagaagtgtaaaccttaaatgctcaggcagtcatctcaggagaccattgatagtatgaagaggtcgaccgaagaaaataacaatctccttagtcaactgttaagcttcaatagaggccaagtgcctccatctcaagtctacttgaccactataggatctgcagccttatggttgctatagtagctagttacaatagctctggatttgaatttataggattattttcaattaagcttaatgtttaattccttgagttgaagttataggattttctttggatcttatgtaaaag

SEQ ID NO: 37802 - DNA, 1052 bp, Zea Mays
actttaccttgtcctggactttataaatggggccatctcttcttccagctttaccaccagggtttatttagggaggagcttgcacgcatctacactgctgaaattgtatctgcagtcgcccacctccatgccaacggtattatgcatagagatttgaagcctgagaacatcttactggatgctgatggtcataaattgttcagggccgaggtcatgataaggctgcagactggtggagtgtgggagtccttctttttgaaatgcttacaggaaagccaccgtttgttggtggaaacagagacaagattcagcagaagatagtaaaggagaagataaagctgccaacatatttatctagtgaagttcactcaatgttgaaaggattattgcacaaagaagctggcagacggctgggaagcggaccaggcggcagtgacgaaatcaagaaccacaagtggttcaagtctgtaaactggaagaggctggaggcccggcagatcgagccaagcttccggccgaatgttgctggcaagacctgcattgcgaactttgacgagtgctggacgaacatgcccgtgcttgattctccggtggccagccctgttgcggccaacagcaactttgtggggttcagttatgtgaggcccgcaccgttcctccagaagccgagtccacttggctaaagaactacttccgtgatctgatatctaacccggagttcaaataactatctttgagtctgaatcctatgtatttcttcaagacattagtgatgggaatctaaccttattgttgtgttgtgggtaggccagccaagcgcctattgcttgagaacaacagcttggcaagtgacaatgtgcaatattgccagaagttcttattgaagcgccataataattctcctacgtcaatttgaacttgctcggtctattcaattgtggccttataatgcaatttcattctctggtctagttgccgtttttgtttccgtattccttatttatccattcgtggttctttggcctagttttggcgtagcagctataattcgg

SEQ ID NO: 37803 - DNA, 1384 bp, Zea Mays
tggcagcagcctaacaaatccattcatcccgctgtgtctgtgtattgtagtatcagccaaaaaaaaaagaagaataccccgaacacgaccagaaggcctactaaaccctgccgccgccgccgccgcgccatggccgacgagctcgacgagctgatcggcttcctctccgaccgcaacccccaggtgcggggcgcggcggcggacatcgtgcgcgggctgacgggtggggaggacggcctccgggcgctcacggcgcgcgccgatagcgcccttccggcgttgctccgcctgctggcctccgcgggcggaagtggctcgggagaggccgcggcggactcgctcgtcaacctcagccaggacgcggccctcgcagcgcgccttgtcgcgctcggggccgtcgatgccgccatggacgtcgtggccaagcgaggcggggagcagccagctctcgcgcgcagactcgtcatgctgctcgttaacctaacccacgttgagtccggcgtcgccgcgctcctccaggttggggatgagaaggtgcaaggcttgtatgttgcaaagcttgtgcgatcattctgtaggtcatccagtgattctgaagaggaagacatttttgagtacgttgcctccacacttgtcaatatatctaaggttgaagctggaaggagaatattgttggagcctaagagaggtcttctgaagcagattattcgacaatttgattcaacaaatcaacttagaaagaaaggggttgctggtacaattcgtaactgttgctttgaggctgatactcagcttctgagtttgctttctttagcagaatatctttggccagctctacttttgcctgtagccggaaagaagatatatagtgaagaagacagatcaaaaatgccacttgagctatcgagtgcactctctcatgaacgggaagttgttgaggattctgaaattcggcagcaggcattagaggctatttatatgatcgtattgcaggatggtggccgaaggtccttttggtcagttaatggcccacgaattctgcaggttggttatgaagatgaaaaggacccgaaagtgatggaagcatatgaacttattggttccctgcttgttgggaagggtgaagatgtacaagataacaagaaggaacaaggagagaagcctcaatgagccccgccgctgataaaaacggtgctgtatttttgtttgtctagaaaacatccctcgccgtgtgcaatagcaatagtattggccgtcttttccttggttttgagctctctgacaattcttcgttttttttggaatgcatctcttgacgagtctttcacaccgtcgcttcagaacatggatatgcattaaacgggctaccctgtagctttcgctg

SEQ ID NO: 37804 - DNA, 3591 bp, Zea Mays
cggacagatttgctagtctcgagtcttgaccggaccctgcggcccagcttttttcttcactctctgcaacccattccccccctgcattctctctctgttctcttgtgcgtgcctgcgctctgtagtgacgacgactgggcggcggccgctgccgccgacctacgtgcgcaggtctccatcttccggaccttcgctggagacgagcacccaccaccagaaattttctatacatttaagatgtacagggcctcaaatttcatacctgatcctaatcaggtgcttctagatgccaatccattaagggaaccttcctgcctttggatcgttcactactttcagcgccactacaaacggtgtttcttatacgggcaccagtggtaatggtgccattgatgccactcctatctctgcatacaagacaagatcaagcatatcacttgatgatgatgatgatgagccttactcgggcaaccaaggtttggcatctgaacggaaggctaggagaggccgtcctcctggttctggtcgtgatggatcaaatggtaagttaaagcgccctaagcctacatacaagaattttgttgctggcaaagagcttgtctttctgtcttctacatccgatcccagggagtttgtggaatcagttcacatgacttttgaggccctcaggcgaagacatctgcagatggatgaaacacaggatgctagcagacgtgcagacctgaaggctggtgccatcatgatggccagtaacatcagggcgaattcaggcaagagggtaggaactgtacctggagttgaaataggagatattttctattttaggatggagctgtgtgtcattgggttgcatgcacctagtatgggaggcattgattacatgactactaaatttggaaaagatgaggattctgtagccatatgtattgtctctgcaggaggttatgagaatgaggatgatgacacagatgtgctcgtgtacagtggtcaaggtggaaataataggaatactgaggagaggcatgatcagaagcttgagaggggtaacctagctcttgagaggagtttgcataggaagaatgagataagggttgtacgcggcttcaaggatccattttgcctaactgggaaaatttacatatatgatggtctctacaagattcacgagtcctggaaggagagaacaaagtacggtgtcaattgcttcaagtacaagctgctgcgggaacctggacagcgtgatggagctgcattatggaagatgactcagagatggatagataatcctgctaccagaggcagggtcctactagctgatctgtcatctaaggctgaaattttgcctgtttgtctcgtcaatgaggtagaccatgagaaaggacctgtacatttcacttatactaatcaggtcaaatacttgaggcctctcagttctatgaaaaagttgcagggctgtggatgccagagcgtttgcttgcctggcgacgccagttgtgcttgtggacaacataatggaggcgatttacccttcagttcatcaggattgttgtcatgccgcaaaccaatagtctacgaatgtggtgaatcttgcaactgttctacaaattgcaggaacagagtgacccaaaaagggtccaggctacatttcgaggtcttcaggaccacaaatcgaggctggggtcttcgctgctgggaacctattcgtgctggttcatttatatgtgagtatgccggtgaggttattgatgagctcaaatttaatttgaatgatagtgaagatgattacatttttcaaactgtatgccctggcgagaagacattaaaatggaattatggacctgaactgataggtgaagtaagcacatatgtatcgcctgatgaatttgaaccactgcctgtcaagataagtgcaaaaaacatgggaaatgtctcccgtttcatgaaccacagttgctcacccaatgtcttttggcaaccagttcaatatgatcacggagatgatggacacccgcatataatgttctttgcactgaagcatattccacccatgacagaactgacttatgactatggtgttgctggagctgaatctagtggttcaggttctcgtagaacgaagaactgcgtgtgtggatcacaaaactgcaggggattattttgatgggttgagagacgtgctcttggtggttaatcatgcaaaccactttctgctagatcctttctatgaaaccaaatttagtctccggataatatgacagatgatgtcatttgccatgtgtactgtgaagacagtaagttgtcgagcgagctgtagaatttctgttgctctgaactgcatggtggtcgctttcccaccatttcctcggatgtttatgtgggcgtggattgctgcattgcttccgctaaacttgtccaccaattgcaccggcttttgtagacttgttatcagccccgcttgcgttggacgcctggttgttaggatatggtcttgtaaattatcctggttaaggatcatgttgctttcgactcgaattttcgtcctcccttgcccttatgttcagcaatgttcaggtgtatgctgagtgctcaggtagggaccaaaggatgcagttgatgcaatttggaaccaggttttcttgtgggcgccggccaagggaatttgctgcgagaggtacagatctgtttgcggctggatggtttgtgtgtagcgttgttcattattgatccgacggggacacacaaggctgcgctatggcccttgccaccgcgatcggtgaggggcatggtcgcccatgccgactgagcgtgcaagtgggcctatgcccatgtctcggcccgtcagctgggccccgccaggtctgttcacgccatggttgattctgttacaaaatattgtcatatattgtcatgtgatcaaccctcttccccgacgatctcttccctgacaattttcttccaaaggacacacaattttctcccaaaggacacaccctttaggagacactgtatctacatgtatataaaccagaatctctgcaataaagatctacaactgtcatttacactattctctcgaatcttgttttcactgagttacggcacgttatcagcactgctcacgcgagaatggagaaaacgaaacgctcgctgttgaagaaaattggagggctgggcctctagaatcaacaggaagacacatgctctccatcgacgaacagcaagacgaggccagggaatcggagatcctcacgccgctgcatgcttgtagtaggatactctgctgctttggatgcactaaaagtttggaagtcaaggcgctggtggccgtggcgctgcacagacgtcaatcgcgtccgcggcacctgaccagcgcgcggccaggatcgcgggagtccgctgggatcgggcacccacacccgaatcctgtgtcgtggctgatcgtcgcgccccacgctggggctaccagcaccgccgatggggctgccaagtctgcgtcctcgacgggaccgcggggcccacacacgccggtgctgaggcatcgcgccggaggctgagcccgcaccggggcccaacctgataagaggccatcgc

SEQ ID NO: 37805 - DNA, 2275 bp, Zea Mays
ctcatccacccaccccactccccctctccgtggtttgtccgctcgcatccttccctcccttccgccctttcctcccacttgctcgccgaacccagagccccgcccacctcttttcggttttttctcgccggcgtttgtgccaggatcgggctttgggctccgtgcatcgacgcgccgccgcctcctgatcgcaaagggtgtttcccccaggctttcgtgctccggaagtggcgagattcgccgagaaagtgtgttggcgtatcgatctgcattggatcgtcgggcgattcgtgtgacggagacgacgtcctctgtggtggctccggtttgctcctcagctctagatctggaaggactgggtgatctgctgcctcaagcagcttgaggtgcattggaaagtgaccatctttcccagacatcggcacaacgtaactggacatggaggctcttgtggttttcccggagcagcacagccaccaccatcaccgccaccctggtacccgcagcaagtcatcgggtccatacttttcatcaccgcctaactctcgtggcttccgtggaatgaactgccggtctttccactctggtcgttgcgtcggtgctattccattcccagcacctcctgctcgcacctactcatccccagagcccaagacacccaagcagcaaccacgccatggtggcaagcgaagccggccaatttccataagcctctccacatcccctccctcccattctgagctctgggcaggtccagcattctccaactctccaccacctagttcgcttcccatccccaaattctcgctccgccagaagcgcagcatctctctcgagctgccaccggttgaacgccctgatgatgtggtggtcaggctgcattctaaatcagcaccttcatccccagttgagggatatgggtatgacttcttcaatgacgatgcaatcgctagtgcgatagcaacggagaatctgaggaggattctccagctggatatcgcagatcattgaataatgggaggatggaagggtggttcttgtgtacataggttatctttcactgacagctttctacttgcattggttgtgtatagggtaatggtgatagatacttggtggttgtaagatatggtcaggatcatgggagaggtgtaggttgtaggtgaagcatcttcagaagcttagacggttgaaggtgatagtgccctgttaggtgttattaaggtggggtctgggtcgaggatggggttgcacggcagttggtagtattcacctatatgcttccttcatctcttaggtgtaggatttaaacctttttaaaaacagcatcatttgcatccacagtacctgttctgagctggcggtgggcactctgacatagcagtaacatacgtcctaaccccaaaccagatgtcaaatatttgtagggtaccatgcatcttacatacccttgcatacttatttccttctgtcctctagccaactgtctctaactatcctcgcttcctggtgctctgcaaagaacaccattatctcctcagcagctcttctgttttttttggtaaggaagaagctgcgtggaagatggaagaaattctgctctctccgtcttgttcgaaactaactttcctatcccgcccctttgttgcatatctggcatataccatagtccatatccgtcgcatatctccaggcttttatgttcatctagcgctcctgcattgcatctagtgcccttagtcagttagcatgctcattcgttcccacttcaagttcacgaaccagtttgagggttctgattttcttaaaagcgtcgaaagagagtctggattctggatcccttcgtgcaggcaaaccctgatgaggttgctctgtaatgacataacgcttaagctagctcgtgccggtgttacacgcttctgtagccctgcgcagttttagcactagcagtgaagcagcagtactgctggatctagattagtagtcatcggaaatgccgaggtttggtcagttatcttgtgctctggtgttaaatcagcagttgcattgtgtcgttgttacttcagtaacgtgatataacggtcctatgtcgtgaaactagctcatggtgttagaactagaaaccatgttgcccagagctactatgttgatgttgcacctgctgagcctgtcatggctgtcactccttgaggattattttggttattagttcgtcggcggagttgcggagtttcgtctctgcgtttgagataagacccttgatgagtagctagac

SEQ ID NO: 37806 - DNA, 3194 bp, Zea Mays
ccgggatggcgggatcccaattcttgggtatatggctgcatacatttgtttttcccgattccactttctcatccttaaaccctaaaccgtctgccggccgccatgcggcgccaccaccacctcttcgttatcctccgccgcgcggtcgcctcctctgcctcccagcgcgcgcagccccttcccttgctccactccgttgcgctccgaaatggcgcagctggttccttctccccgtgcttcttctcctcccgcgcccgttcctcggtcggcgccgcgaagagccttgtggaagacgaggcggagctcagcgactggattagcgacctcaaaactgactcgttccacctcggtctcagcagcggagacgaaggcgatgcgccgtccacccgcaggtcctcggtcggctcatccaggggcggccgaggtgggtcggactccaggggttcgttcccgaggtcaagtacggccggcggtgagttcagtggagacagacgcggcggcttcgagcagagggggaggatgattagtagtggactggatgatgctgattccggctttggttcctccaggggaaggcggggacggggtgagaggacgtcggggttcgtgagaagaggagggagggggaatggatttgatgaggaggccacatttaggtctcctagggagcagcgaagccagcgagggagggcttcaggtgtggcgagaaggggagggaggtacagtgactttgaccaagatgatggtgacactggatttgggtcttcaaggggaagacacggtgccagtggtcaactgtctgtatcctcacacagaagaggaagggtgagtgatttagatgacgatgaggatagtgatgatgatttggttgggtttggggatcttgatggaaagcagcatcatggtcgcaggaaagggggaagggaaaacacagttgggctgggccgaggtcggggcaggagggatttgggtctgtcacgaaagggagggagttacaatgattttggtgattatgatgacggaaggagaaggacgtccgatcttttgcagagaacagggagaggaagcgatttagatgacgatgaagatgatgatgctggtccagttgggtttgatggttacagtgtaaggcagcaaggtggcaggagaggcaaaatggcgaagagtgttggaccacatcggggtgggaggggcagcgatacggactttggtcaccgacagccaaggggtctgaaaaaaattgactttggcttgtcagaggatgatgatgaggcgggggaagttgatgaggaagatgagccatcggggttcgaagatgatctttttgaagacgagggtgataaggaggatgtgggacatataataggtaataagtctggctcatctatgttacccgaagatgagccagctaaaaatgaaagtgtacagggcagaagtgctgggggtggtgattcttatctgagccagaagaggtttgatgaatgcccgttatctcccttgtcactgaaaggtgttaaggctgctgggtatgaacggatgactgctgttcaggaggctactcttcctattatacttcaagggaaggatgtactagccaaagcaaagacaggaactggaaaaactgtagctttcttgctaccagcaattgaagttgtttcgaaattgccacctgttgatcgtgatctaaagaaacctcccatcagtgttgtagtagtgtgccctacacgtgagcttgctgatcaggctgctgcagaagctaacaagcttcttaaatttcatccatcaattggagtacagcttgtaataggcggcactagaatggcacttgaacagaagcgcatgcacactaacccttgccagattctagtagctactcctggaaggcttagggatcacatggagaacactccagggtttgctacaaggttgttgggtgtcaaagttctaattcttgatgaagctgaccgcttgttagatatgggattccgatcagatattgaaaaaattgtggctgcactaccaaaacagcgtcaaacacttctattttctgcgacagttccagatgaggttcgtcaagtatgtcatattgccatgaaaagagatcttgaattcgtcaacactgttcaagaaggaagtgaggaaacacactctcaggtgaagcaaatgcatttaattgcaccactggacaaacaattctccaacctatatggtcttctaactgatcatatttctgaaaatgttgactacaaggtgattgtattctgtacaacagcaaaagtaacaagccttgttgctgagcttctgtctgagttgaagttgaatgtacgtgagatccactccagaaaacctcaaagctacagaactaggatatcgaaagaatttaaggagtcaaagggtctcattcttgttagctctgatgtatctgccaggggtgttgattatcccaatgtcacactagttgtgcagttgggggtgccaactgacagagagcaatatattcatcgacttggtagaactggtcgcagaggcaatgaggggacaggaatcttactattggcaccatgggaagaatatttccttaggagcatcaatgacttgcctattacagaggcaacacaaccattaattgatctggatactaagaaaaagaggtttctattcttttgataaacccatctgggttttatcttcatcagcagacatgaaggtcgataaggctcttgcacatgtggaggttaaagacaaggaatccgcttatcaggcgtggcttggttactacaattcaaataaggtcattgggcgcgacaaataccagcttgtatcacttgccaatgagttcagcagaagcatgggtctcaacaaccctcctgcagtgtctaagcttgccctcaggaagatggggctgaacaacattccaggtctgagatcaaagtaaccaattgccatgtatactgtatacatgtcttgaagtcttttttgcacatgatctgacatctgagcacgctattccatactgatcgagttgagttagtttctggtaataaatttattgtacgttttatgcttgcagaagtgcacgaatattcataatatgttctcattcgtttgttctgttactgagataacaaatgataaagatgaacgtgttttgctattaaagaaaataaagggatacaaataaatgaagataataa

SEQ ID NO: 37807 - DNA, 2866 bp, Zea Mays
tccttctccgcttctcctctgtgttcgtttggccgcaagtccgcaagtgagcgcagcggagcggcagcgtcgtcttcttcctcgtcgcgatcacctgttaaatccaatccagtttgttcctgccagggctccgattcaccaccacccgtcctcttcaactgccgccgttatcccctacccggcacgcgctgggcggggagcagctgaaccccaccccagccgcccgcaacggcgccaacaaggcgctgaagcggactctccggctcctgccaatggcgcggatccagcttgtggtggatgaaagaacggacccctttcttggtagattgactagaccagccaccattgaccaatcccacaatttcttctctgatgtcacaaacaacttcaaagatttttcaactgtagtttcagagttgcatcaacaccttctggatgcaaatgtagaagttacttacacagaatacttagatctgatgaaagtggaagttgatcaacatcttaataagctctcggaggacataagggacctcaaaagctgtaacttggcccacaaatatgacacagatggttcatgctgtacagcatgccatgttgggaagctagctgagatagatgacaggttcaacagcttgaagtttctgctggctgtggtgttccgacaaattagagagatcctcacagtggtcaattcttcaattcatgatcttcagtgggagcatgagttacagtcagaagttaccggcatcattattggagactgtattagaggtcttcaggatgaactcgagaggaaactgtatgagcaaagttccatggtgaacagtctaagaaaaaactgccaggaaactgtggcgcagtttgcttccatacgtgaagagctgattgctatttctaatattctgttaccttctgaagaggaaccacaaatttccctctgtaggcatgaaagtttgggtaactggagtgacagatggaagttcagctttttcagaaagcgagcacaccaggatcactctttatcttccacgcaaaaccagaattctgcaacacagaaatctataagtcctagtgaagttatatcagaaagatccgacttccgacatctgaagggtatgactagacatgaaatgcttaactatttcagatctgagatcagtaaattaagaaggctgcatgagttggatttgcaagagaaaacagaagagctgtttaaattcaaacgagagaaatggtcattggctcttaagtatgatgtagaatttgagcctttaagaaggaaattccctgaggtcatttcaagatttgaccaaatcatgtccaatggaatggcagcagcagtacctacaatctgcagtaatagtgatgcattcgatgaaacgagcagattgagcagtataattgattcactataccgtgaaaaccagcatcttcattgtttgcttgcagagaagatgaagaatattcaggaattatcaagccaaatatctgattccaccaggaaaatgtcacttcaatattcattagaaaaacaaattttgagacaactcaacagcactcaagtagaatatgaggatctttttgttgaaagtactatcagagatgaaatttaccaaactgttgtgagaacattggttgatagtcataggaatgttttggaggataccacccaaactttccgtgcaaaagtgtcttcacttgaagccgcactctctgaaaaggacaaggcgttgtgtttatctgatgaggaaaatcaaatgctaaaggaaaagttgtcaacactagaaaaagagcattttatccaaaataatcagcaagatctcgagctaatcaagcaagaaagtgaggaaatggttctccgtgatattgagatggagccacaaagatcatgtgagatttctgatcgagatatacagtacgaagggctcatcaagctgaatcaggttttagaaattgcctcaaccacggcaaaagaaatagaaacaaaaaggttgaatctcagtgatatccaaggtaaaagagagcaagaaaaacagctagattgcatcctggtatctatcatggatttgtcaaaagaatttatggagactgaacatagagtgccaaaagatataaaaggaaatgaaaaaaagactgataatctgcatgatcaatgcaattatatgatacaacaggccatcgtattgacaaagaagggtctatggtataagcaaatgcttgacacaaaacgttctgagcttcgaaaagctgaatctgaggttgacattatgggagacaaggttaatgcactcttgagtcttgttcaaaagatatatgtaactcttgagcactactctcctgtttttcagcatcatcctgtgctattggatgctttcttgaagacatgcaagcttgttgcaggtatcagaagcagacaaaaaaaggacttgcaagatacaatctaagttggagcagcaagtttagagtggcctaaaagacactagagagagattaatttcgtcggtggaggaacactacacagtcgcaactcacaaggctgtgaaattgatctatggccaaattgacaccgcaaatctgcagccagaaggaagttgaggtagtccattcgacagaattttgaaatctaggatgattggattcatgtcctgtatggtgtatgtataagtctatgcactttataatgtacaaattatgatagttcaaattctgtgagggtgatctcatttttgtcagcagcatatatagaaataacttagctgttatacaagccatagtcatattgtaagcatagtaactccaaggctgtcttttacttgattttagtattttcatcgttcttacaaattttggagtcctgtttgtacta

SEQ ID NO: 37808 - DNA, 1010 bp, Zea Mays
cgaaacagtagcagtagcttcctgtattccttacgattacgaagcagtagtttcatgcaaggaacagttgcattttatataaatacaatctgcattatgtatatatgtctatttagtcttttgcagatattttgtataaatacaacctaactgtataagttcgaacacacaaaactagctcttatggtaattccatctcatcccagttgctacaactctgtgcacctgttcaagtccctacaggtgaattggtgtacaactctttatttttgatgatcttggtgagttctacgtataaattgtttagttacgaagacatacattttttatcacttaactttctacgcgcgcaaagcgcgcacaagttactagtttgtaataaagtaagcacgttggaattaattgccgagtgaaggaaaggaaaaggcaatgaaaaacaagaacctggttcttctcatacgtctctcctgtaaattaatcgccgaacagttcgtatattactggagatcgcctgctacaatgataatcaaccagcaatcaacagtaaattgcaaacgctaataccaccgtacgtgcaattgatgatgcatggatgcaactacatgctaggccttgttcggttaatcccgttacccatggattggatgtgattgaaaaaaattaagaagaagtttgacttgctcgtgattcaaacccacccaatcccactcaatccatgtggattgggagctaatcgaacaagcccctacatggacaggagcaggacgggactgtagcgtgtagaggacaatttactcaaaacgaatggattcatcccataaatgttaaatagccacaaataatcataaaaatgtgctgagtttgttggcgccggctgccggaatggctgcaccgacggcgatcggcgacttccggcgaactcgctctctctttctctgctcgggtacgcgaatactgaaaaagcagaaagcgctggaaacagagaactgaaacagagagctgttttgtgc

SEQ ID NO: 37809 - DNA, 1040 bp, Zea Mays
tacggctctagtccgtaagcacacaagtaaacagtaaatgacactagaccccactttgtgcgggacccaaacacagtgagagagtgttgtcacaataaccccaaaaaatagggcaaggagccctcagcacccgcggcgagctaagcaatttctccacgctttgcaccgcgcatcgcatctccccccttcctcggttcctcccctttcgccctacttgcttcccacgccagggcccgagctccgagctagggtttcctctctcgccgccgccgccgccgccgacgtcgacggagaagaggagtaggtgaagccgagttattagcgccaggggaggaacatggggacgccggagacgtcgcgggagccatgcccggaccggatcctggacgacgtcggcggcgcgttcgggatgggcgccgtcggcggctcggccttccacttcatcaagggcatctacaactcccccaacgggatgcgcatgtccgggggcgcgcaggccgtgcgtatgaacgcgccgcgcgtggggggcagcttcgccgtatggggcggcctcttctcaaccttcgactgcgccatggtctacgcgcgccagaaggaggatccctggaactccattatcgcgggcgccgccacgggtgggtttctctctatgcgccagggcatgggggcggcgggccggtccgcgctcatgggcggtgtccttctggccctcatcgagggcgccggccttatgctcaaccgcgtcctcgccaacccgccgcttcccgcggaggatcccaaccttaccgcggccatgggcgacaaccctttcccgggcctgccacaggcgccgccggtcgtggcacctccggaagtggcgagctccagcggcgcgggtgggtggttcgggggactgattggcaggaaggacgaagagaagaaatccagcgcgggcaagtcggagatcttggagagcttcgacacgcccagcagtccgataccatcgttcgagtacaagtgaggaaaaggaacacttctatgtcatgactcacatgctgaac

SEQ ID NO: 37810 - DNA, 1152 bp, Zea Mays
ctcacgacctcaccaccacgcctaaccggacccgaccccgaccccgtggttagctcgtggtcacccacccgagaagggaagaccccagcccttgtttgcgctgcgcagtgctttatatatacccggggctccactactccagtgctggctggcgttgtatgagcgtgggtggtggcgccgccggccggggatgagctgcaacgggtgccgcatgctgcgcaaggggtgtagcgacgcgtgcgtgctgcggccgagcctgcagtggatcgacggcggcgccgaggcccagggccacgccaccgccttcgtcgccaagttcttcggccgcgccggcctcatgtccttgctcaccgccgtccccgagccgcagcgcccagtcgctgctgtacgaggcggccgggaggacgatcgacccggtgagcggcgccgtggggctgctcggcgcggggagctggcacctgtgccaggcggcggtggagacggtgctgcggggcggcgccatcgccccgctgcccgagtccgactccgacggggcccgccgcggcgcgtccgctgtggcggcgaggcgggccgtggggtgctcgacgttctcgacggcgaagcgcgcgccggcgagcgtgggggcgccgccggagccgtcgtgcgacctcgggctgtggctcagccccgggtcacccccggcgaccggggagcggcgccggcggcggcggcccggcacgccgtccatgacctccgaggagtccgtgacgacgatgagcggcggcggcggaggcggaggcggagggagggagcccgagctgctgaacctttttgtctgagaatggccgacggtttggctaaaagccagcggccgatcgtgccgtgcgcccctcggcgcgcggtgtggtgtgcttgatcccggcgagaaaaaaacgtttgtttgtctaggtagccgtcgtcttgtccttcttcctttttgggccgcgcgtagaaaccatgagcgtgccggcggcagcagcgctctcccagccgccgtccgttagctagctgtttatttcatttcttcccaactttttcttggcagaagcgacgctccgtccgtcgctgaataaaattgtagaccaagggtaaagcgaagtggcgctgcatgcgtcgatcttatcgtcatcacag

SEQ ID NO: 37811 - DNA, 1008 bp, Zea Mays
actgcaaagcgagacttcccatccattccactccgcagtggcggcggcggcggcggcgaggtctctacgactttcagatctctccgaagagggcggaggggagggagatgtcgtaatgctgccggagggctgctgacgaagatgcggaagctggtgaagggcctcgccaggcccgagcccaggtggctcagggccatggaagaggcagcaccagtgacatttcctcgcatgatgggaagattaaggggtgtttgtttgggattataatctgtccagattatatagtccaacaacttgaacaccccctaagaagatcgagtttctgatgatgtgtatgttaggaagctaaacaaaaagaacatccggattcgctatgccatgatgcaatcaatggatttgatccaccaccagcacgagcttttgcttggcggtcctggagttgaaagaacaaggagtcagtgaagatgatgtgatggctgtagcagattagcaactggccatggtctcatattgctcctggcctatcatttggaaattcttgatttacaaccgaggaaaaggtttctcagcaagctgatcaagatgtattttgcttgcttcagaatattttgcttacagcttgcattgtgacatgttggcaggatgtcagtttcccttcaacttagctcttgtatgcatcctatgtgcttgtcgtatatccatccctaacttggctcttgtatgcttcctatgtgcttgtcgtatatccatccctaacttggctcttgtatgcttcctatgtgattgtcgtatatccatccctgtgatgaacattttagtaatctgagtgctcattcagttggtgctccctcctcatcactttgatgggaggttgaaggaaccaatatctgtgagtacactgttgagacctggcgttctgagggatatgtcatattggttgctcttaacattcaagacatttttcctttttttctttgctacaagaattttgtttttggggcgggggtg

SEQ ID NO: 37812 - DNA, 1837 bp, Zea Mays
cacgggcccaatctgagaaccctagcaaagccagcccgtcaatttccatccccttcgcccgcccgcccaaccaccatgtctcgacgcggggcaatgccatccaccgccccgcgcgcgcggctctcgccgccggcacccgcctcccacccgccgcggaaacgtggccgctctccatcggctcctggaagcacggcgtcgtggcgcgcgtccgccgagaacaccgtgcccctctaccaccgccgccgctggcacaacccggagcgtgcccctggtcgcgtctggcagcggttccgcgcgccccagcctgccttactctcctccaggctttggatttgctcggaggacgcctcgacctcctcctccggagatgcctgcactatcatgtcatacaacatcttggctgattacaatgctcggaatcatcccgacctttatttggatgccccctgggatgcaatgaggtgggattcaaggaggcgacttattattcgtgaaattaggcactgggatcctgacgtagtgtgtcttcaagaggtggataggtttcaggacattgctgcaggaatgaagagcagagggtacgaaggtatatttcagaggcgtactggagatactagagatggatgtgccatattttggaagtcaaaacagttacatctggttgaggaagatagtattgactttagtgaattcaatcttcgaaataatgttgctcaaatatgtgtttttgagcttaatggaacacacaaatttgtactcgggaatattcatgttttgtttaatccaaagcgcggtgatgtaaaactgggccagagtgctatctacaagttcttgtcgacaatgaagctgaacatttctttgcacgatagaaggcatttatctggacttgatagcactgaatttgggtatgagctttgtagcctgctcaagtatcaatggactgatgaagaagtgagaaatgccacagggtattcaaatgtcatggtggctgaacatccactgaagctcagtagttcatatgccatgttaaagggaaattcaaacaataggggtcttcatggtgaacccttggcaacttcctaccacaggaagtttcttggaactgttgattacctgtggcacactcatggaattgaatgctccagagttttggacacgttacctattagtgttttgaagagaacgaggggtcttccaaccagggaaattggcagtgatcatttgcccattgttgctgaatttgctttcacggaatcagttgaagatgattccgatgaagatgatgaatctgagcaagatgacgaatctgagtaagaaatgagcgaagcgcaatacttatttttctcctcagacagtgagtcccgttgaagtgactggagtgattcagtatttcagttggttaaaaaggttcgaggtaagttattcaagaacagggagtatggtgcaccagagactacattgcatctttcatggtccataaacagaatatctccggcttcattgcacaatgaatttctcggtatctttgcccgtgtactgtatgggatcctgctgttcacagaatcaagtatcacattgagcagaatcaagtaccacattgagcagaatcaagtacgtgctgctgtgtgaaagcactttccgcaccggatgtccactgaagcacgggcctttgcgctcgtcgctgaacattatgctatggatctggatgttaagcttagtatcttggttcgtgatcagaaaaaccactgctgatggatgacgtgctctgcctgctggatgcctctgttcatgtattgtgttttattattatatatgtgtaggtgtaatgaaaataatt

SEQ ID NO: 37813 - DNA, 2992 bp, Zea Mays
aataatgcaagtggggtcacggcaaaggtgtggcgcgtgcgtggacctcgccctcatctcgtctcctccggcggtccggcctgtccaataattctagtattccaccgccgcacacctcctgtcttccttcaccttcgcgctccgccgccgccgtcgattcgtgctgctctcacccctaacctgtccaacatcgccggggagggaagcagcagaagaagctccccttacctccggctatcgcctgaggataaagtggggtctgtaggggagtcttaggggggagcaaaagggataggatagggagagatgaagcaatcaatttcttcgtccgccttcgcccctgcttacgtccccgctactaaccctaggatcattctgtcttttctcgtttcttatccgactcttcttcgttttatgcctatcagttatgaggttgaacgccttcagaagcttctctactagattagtgtaaatagtagacttgttcgagtttagcttggctggaagaattagtctctggtccgtgtttatatctgctagcaataatggctgcgatgaacggagaggtattgggtgaatgtggaaggaacataaatagtctcaagagaaagcgggagagccccgctgcatatgctgctggcgtattctgcacctctgaattgcatcagcatactgtcaatgattctgctgttaggtttcatcttgataaagaccgtaaggcaaagatcgtgtgccacttcaacaagcaggttttgcagagctataagaaattcatgagtagtgcaccacctaagcgtattttgcttcgccaaggtgctgtctggaaagactttccagaaaagattgtcaaattggcccaagctgacttcagggcaaaaaagatgatcacagaaacaggatatcagaaccagctatttttgctggattttgcccatatgacattcatagacacaaagacaggttttcagaggccaattgcttggatcgatgaaaatgaaaagtgctacttcccggaatcatttatacaagatcagaagttatttatgaagaaagattttggcaacggaaatcatgagtacattagtgaagagcgaaatgggacacgagaaacgaatcaccagtttggagcatcagaaagttctgctgaaagctcaaactttgagtcaagtattggagatgtttctagtcctaagagagctagggctgaaaagaatttcattgtaaaaaaatattgtgatatgggagaagctattggagaaaatgagtcatgcactttgttgcctacagcctgtaacctactaccacaccaagctaatctgggtgaggtatcccgtgctcagcgcactattgaagccgtggagaagctgttgctgcaggggatgggttcagttattgaatccaaggacattattggaatctacaggactccattattggatgaccacggacaagtccgttaccatattcaccaaaagcaagtacaggttaccggatgtcatcgtggaaacgcaaatgtccgttatgcatggcttccttgctccaaaagcactgtgcatgtaatgatgctgaatggtgttttgcaagttgataagcctcccaataagtgtgcagcctatggagagggcactctccttacaccagcaaatcgttcggatgcctgtgtgaaatactctgatgttgatgaaaatggcattgtccgtatgatgttgtgccgtgtaataatggggaacgtagaaatagttcaccctggatctaagcagtgccaacctagtaataagtattttgatagtggagtagacgaccttaaaaatccacggcattacgttgtgtgggatatgaatctgaatagtcatatctattctgagtttgtagtcactgtcaaattgccttctaaaaccaaagattcctttgtatcgcaagaaaactgtcagaattcgtctgatctatcactggtgttgaactctagttcacctgattgtatttcacaggagatgaacctggaggcacctccagcattgggaggtggatgtgcagcccccatgctaggagattcgatggaaaaggctccaagctcaccttggatgcctttctccatgctgtttgcagcgatctctaccaaagtgtctcctgagaatatggacgtgattattggttgctatgaagagtttaagagcaagaaaataagccgaggtgaactagtgaagaagctgaggcatgtagttggtgatagagtgctaatatcgacgataatgcgtctccaagataaggtgtgaattgttctgcttgaaccttgctgatacagttatcttggattctttttggaagactgaaatccttttagccgtaaggtgtgtcagctggtggggttctgggatggaccgccagtccgccacgcaccgaacttctgaaggcctatatcttttgctgtgaacaagctacttttcaagagcatcagaacagcagtggtttgataacctgattctttttacactgttttctgaggaaatgcttcttttgtgtgtgtctatttggcagcagttacctccagtggataagcgtgaggaaccagacacatcggcgtccaaggtggtggcggaaccatgagatgggtgtcaggaggtgggcgaggaatgcagaaagggaggaaccagccgacttgacatagaaaaccctgtgggaagcagcaactatgaagcctcttgcatcagtcttgtgcatggaggctgctgtttgttctctgtatcgtaggtgtctacgtttgcgaggaaattgtatccggtgtttctctttcttcaaattaaaccacgcacatgcagctgccgtactttttggaccattgaagtgtttcgtccgtgaaaaaggctccttttaccttcccgtttgccttcctaagagcatctccagtagttttgtaaaataaaactccctaaaagacgatgtagagagttgctaaataataatagagagtaaaaaattgcatgttcttcaatag

SEQ ID NO: 37814 - DNA, 3065 bp, Zea Mays
ctcgttccttccccaactatcgttaggcttctccaccccgccctccccgccctccccgccgaacgcgcctcactctccctccatgcagatcaatgcgtccttccaccccaaccgtgctcctcgcccttctctcgtcgtcctcgttccccctagactggcgtggagtgaagatccatccggactccgattgatttcttctcctgctgaagaaacggagagattcggccaagattgggatcaatctgcgcatgggtcggtatcgtataagaacgtataggttgctgtcgctcaatctggaaattttgtattgttatgaccaccgtacaattttctccaatataattaacgacgtttcatgttgatatgttctgaatccgttctttgttttgctgaggtcccaacgttcacctgtatgcgcagttgcaggtgatcaagatccaatacttgaaaataggatgttgacatgttactgtttagatgacaccagatgataatgcccttatagctctcaaaaaaggcagtaaacttatcaagtatagtaggaagggaagacccaagattcgtgagttcagactttctagtgatgaaacatcattggtttggtattcccatagcaaagtgaagtaccttgtactgtcttctgtctctagaatcattcctggacaaagaactgctgtatttaggaggtttttacgccctgagaaggactacctatcattttctttgatatacaagaacggacaacgttcccttgacctggtttgcaaggatcaagcagaagttgaggtctggttttcaacgcttgaggcacttattacttcatgccgtaaaagttattcagctgatggtccaagtgatagattatcagtttctgacgaagtatcacattaccaagatacttttcatgatacaacactagatattgcatcgagtatcacacgtacttttaactcagcaaaaacagatgttgtatctgatcgtgcaaatatgctaagagcaagtacagacagtagccggcttagtatttccagtgcccctagttcttcaagtcaaggttctggacaagatgacattgaatcccttggtgatgtttatgtgtggggtgaggtgtggactgatatgatccctgcagaaggatccgcaaactatttgtgctccaaagcagacattttaattcccaaaccacttgaatcagatgttgtcttggacgtacaacagatagcgtgtggttataggcacattgcactcactactaggcaaggagaagtatttgcatggggcgaagaacttggcggacgacttggtcatgggaccgatgcagatattagccgtcctaaacttgtcgaagccttagcagtgtcaaatgtagaatatgttgcgtgcggcgagttccatacttgtgctataactgcctctggtgatttgtacacttggggtgatggatactacaatgctggattgcttggacatggtgctggaactagtcactggcttccaaaacgagtctcaggacctttagaaggggttcaggtattgtctgtttcatgtggttcatggcattcagcactgaccacatcaagtggtaaagtgttcacctttggtgatgggacatttggtgcccttggacatgggaatcgtcatactgtcgcatatccaaaggaagtcgaaactttgagtggatttagaacaataaaagttgcctgtggactctggcattctgcagcgattgtggagaccactaatcaggcaggtgtgaatgtgatatccaggaagctatttacctggggtgctggtgataagaatcccctaggtcacggggataaagatgctaggctagttcctacttgtgttcaatctctcattgattataatttccatcaggtagcttgtggacatagtatgaccattgccctttctacatctggtcatgttttcacaatgggcagctctagcaatggccagcttgggaatccaaaatctgatggtaaacatcctaccccagtacaagataggctggctggagaattggttgaagagatctcatgtggctcatgccatgttgcagtcttgacttcacgaagcgaagtatatacatggggaatgggagccaatgggaggctgggacatggtggtgttgaagataagaaaaaaccaactcttgtggaagcattaaaagatcgtcacgttaaaagtatagcatgtggttctaatttcacgacctgcatttgtatacataagtgggtttcaggtgctgatcagtctgtctgctcaggttgtaggcaaccatttggcttcacaagaaagagacataattgttacaattgtgggcttgttcattgccatgcatgtagttcaaaaaaagttctgaaagctgctttggcaccaactcctggcaaaccacatcgcgtatgtgattcatgcttcatgaagcttaaggcagcggagaccagcagcaacagctcacatagcaaaagaaatgccattgctcgtcgctctgttgatagcaaagacaggtcagagagaccagaaataaggtcttccaggcttgcaactggatcaacagcagaaccactcaagcaagctgagctgaaagcagttagaaacgagataaaaccagatcctatgtccacgatgagggcaccccaagttccttccatgctaccttttaacaatcttgcttttggcgcaacatttggtggtccagctagtctgaagcccatgacaatggctccaatgccaatggccatgcctatgtcaccagctcctctcacaaagaagccaactccagcagcagcaactcctctttgtggtaaaagtgataccgataacttgaagatggctaaacaggtgctgaatgaagatatctcaaagttgcaatctcaggttaataaactgaaacaaaaatgtgatgcccaagaagagcaactgcagaaagcggaaaggagagctgaacattctgcctctacagctgcagaagagtcttcaaggcgtaatggtgtcttggagttcattaggttccttgacaatgagtatcaactatcaagacttctatactccagttaaaa

SEQ ID NO: 37815 - DNA, 4244 bp, Zea Mays
cttcactcgcgcaggctggcgtcgacggcggtttggaagcagcaatctcgccataacagcctcttgtccagagcagaagacgtcctagtcagacgcacagcttggcctagtcctactgcttccctccctagcggtttcaagagacgacgattctcctccgtgttcttccatccttctgctgctccggcgtcacgtctcaggagggtttcttggaacggatctgagctgtgcagggcagggcagggcagagcagagcagcgaattcccgtttatttcttgagatacagttggtgaacaggtggagaagaaatcgagagaattcttaagagttcggcgggtctaggtaagccgcacgccggctggccccggccgcaccgacatgcagaccgaggaggggaagtcgcggttcgggcggtgcccgtactgccgcgccatgatctaccaggacctcagcgcgatcatcttctactgcagcaggtgccgcacgcccatccgaggcaagaacccgcaacccacggacgagaccgagtacgcgctcgctcagctcgagatcctctccgccgacaccgcgtccgtgttctccgacgacgcggagccgccaaatccgaggtcagcctgggccgtcgacgacgacggtgggcggccgccgctgcagagcaggtcagcagcgaccggaagaagctccgtgccgagcaggcagggcacgggagccgcgtcgtcctcgtcgtacagagagctcggtccggtccggacaggtccaagaagcagcggcggctctctcagctccggcctgaaccgggatcgccagacggaggccgcggggaagcgcatcgccgctgcacggtcgcgtgacccagctccggccgtcgtcgcggcggaccaggcgatcgagcggcggcagtgacgcgggatcgggcaccgaatccgactccgacgcgcccgcgccggctacgtcttacacgagccggtcgtcgccgctgagctcacaagaactcgaggtggcgacggtgttgtcaggaatccagccgtccgaccttacgaggacgccactcagcgacccggcgttccagaaggacctcctgcaggcgctggacaacctccggaagctcatcgccgccgtggaccacccgcgaagcatcgacgggcactggcaaggcgtgacgatgcctcggctgagcgcgtcctgcaacgacgagagcagcggcaagcgtacaataacaaggcgcagctcccggctcatgcgccgcctggagtcgcagctcacgcgggcgttgcccgccgagcgcccgcgccggaacgcgagcacttcgtcctcctcttcggcatcgagcagccggcgcgatggtaccaggccgcgggcgcaccaatgccgcccagtgctgggcggcgcgccgttcgttgtctgcggcgagtgttcggagatattgcagctgccgcccgccctgccggccggcagagccaccacgctgcagtgtggtggctgcggcgaagcgttccaggtgacgttgccgacgatcggctcggtggacctacccaagaagatcttttcagcgccgcagcctgctgtcttcgtcggacaggacgccgaggagtatccgctcgcgagaagcagcaacctgagcggtgaacaaccacggcctgcggggccgctgcaccgcgtgctggggtacagctccgtaagctcggttctacgcagtcggcggtacaaaatgcccacgctatctcactcggacccgatccaacgtttgcgcaagtctatcactctattggcagcacgggcccgcccgccggacaaacatatgatcgaacacctgaccgtctcccaaatgacaaatgacagcccatggagcatggccactgaatcttccgccgtcgccttcgctggcgacgcaaattccaccgaatcatggagcgcgcgggtgcgcaccctgacgcgcctcggacggcacaaggagtcgatagctcttttacgtcatggcggcccctcgccgccgccccacgcgcttgcgctcccggcctcggtcatctcctgcgccgcgctatccctccccaccggcgttgcccagatacacgcgctcgccgccaagcgcggcctgctccccgccgccgacgcctacctgctctccgcgctgctgaccgcctactcccgcctcggctgcctccggctcgcccaccagcttctcgacgaaacgcctattgagtccacatcccacaccacgctccgcaccgcgttcaactctctcatctccggctgcgcccgccactctctcccggtggcttgcttcgctctcttccgccgcatgcgcgccatcgcggtccgcttcgacgcggtgaccctcctcgcgcttgtccctgccgcgccactgagcgtggtgccgcaggtccacgccctcgctgcccaagtcgggctcgccaccgaaacttctgtggccaactgcctcatgtccacatacgcgcgcggtggcgcgttcggcgcggccctcgcccggagggtcttcgacgagatgccgctggcctcccgcgacctggtgtcgtggaacgctgtgctatcagcccacgcgcagaacggcctggctgtggacgccctcgatctctaccgccgcatgcgtagccccgaaggcagcggggtggagccggacgccgtgacgatcgtcggcgtgctctcctccgcagcgcacctgggcgcgcgcggtgtgggtttcgatgctgagcactacgtggtccagaggctcccgggcttccgcaccaacgtgcagctgtgcaacgcgctaatcaacttccatgcgcgctgcggtagcctgccccgagcgcagcaactgttcgacgaaatgcccgcgaaaagcatcgtgtcatggacggcgctgattactgggcacggcatgcacggaaatggtggcgtcgccgtcagcctcttcgaaaggatggtgtccgaaggcatccacccggacaacgtggcaatggtcggcgtcctctccgcatgcagccacgccgggttgtacgacgaggggcgcatgtacttctcaacaatggagagcgtctacaagctgcggcccacactggagcactacacctgcattgtggacctcctcggacgtgctggccgcctggaggaggctcgagagctcatctcatcgatgcccatgcctgccgacggtgccgtctggggcgcccttcttggtgcgtgcaagatacacaaaaacgtggagattggggaggaggcctttgcgcgcgtcgtcgagctggagccgaggaacgtgggatactacgtgctcatgtcgaatatatacaccgacacggggcagctggactgcgtcgcgagggtacgggcggtgatgaggaagcgcgggctcaagaaggagcccggatgcagctacgtcgagcacaacgggagggtgcacctcttcatggccgacgaccactcgcacccacaagcgaggaggatctacgagctggtgaccaggctggagctgatggtgaaggagaagtcgggagtgcgggagagcgtggtggcggtccccaagggacgcatggagaaggaggctgcacagccgctggttgggtttcacagcgagaagttggcggtggcgtttgggttgctgaacaccgaggccggcagtgagattgtggtgatcaagaacctaagggtttgcggggactgccactcgttcttgaaggcggtttcggccactaccaaccggtcgttcctggtcagggacgcgagccgattccatcgcttcgatggtggggtttgctcctgcaaggattactggtgaagggcctggtgctgggctgctgggtgtgtgagaccattttttgcctttgaacaaggcgctaaatgggatgcgcacgtgctgatacagacgtgatacaaagtccaaactacaacgtcctcactcccgggggacgccgtctctgctgtcaggcggtacaggttggaacttgaggaagacgagaggagcactagatcagggcacttcgtgacgaattaattccagccaaactcactccgttctgaatagtgcctagttagcgtggatactgatcgcaggcatcggctgttggttggagaatcgaaaccctaaccctaattcatgagttgggtctctattatatagagtcaagtggaccaaagcccattacgaaggggcaaaacatgtaactcctatacaacactctaacaccatcgcaattttaactctatctaatacagatgttgaatggatcaaaaatcggcgaaaacaatc

SEQ ID NO: 37816 - DNA, 845 bp, Zea Mays
ctggaactggaatgtatataccacggtggtttgggattcctgcacatacatatcgatttgtaaaagagaccaggaactatggggctccagctattggggcaggacgtggtagatgtagcttctgtggaggcaggatgggaccaaggcgtgaatttggtgagggcaatggcaatggtgttgagggaggttatggtggtggtggatttggagatagtggtttcccgcggagggaggaaggtgatggaaaggctatgggaagaggccatggaccacgtcagccttaccgtggtggtggtcgccgtggtggctatactgatagtgaggctggtgatgagtctggtcgcccccctcgccgggcctatgagcgccacagtggcacaggtagaggttatggaatgaagtgtgaggtgcgctggccgtggcatctggggaattgtgactgatgaagcccttgcacaagaaacagtagaaactgagggggctcctgctgtggctgaggctgaaaacaagctggaagaagcaccacaatctgaggttgagaagggcaaagagggcgaatcaactgaagtggaggagcctgaagataaggtagttgatatttttaaatgtgagtcttgcacattcaacaaattgttggctctgcaagtgctcaatttcacccagcctatagatagcttaggtagcagcgtcaaggaagctgctgcacatttatggctctctattaaaaatacgaacacacttgatctaccgtaggcatgtcacatggacatacaacatacctcagcatttttttgagagcatgtgttgtgtggtttctgtttactaattgagtttaatgagatgct

SEQ ID NO: 37817 - DNA, 1895 bp, Zea Mays
ccctcttcctcttcccaccttccctcctcccttctccaatcatccctttctggctttctcctcccccctgagaccccgagtcctgccggattccgagatcccggaggcagcttcccacgggctcctctcactacggtagctggatcaaaccatcgtgctctcgtctcgacagaaaccccggccgaaaacccagccggacccagccctgttcgccgcgcgcgcggtgcccaggccgtgccagatctgcgagatccgcgccgacaccgctacgactatcaccaggtggatgctctcgtgatctctcggaggccgcggggactgagcagcgtctcggcggcggcgtggcctgcatagccgtcggcgtgccgagatgcaacggaacggggtggtggaatgcagcgtgtgccgctcccgggtggtggtgccgagcccccggagcgtgtccagggcgtacgacaagcaccgcaacaagatgtcgtccaagttccgggcgctcaacgtcttcctcgtcgtcggcgactgcatccttgttggtctccagcccatcctagtgttcatgtcaaaggttgatgggaagtttcagttcagtcccatcagtgttaactttctgacggaggttatgaaagtcatctttgctgtcgtcatgctcataattcagtctagaaagcaaaaggttggagaaaagccacttttggcacgttcaaccttcatacagttgtacttcaatcctgcaactgtgaaaatgctaagtaacctaaaggtactggttatagcttttcttctgaaatttataatgagaaggagattctcagttattcagtgggaagctcttgctctattgcttattggaatcagcatcaatcaactccgaactgtacctgtgggcaacacagcatttggtcttcctgtcactgctattgcgtacatatatacattgatttttgtaactgttccttcagtggcttctgtctacaatgaatatgccttgaaaagtcaatatgacactagcatctatctccagaacttgtttctgtacggatatggagcaatattcaacttgcttggcattcttgggactgtcctattccaagggccagagagttttaatattcttcgaggccattcaagggccacaatatttctcatatgtaacaatgctgcacaaggcattctatcttcattcttctttaagtatgcagacacaattttgaagaaatattcgtcaactgttgccacaatatttactggcctagcttctgctgcatttttggggcattccttgaccattaattttctcctgggcatatcagtggtgtttatttcaatgcaccagttcttctctccgcttgcaaaagtcaaagatgacaaaccagctgactcaatagagttggaagatacacaaaatgaccgcccatctgaatcttcttttgtaaatatgactgctggtgccgctgatgatgcaagccatcggattggaactgatgagaggcagccgctattgcctatatgaacttgtttgttgaggtaggacagaagagaggggatagaagaagaggctcctttttgccgtgtgagcaacagatttgatgtagcattgttaggcgaataaacagctattgtacactgtagaggcaaaagaaacaaataaacgtggtttccattttctttaaattttttggggataccttgggagcggcagaaatcatacattttgatagacataattcaatagggatttctagatacgatacttgtcaaaaaaaaaagaattcatggagaaacaacggctgtgataatggtttttttaggaaccttttctttatacaattatactattgattaattgttatactattactacattgttacctgattctccaactgtgtccagtgtt

SEQ ID NO: 37818 - DNA, 1027 bp, Zea Mays
gagccgtgaccgtgggggcgggggggctgacgtctcctgttctttttaggaagtggattactatctccaatcccatgcagataggcttcattgcaagatctccgattagttaagggcaacgcgaagaagggggtctcttgccagttgccaccagcttgagcttctcaaactgcaggagcagcacaaggatcatcgggaggaagagagtcgccgtctcgccgactccgggctcccggaccccgcactcgccatcacgcaccctgcgcaagcagcgaagcgtccgcttccacttccacatggacgacgccgtcaacctccttgagtcgctgccgctggatgtactgataaaaatcttgtgtaaggtgaactacagtgatctgaggcaccttctcctagtgtcaaaacaagtcaaggaagcaacaatttatgctagggagctgcatttcaagttttcgacgccgtcggcgaagcccgtttttagagacgaggaagccggcggtggcgacgacacttgcccttgcgcgcccaagcaacaccgggctgcaaagtcacgcttgcggggccagaacctagagagaatcgccgtcaacctgtcggcgtcgtacgagagcatgctccccgaggtctagatgtaaatatacgacatccacatgttttcagtttgtgatctattcgtgcttgtatctagtagtttcaggttacaagtttagtgccttttgtagcccacgtcatagagaggctcctagatagtgggaatagtatactcggatgcgtgattactagtcttaagtaattatagatatatggtcgtacgtagttcttcaatgttgtgattgaagaacacacgcgatgtcttctctaatcttatgcgtacttatatcttgtattttatttatcgtcaaagagatgtcaattctcttatgcgtacgcatgctgcaaaaagtttatatggactttgtattgtggacaagaaggtaaaactcttagccacatcgatgaattttgacccaggttaggagcaaaattg

SEQ ID NO: 37819 - DNA, 1642 bp, Zea Mays
tttgtcgttcttttggttctttcttccaggactcatgaattccacagcccatattctgtaaaagtttttgtgccatgcccccaaaatgcacgggtgactctgaaggttgatctaatatttgaagaatatgttggtcttgatgtccacaagaagcatgtagtaagcagggaagatggtttgtacgtgaccaaggagcatgggatagataaccttgaacctacgtacaatatcccttcagagatttgtttggttagctccaggacaactcgaacaagccgatctcaatctcacactgaacagaaccctctttccaaagaggtttatgtcatagaagatgatggcgctgctgtgagtgctgtcagtgctctcgagaaagctgatgatgcagtgggaaccataaaatttaacaacttggcttcactggaggtcccaagctttgatctactgcctgaagaagagtatggagctcctggaccagcagaggcagaatgcaaaggtgccacagacagcacgatttttgatcacatacgcaaaaagtccaaagacttccccactctgatgctatcaaaatccatggattgctcatatgaacctcttatactgaagaagatgaagatatcaagggaccagtttggagtaaagcatggttgtctgcatgcgggtgaggccaccacaatggattttgatcctgttgagcctagggtctctccaaccaatactgctgagaagttccgcgggatcctgggtagaagttcagaaaggagtcgcatgctgtttggaaaaatggatagcccgtttgagaagagcgagatgctgggcacgacgccagctgaaagttctcttcggttcgcgggtggaaaagacagctcactggagaagaacaagaccctgatcagaactccagctgaaaactctctccaaattgcagcacgtggaaaggagagcaaggtgagcaaggtgctgacaaatctagataaaagccctcttgggtttgcgggtggaaaggagagcaagatgagcaatgtaccgagcacttcagctgaaaactctctccagtttgcagctaggcgtgtcagatcatctgagaagagcaagatgctgacaactccatatgaaagctctcaagcgtttttgggcgaaaaggacagcccatcggagaaaagcaaaatccttattaatagtccagttgagtatcctttcaagaaaggaagtccaggtgaaaatcctttcaaaacatgtagtccagttgaaaactccctcaaatttgcagctcaacgtgacagcccatctgagaagaggaaatcctgcatcagcaatccccttccgcccttccagcaggctgttcaatgcacaaagcaagtaggagttgcaggtcaaccctttgatattaaggaatattgcaaggaaatattgaggagcagaaatgacagtcaaggaggcgatccttttgctggttacaagagtatcttttcttttctatgatctgctgaacagctagcaaatatgatcctgaacaatgtacattatgacactcaaataacagctagcaataatctttttcttgtcattgctgaccatcttctgcccaaagtaggaacataaaatgcatgtgatttggtcaaagtgtgtaaagagttgcccc

SEQ ID NO: 37820 - DNA, 546 bp, Zea Mays
caagcgacgcattgcgtcaatggtcttgcctcgataatgtgcaagtaacagtaaaagtcacacgttacagacctggtgcgtcgcacacatttaatgcaggatacccgttgtcagcgtgggtaagtacgcgtcccatctgcactcaatgcttgtgcgcctttatgccataggtttatgtcaggtatgtcttgtccacacatcaacaccgaactttttgtgcccactgaagttgctgattccttccttagcccatcgttggactagctgcccatgtgtcacacccgcgttttagggacccagacgcgaaggcaatcaccaggtgtgctgagaccaagtctcacacatatgatgaatcatggtacagaaacgaatgtcacatatttactatataaaaggagttctgtacaaaataaataaatatttatattacatgaagacaacgatccagtaacccaaagctgactgggagacgacgacctagacctctcacgaactcatcacgtcatcctccctgcgcctcatcctgtggtacctgttcttgacctg

SEQ ID NO: 37821 - DNA, 2610 bp, Zea Mays
gcaccttacaagagagaagtcggcccaagtagcgtgcgcgcagaagctactcccgaagagtcgctctcctgcgtccacgcctcgcttgcggcgactagggcgactgccgccgccgcccttcgcccagctgcccaggtcttcgtcgggcgctttaccggtgaagagcgcccaccataccaggccccgcaccttttaacaagttccagtcgtggcgccgagccctactcctcctcccgccgccgccgccgccgccgcagactcttcctcgcgactcgccgctcgcccgactttccgagctccgacaccaaggaacaccatgggagagtcgagcaaggagctcctggacctgccctccgaccccaggcctcccgcctccttcatcgagtcgcttctcgctggcagggagcagcagcagcaggataaggagggaaagcgtaagttgggggcgtccactgatcccctgcccaaaagccaaggtactgttgaactagctcttcagcttgtacaagtgtctgatcagaaacgcggtaaggccgtaagggggctaaatagaagctcgaaatctttctagcggcacaatatagataaataatgatatcaatttcattgcctgcagtcagaaaatcataatgctacatgcaactttaagcagttattaagtctaaactaagcagggccacttaaaaaagggtgcatacccagtgccggagctttgtacatacagggatctaggaactgaggcaagatttctctcacgactgcaccagtcctacccttcaagcagggacacttaccagaagtttttttcccaatggtgcagtcagcaacttgtcctttgcattaggtaaatcatgtgtctctagacaggttccaaaacttaccaacatcagaattacaaatgtccaacaagcttcctatcctctacaataagtggcaatgcaaatagaactgatttgtgttaaaaggaggaccgtgaaagcggaacctgggacaggattggaacacagcaggttgtcttgcatcagcatttggcaaataatgaaaaaatattgaaaatcctgagatagtagccctcttacttgtgtgatgcggcaaacatgcttttctgtgttccctgtcgattcgacttgggtgtttggttctcggttgtgaaccaagttactgtggcggcagtggatgctggaacagttgcagatgcaggaatagcagaagcaagcaagcaatggtgttggtgcaggtggatctgtgcagtgtgcccactgcccactgcctagccatagcgtcagctagcccaagcagtgaggcctgtggaagaggaggtgaggtctcgaggggtgaggggcagagggtcgatggtgaggccgggaggtaccaccgcaccagcgtgaaggagaacagatacggagtggaggggaggcttctcgctcggcactcagagaggtgggcagctgccaattcagctagggtggctggagtccttttgtgggctgttcttggattacacagaagagttgtagtggaatttttctgggctcgccccaggctgcagccacccccagccctggggcctgaatccgcctctggctcgtacagtactttttgtattataacatttgtcgactagccctagatcccaagttatcacattacctttttatttgtactgtatttccttatagtcttaaatcacaccactgaatcatgtagtttcctaggtttaaggctgcagtacggcatagttagtaggtggtacacaaaagaatttctggtgttcttttgtgtgccagttcactgaattttgattgattgttttggtgtgtcagttatcgggaaagtgaaggatttcttgggggagattgcaagggccaaccagaagttgcagcttgatgcacagaacaagcctcctgtggagtacgatattgaagcccttactgggaacgaggaggaatacattgagatggatctgcttctaggtgtcgctgatcttcattcagagcaggctgtggaggcagctgaagcaacaataaacggacgccagacttcagaaatgtcatttgctttgcagctcatctgactcggaagatgatagtgatgacagcgatgaagatgctgatgacaaacctctcacgtctgacaaagataataaatgtaaaagtcctgatgatgcggagatgggtccagcgaaaggaaagaagcccaataaaagacagaaaattgttgttctcaactagtacccttgtcttctgtacacctaagaacaagggctggagcgcaagtggtgaatgtgttggcctggtattatcagaagttacggagggactctctctgttcttttttatttgtcacggtttagtttaaaaatgaacaggggacaaatattcgagaagggaggttgtatttttttcagtgttgtgcaatgttcaggccagctagggcaacgtgcacgggggctaaaagaagtaatgcatattccagtttatacaatgcgttccaatgttctggcctctgtatggtttccttgtgattttttaggtagagaggaagtttccttacagcgtgccataaataaatcctgcaaagcgtcaatggtgtttctttcatggattcaaa

SEQ ID NO: 37822 - DNA, 761 bp, Zea Mays
agcgagcgtaggaaggagagtccaacgaccggccatggcccaattagtgaagatattgagccaggacggcgacaagttgtacctactatccattagtggcgatgatgtcgttcttgcgcgtgaagatccccgtgacaaaacgcagcaatggttcaaggactactcccgatccagcaatttgaccgatgataacggccgaaggacattcgcgctggtgaacaaggccacacgacaagcaattgtgaacagaaaagatacaagcatgcaaagtgatcttcaatatcgtcgcggcgacgtaatcaagcaggtggaactggccccttacaactatgatgatcgtgtggatatctccatgctatggaccgagctcgcggagaacggtaacgatgacggctttaacataattgcggtgctcagcgacaactctctgatgctttgttggcaacatgacggcaataatgtcagtacgggtcagggcatggtaaccgttaactatttttctggtcaaggcaaccggcactggaagatagttcccgtaggccgcaacgcgtggtgaaggttctgttaaaacgcgtcactaattagatttctaaagcttcagactgaatctattactgaagtgtgtcgtccattataaaacatgtcattaatattgggtcaaaaaattccaaaaggcatagtgacgcgttattacttcaaaaacccttcactaatgggtgttattagtgatgaatatttacatgtcactaatatgatttaag

SEQ ID NO: 37823 - DNA, 2023 bp, Zea Mays
gtggtggttgagtcctccgctaccgtgacagcctgcgagttcgccgtccgcccgtccgcgtcctgccgacctcatccacgccggcgccgcgcccgcctccgcgcccgcctccgcggaccgcatattcgttgtgacgccatcagctgcgccgcgcgtccttaggcctgcctcagccgcgtcgccgcgcccgcctcaggttgcccagcccccacgcgcgctgcgcctgcctcagtccccacgcgcgcccgccggcggccggcctcacgcctcagccctcaggcgctcaggctcagcagcgcctgcgccacgtgccgatgcgcgccctcctggccgccgcctccctgcttcgtggtgcctgcagcctgcctgtctggtgctagccgcgtcgccagagggatcaagaggcctggcctggagccgtcagcgtggtggcgcctcctccaccccacagcacccatgtcctccgcctcgtgcctcgtccatcccgctccaaggttccgggttcggctactgcctctcccctcctccgtcgccgcgaggccgttgcttggcttcaggcctcggtgtggggctccagcgaagggatgggcattgtggcacgtctcatgcttcagaaatggtcaggatgggccaacaacatctgacgaaggtgatgacttcaagtatgttgcccaatcacagagctctggtggtgcagaggtgaaaaaggaagaggtgagtagcttaaacggggatcaggagcagaatttgaaggatggcgattggttcctgcaactgcagaagataaaagaaaatttactaggcaggatagtaaaatttcagacagaacgctggatagtaccttggactggacaaaccattgctcaggtgatgattttatggatcgccacattttggtttgtgggttcctggatagtgccattgttggctcatgctgctgggtttagcaaggaaacattgacgcacagaggccaggcactatacagtctcttgacagacataacagagggccttgccgggatcgcaatccttcaccaatgccttggtagattccgaccccttcctccagggtggttcgagttcaatctgaagggcaaatggcacttggacgtagcatttgggtgcctgctattcccactagttaatctactctcacacataaacatcagcctagttccagcgtcaccaggtccagctgttggggtttccagcgtagaacagtccatcgtggcccgggatccagtggcaatggctttgtatgctgtggtagtcacggtatgcgcgcctatatgggaagaaatcgtgttccgaggattccttctcccgtctctaacacggtacatgccactcccatggtcgatcctagcgagcgccgctgcgttcgcgctcgctcacttcaacgcacagagggtgatgccgctagtgtttcttggagtggtgatgggaggagtctttgcaaggtcgcgcaacctgctggcgtcgatggtgctgcacagcttgtggaatggatttgtgttcttggatttgatgaagtgagcagctgagctggagttattgtttcggttccaaccttggacatatctgcttgagcctcgtctgaaaatgttttggacaagattggttctattcttttttcaggattaaaagcaaggcatctaatgcagcggcggaacagaaggagtcgtgtaagtctgaagcgaagagggaacagttagtgcaggaaaatagaccacagaacagaagaaatgtttatttttttcagaattttgtgtagaatgatcagtcactgcagtcttaggacctgtgcccagcttccataagcatctgccacatttttgtaaattgcataggcgggagaatatttgtctcgtcgtgtatagaatcccccccccccttggaaaggagatatatatggtttcctgccattcaatgccatgctttaggggtggatattttaaaaccgaaaatcgaacccgaatagaccgaattgttggtctattcgggttttcgggttcagttccta

SEQ ID NO: 37824 - DNA, 1778 bp, Zea Mays
atgccttaaaaactatggggcacaacgagatgtttttttaaccaagccaaaaattcgtccggaatcgaacctaggatctggaggtgctactcggaagccttaatcattatgctagaggcactttcgcatttctgttgacaaatgacagatgtaattttatgtttttgaccctatgattgtatacgtattgaatctaaaaaagctaaggcagcatatcaaattatcttttgtgaaatattgaattcatgctcttgctttcttttgcataagtctaatgtcattggttttatcttcagctttataccaaaaacctacatctggatgaaaaagtcgatcttcagactgttgctgcgttctgcaatggctatgttggagctgatttagaagcattgtgtcgagaagctgccaagcttgcatatcatagaatgttaaacttatgtgagggtgacaaagtacttaaactacttatggaagactgggaatgtgctagatctatggtgggaccaagcataacaagaggggtaaccaaagaaatttcaattgtttcgtgggatgatataggaggcttgaaagatctaaagaaagagcttcagaaagttgttgaatggcccatcaagcatgctgctgcattttctagacttggaataccaccagtccggggggtgctgttgcatggcccaccagggtgctccaagactactcttgccaaggctgcagcgcatgctgcccaagcttctttcttttctttgaggttcatcaggaaacaacattttattttacgaaaataacagttcactttccgttgtgtgaagaacatagaacttttagcccacagtatttaaaacagattaacataatttacttatttctgccagttgagttaatatcctgtacccagaagtcagcgaatgcttgaaaataatcaactaaaacatgttcagataaagatactctcatcaacactcactagcttttcacataaattcttataacagtggtgcagatttatattccaagtatgttggagaaggggaagctctgttgcgtagaacatttcagaaagctcgtcttgcttctcccagcattatattttttgatgaggctgatgccattgcccccaagagaactggccctggtgggaattctagtggcaatgccacagtcggagaaagacttttgtcgactttattgaccgaaatggatggtttagaactggctacgggaattatcgtattgggtgctacgaatcgcccaaatgcaattgatgctgctcttttgcgtccagggcgtttcgataaggtgctgtatgtcccgccaccagatgtggaagggcgacacgagatactacgcatccatacacggaaaatgaagttgggagaggatgtagatctttggaaggttgcagagtgtaccgagctattcaccggtgctgatcttgaaggcctttgcagggaagctggaatggcagcattgagggaagatatctcagcaagtttgatacatgacgctcacttccaagccgcacgaagttcattaagcccctctcttacaaaagcagtagttgatgagtactcaaaggtagatataaatgatccatcgagtaggaaacattgatatgttccttttctatttctttgttgcacactaggcgcaatacacatttgcaaccttgccaccaagacacacagatggagatagagagatctttttaagaatattctttttaaaccaatcctcttaccgtcagctctggatgttatttaaaaaaaatgccctca

SEQ ID NO: 37825 - DNA, 3922 bp, Zea Mays
gagttgtctgttgcctcaccacccctctgtccctgcttccttctgctcccgcaacgggtggcctccgttccccgaccccgcccgactctcccacacatctccggcgctctcttcgagtcctcctgcagtcccgccgccttctcatcgctaccaaaattgcaaagccggactggaactcgcgtcgcgcgcaggggcatggacccggacgacgaaccagcggcgcagcggaaagccgtcgacttgcacctgccgcgcgacacggagcctgcctcctcgcccgcgtgcacccgccgcgccgcgccgcgcgtgctcagctactgtgacgtccctttcgcctccgcctcggcgcagcgctgcgcatcattcccgcagcgccacggagagctggcgcacgcccgctcggcctccttcgcagcctggatcgaaggcggctcggcgtcggcgccggcggcggcactcgagcgggccatgtcgcagtacggcggtgcggacggcgcgctgccagagttcgtcggcgccggcggtggcgagggcatcttccgcgtgccgctccgcgcggcgatgcacccggcgcgcccgccgccgctcgaggtgcggccccacccgctgcgggagacacaggcgggcgcctttctgaggacgctggcctgcgacccgcggcgacggcagctgtgggcgggcgccgagtccggggttcgagtgtggggcctccacgaggtgttccgtgggtggtggccgggcgccgggccgcggcgccgcggtgacgaggaggccgcgccgttcagagagtccgtgccggtcccgcccgcgctctgcgccgctgtcgacggcgctaacgggatggtgtggacggggcacagggacggcaggatcagggcgtggcgcatggaccacgccgcgcccgccggaggatactccgccggcagtgcgcccatgttcaaggaggccctctcgtggcaggcgtacagtcgcacgccggtgctcgccatcgtcgtcacgttgtacggtgaaatttggtccggatcagaaggcggtgccataaaggcatggccttgggacaccattgctaagtccctctcatttacatcaggagaacgtcataacgctgcctcgctggttgaaaaatcttatattgaccttagaaaccatgctacaattggtaacatgtgctcattgcctgctgctgatgtgaaacacatgctcgcagacaactgccgagcgaaaatttggagtctaactagcatgacatttgctctttgggatgctaagactagggaacttttaaaagtatttggcatcgatggacaagtcgacttagctcgtcctgaggccccagtaatgcccgaacaattcatagaggaagagattaaagtaaaacccacaaaaagggagaggccgcaaggttctttcacattttttcagaaatctaggaatgccttgatgggcgcagctgatgctgtacgcagagttgcaacaaaagggacatttgtcgaagataatcggcgaactgaagcagtggctcaagcaatgaatgggacaatttggtctggttgcacagatggttcaattattgtttgggatggaaatgggaatagactgcgagaatttcattaccatagttcttctgttcgatgcataaagacactcggagacaaggtttgggtgggctatgcaagtggcactattcaagttgtcgatgtcgaaggtaaccttcaggcaggatggattggtcatagctgcccagtcatagacatggcaattagtgattcttacattttttctttggcacatcatggtggtattcgaggatggcctctaagttcccctagctccctagatgatattctatgctatgagttggctagcagggaactgttatacacaaggctagagaaccttaaaatactggttgggacttggaatgttgcacaagagaaagcttctcctgaagcactaaggtcatggttgggtggtgcattttttgatgttgggctggtggtggttggtttgcaagaggtcgagatgggtgctggagttcttgccatggcagctgccaaagaaagtgtagggcttgaaggcagtgccaatgggcagtggtggatagacagtattggcaaaacacttgatgagggaatatccttccacagagttggttcaaggcagttggcaggactacttattgctgcatgggcaacgaatgaccttaggccacatgttggtgatgttgatactgctgcagtgccatgtggctttgggcgtgctattggcaacaaggatatgttttgtaaacaatcattttgctgcacatcaagagaatgttagccgccgcaatgctgattttgaccgcatttatcggacaatgactttcaccaaacctcagggatctgcagcttctgctacagctgtccaattgcataaagcagtgagtgctaatgaaaatcaagcagatgaaggtaggcctgatctggcagaagctgatatggttatcttccttggtgatttgaactaccgacttgatggcatcacctatgatgaagcaagggacatggtctcccagaggagctttgactggcttagagaaagggatcaacttcgagcggaaatgaaggcgggaaatgtgtttcagggaatgcgtgaaggcccaatcagatttcctccaacctacaagttccagagacaccagtcgggtctctcagggtatgattcaggcgagaagaagagaatacctgcttggtgcgacaggatactgtatcgagatagccgtcctgtaccaatagctgaatgctcattagagtgccctgtcgtcgctgcaatcacagcgtacgaatcttgcatggatgtcacagacagtgaccataaacccgtgagatgtacattcagcgtcgatattgcaagagtagacgagctgataaggaggcaagagtttggaaaaataatcgaatctaacaaaaaggttcgctctttgcttcgagagctccgttctgttccggacaccgtcgtcaacgcgaacaacattacattggaaaatcaccaagaagatgtcatcctccggataactaataactgtgaaaccagcaaggccgcttttgaaatcctgtgtgaaggccagacagtcagaaagcagggcggaacccaatctgaggagctgctcccaagggcgtcctttggcttcccactttggcttgaggtccaaccatcgatgggtctcatcggcccaggagaaacagcggaagtcgtcgtgcgccacgacgacttcctgacgcaggaagagtacgtcgacggagcacagcggaaccggtggcgcgaggccacccgagacctggaggtcgtgctctcggtgacagtcacgggcagctccagctcctcggccgaggccgtcgcgcacagggtcaccgtccggcactgctgcccggcgcctccggctcccctgcccgccaaccggcgctctgccgctgcctcgcctcgtgacgacgttgccgcgtcggataaccagtcgaaccacctgcaccgttccgatctcgccagcttcggtagctcggaggtgcgtgacctgtgcgggggcttgtgaaagcgagtttcgctgcctttgcttcatcgtcctgcattcctgctccttacatgtgcgtcgtcctgccgttctttgcgtgtcgaatcaaaaagcgagagagaaagaaagagagaggaaaaaaaaggaagaaagaagagagtgcaattgttgtaattacctgtagtaggtaaaattttcaagctaaccttttttttttgaccttcttaagttaagtagtagatgtggcattgaaattgtgttggtgcaaagtggagtgagtgtatggttgtatgtatagtaatggaggttgtatgcttgtatagtctattgattggacgatgctttgctcctactgcaatacagcgcaacgagaac

SEQ ID NO: 37826 - DNA, 1010 bp, Zea Mays
agctgagtataatcgattcggatcgccgtaacttcgcgaatatgaagacttggtcactgacctatacgtagaaatccagtaaagatgaagggttgttaagaaattgactagtgcaggtcaattgattgaactagggtagaaagaactctagatacaagtaatcttacctaacttgacaaataaaactggattttgaaggatccactttagtaaacatttctgcaaacagagtcattgattattgataatccttaccttgactcccttaaagccagcatatccttgagagtcttttactttgtcgggtaagtcttgcgaaagtacacttcgtactcagggctttgtcccatgttgttttaggtgaggaagcgacaaacttttgttgcttctgttcaaaggtggtacccaaagaagagaaccaagactagagctgcaggagggaaggccctccgttaaaaacttttactgtctatttggggaggagtttttgcctcccatggtttgtaataataatactctgcactcgtatattatgttctggtctgtaaatctataactctgtcttacttttcaataaaagtaagttattgtaactgcttccgcacttccgcatcttcgatgaattgtaatgtctgcatgatgggtaaaacgctcttgggaaggtaaggagttcagataccgagcttgtcaagtgatcaggtgcacctgcagggttgtctgaggtccgttggacaaggacaattgtaggtggtcctagtgacttgggaggttccgtcacacaaggtctggcttatcaataatcaaagactctgtttgcagaaatgcttactaatagtgaatccttaaaagtccagttttattaccaagttaagtcattacctgagttctagagttctttctaccctggttcaagcacttgacctatactagccaatttcttatcaacccttgttattcactagattgctacgtgtagggcagtgaccaagtcttcatgtccgagaagtaac

SEQ ID NO: 37827 - DNA, 916 bp, Zea Mays
cacatcacaaaatttcccctcgctcctagcactcgagcactcaactgtcgcaccatcgggacgccgcggcggcggccagcacgttcgaggctgcggcggcaaggtgggctgtcgtgcgaggtcagcgaggacaggtcgtctgggagcacctgaggctgtgcgaggtgccggcaggctatgacatttctagagtaagtaatactctgggggcatctcccgctcgcttagctgtgcccgccaggccatggagcgtgaggacgccgacggcgctctcgattcgtgggctcaattctgcactctttccaacgagcttctcgccggagacggtgatctcgccgtcggcccacgcctagctcccgtcgttggtgacctctgcacacgcggcctcgccacgctcgtccgcgactacttcctccactccctcgaggaaacatttcgaaaccatgcagtcaagaagttctggcagcactttcatccttattgcagtgcctcaaccgtagacagaattaagttctgtgttaaggaacattggcctgaagaaatcttaagtaaagcactggaggacatatgcttggaaaggggttaccaggaaaaatgtgttcttgttcttgtccaagttttacaatcatatgaggataggatgccacgaaaaaaaatcaaagaagtggtctgtagttccagcttaatgcctaggtatcagttaatggtatcatcagtacttctgacaacactgcccttgagctttcctggcaccctatgttgccctgatacggcgatacggatatgcgatacgccgataccctgatacactatttctcaaaaaacactgatacggcgatacacaatatatattataaataaaattaaatgctgaaaaaatggaccacagctgaccagttcaatttaagggcatcaa

SEQ ID NO: 37828 - DNA, 2051 bp, Zea Mays
agtcgcccgcgtctcccacccccgcctcccccgccgccgcgctcgccctcccccgcctcccccgccgccgcgctcgccctcccccacgacagccgccatgcgccctatctccgccgtgcttgcgcttcctcacccgcgcaatttgcacgcgctccccccgcgacagtcgccacgctcgcacgcactccctctgcaatagctgtcatgcgccctatctccgtcgcatcccgcccgctcgccacgcttgattcctcctttcaatggtgcccacgccgtccaatcccgcccgcggtccttccccacgcggatcccccacccctcctccccaccgccgccgcaacaaatccgcgcacctcgatctgctcaagtgagcgtggctcaacgagaaggccacgtcagatatcctcagcttcgaatcgcccctcgcgttacgtgtccgcgagcagatccagcacctcatacgctcttctccctcccccttcttgaccacgttcctccactcccccccatagctctgggatctggccatggctccctctcctggtgtcgtgtcacccaggaggcggcgctcgatgacttcgtcgacgatggcgttgacgacctggtggtctcgctctaccagatggacctcgatctcacgctcttcctcctccgctcctaactcctcccggagaagatcaagaagtacacgatgcatatctctagggccacggccgaggcgactggtgaagttgcggcaatctgatgcgggaggtggccgacctcatccttagcttccctgacgagacgcccgtcgtcgtcctctctgccatggggaagaccaccaataacctcctcctggccggagagaatgcggtgagctgcggtgcccccaaggcgtccgaaatccctaagctcgctgtcatcaaggacctgcatcttaggacggttgatgagcttggtttagataagtcgattgtttcagggttccacatgcacattcaccgagtcaatcctgcgatcgtgtggcttccatactgggctgttcacctcaccacatttgatggatgttagagagcgatttcagctagggttaatatttgaatatttctgaagagaaatttttgaagtacttctggtggtgctggaacaagttgaaggagaagactgatgatgatattcccatgccagcctatttcaggttcctcgcgctgctcgcattcaagatattttctgctgagcaggtagatgttgctgttctcgaggttggcctaggagggaagtttgatgcaactaatgtggttgttagttctcatgaatgtcatgttgtctcgaaataaagagcttctgtccgcacctaatcgcctaaaatggaaatgtttgactcattgtttaattcggggggaagctgaaggtggtctgatccggtaagagatcttaatctgcattacacttgttggattttgatgtcgcttctgggagtgtttgattgaattctacaccagttctaggaagagaaagcctgaccaagtcatcatctccaggtttgttattgtttggatgcaaaaatcgtcgttagttaacttttttgtgttgaagtaactgtttggttgagaaaattagttgcctatcttctattttctctgttttgttatagcagcaagctgatttgtgtctaatttatagggacgatgttagcgaaagtcaatttaatcaggtgctgaacattgagttgcaacaaatcatcgatggagactgtcaccgcagccagaaaaccacggtctcaatttgaggagcctttccatctatgtttgttagaaggcatataatgcctatttatctcttgtattcgaacatttggcaattaagaaatagaagattacttccccaatatcccttattcctaatctcacctttcacggcttctggtgaacaatcacttgctattaccgactgacatgtccactcctcatatgtgagatattggggttgatatatatgttgttcgtttccatgtaattattgtgtactaacatttattgaataatttttacgccgtaacaacgtacggg

SEQ ID NO: 37829 - DNA, 1717 bp, Zea Mays
ataggaggggttgacacgatcaatttccttgtcaatagttcagctgtcacatttttcttggagtctgtcaatgcctcaagctgctggaagacttttagaaagaaagatcctcacttgttttggactccatgtgctgctcactgtttggacctcatgcttgaggacattgggaaaattggagagttcaagaaatgcatttcccatgctcgccaagtgacaaccttcatatatatgcatggcaagcttcttgatgctacgagggagaagatatggggtgatttagtgagacctgcagttacaaaatttgttacatctttccttactctccagtccatatataagcataagcaatctttgagatgcctctttgttagtgatgactggactaggtccaagctatcaagcatagaagcaggaaagaaggtcacagagatacttctttctacaaacttttggaactcagtccaagattgtattcgagcatcacaaccactcatcgtgttgccagaggttgccgctgccatggatatggcaaaagcaaagatcacttcgggttttgaaggtagagaggcaatgaagaggaagttgcttgccattattaatcggaggtggcaagatcaaatggaggtgaagttgtatggggctgcattgtttttaaatccaaataagttctttgaacttcaaaaaaaggatccaacaaaaagggaggttggtaagctgagggcaacattcaatgaggtgctatggaagatggttgaagattatgaccttcaagctataatcagtaaacaagctgatgagtggaagaagaccaaagttgacatgaatatgtatagaaaggcagctgcactttgggttgaactgcgtgttgaactcctatcagccattgaatattatgcagaagataaagtcaattcagctcaaatttggcggctatactgggcaagtcatcagcgtttctttaggcatatgtgtatgtctgcaaaggtacctgctgtcgtgagattggcaaaagaagccttagcagaagaaaaatgtgtggtgattggtcttcagagcactggagaagctcgaacagaggaagctgttgctaaatatggcattgaattggaagatttcgtttctggtcctagagagcttcttcttaagctggtagaagataattatcctttgcctccaaagcctgattgttttgagcaaggtgaagaaaaagtccaggagtttcagcacaagcggcattatggatctgacatgtccttaaaaggacgagttagtaaacttggaaaaaaggaagacgtgagtgaagatgggggtgatgagtatcctccacattcagatcatgaatcaacagaatctgatgaggacttctatatgtgtcagatttgcaacactgaagaggagaaaaactcattgttttgttgctgtatttgtgcttcacgggttcaccctggttgcctcactccaccttcgactgacatcgtgaatgatgattggtcatgttatggttgcaaggagaaagtaaaaagctacttaaaagaaagagatgcttacttgactgaactctcaaagaggtatgatgctgcattggacagaaagtcaaaaattcttgacataatccgttccttggatttacctagtaatcctttagatgatatcatcgatcagttgatattcataagtcataacctcacactacaagaggacgatgtgaacccaa

SEQ ID NO: 37830 - DNA, 3147 bp, Zea Mays
ccaacagagccgtggctccttctcgctcgctctctttctctcgcgactcccaccgccgcctggcgccgccacactcggccgcactgctcgcctgcccgttcggttgcgccgctcacccgcccgctcagctgcgtcgtcgctgaccgccccgctcggacactccacgtccatcccccgtcggtccgtcgcggcgccgccacaactgctttgcgaatcggcgacctgttgccggcgacaggacgcgggaaggcagccagccatccagcctcttcctacgtctgaatctgagagacgttggctgagatccatctatcttgccgtttcctggcggtgagcaacgctagcgcgcatgtcgtcgcggctgtgcgtgaagaacctgcccaagggcgccgacgagaggcggctgcgggatgtgttctcgcggaagggcgaggtcaccgacgccaaggtcatccgaacaaaggatggcaagagtcggcagtttgcattcattggttacagaaccaatgaagaggcagatgaggcactcaagtatttcaacaatacatacatcgacacttgtaagatcacctgcgaggttgcccgaaaaattggtgaccctgatgctcctcgcccttggagccgccattctttaaagaagtctgaatatggtagtaaagacaagaataatgctggagctgttgatgcaccacctaaaggttccaacgcacaaggaacatcggctcatgctagtggttctaaaggcagtgtagctaatgatcccaagtttctagagttccttgaagctatgcagccccgttctaaagccaagatgtgggcaaatgatacagctgctactcttgacactgctgcaaaagatagtgtagtagccgctaaagaatctaagggacctctaaaaaatgttctgacctctgagaacgattcatcttctgaagacacttctgatgagaaagtggcaaatgatttgtcttccgaaaatgcttcggagcagctaaagacagagaataaacaagacaagaatatgactgatgcagatttcttcaagagtaaagtcaagaaaaattggtcagattctgaatctgatgacgaaggttctgctcaccagtcaaataccaccactgatgatgaagactcgtcagatgaatcacaagattcagataaccagttggcagatactaagggcgatcctgacaagagaaacattgtggacaaggacactcttgtggagaatactgacttgcaagagccggaggatcttgacaacaaagagagtgaagatcttgatggcagaccaagaggaactgaaattcatgaagatcaagaaagggcagatgaaaacggtgctccaattactgatgaaaagaagttggccctggagactggtcgtctatatatctgcaaccttccatatgcaaccagcgaagatgatttagtggagctgtgccgccaatatggtgatgtggaacaggcacatattgttgtcaataaagccacaaagatctcaactggtagaggctatgtgctttttagccttccggactcagcagtcagggcacttgatgaactagataactcaagctttcagggacgagtgttacgtgttaaggctgctaaaccgctaaataagttggagtcttttcatgaaactgctgtggagaaagtaagtctcaagcagaaaaggttggaacaaaagaaagcttctgagatcagtggggatacaagagcatggaacagcttttatatgcgtcaagatactgttgttgaaaacattgcaaggaagaatggtatcagtaagagtgagttactcgatagagaagcagatgatcttgctgttcgtattgctcttggtgagacacacgtcattgcagagactaagaaatttctatcaaggtctggagttaatgttgctgcattggaagaacatgcttctaaacgaaatgagaagttcaaaagaagcaattatgtgatattagtaaagaacttgccatttaattctactgaggaagaactcgcgacactgtttcagaaacatggtagtttggataaaatcattctacctccaacgagagtgtttgccttggtagtctttgttgaagcaactgaagcccaatacgcattcaaaaaactactatatacacgatataacaccggtggatgaggaagtaaaaaacgaagttggcgagcgtattcttactaaagctaatatagatcaaactgtagaaggagtaagcgctgaagagattgatccagatagagtggagtcacgatctgtgtttgtcaagaacttaaatttcaagacaacagatgaatcattgaagcagcatttcagtacaaagctaaagagtggcagtcttaaaagtgcaacggtgaagaagcatgttaagaagggcaagaatgtttcaatgggatttggttttgttgagtttgactctgttgaaactgctaccggtgtgtgcaaggatctacagggaacggttctggatggacatgctttgatcttgcaactgtgtcatgtgaagaaagatggtcaagcggcaaagaagaatggcaaggataaaagttcaacaaaactgctcgtgcgaaatgtagcatttgaagcaactgagaaggacttgaggcagttatttagtccgtttggccagatcaaaagcctcaggttgcctatgaagtttggtagccacagaggttttgcgtttgtggaatacgtcacaaaacaagaggcccagaacgctctacaagccctcgcaagcactcatctctatggtcgacacctggtgattgagcgagcaaaggaaggagagactctcgaagaactgcgggagagaactgccgcacagtttgtggacgaaagcagcggtttccagagcttgtccagtaagaggaaacggagcattctcgtggacgaaggctccgttaaagtttcaagaatagcagagtgattatcttgagcgagcacctgaaatttttgaccaatgttatgcaatagtaccagttcgttagggggggaaatgggttatcttaggttgtttaatgtttgtgtgctgttttagagctgaggaaaagaaatgctgaaaagaatctcacatcttaatgcaagagctgtctaaatgcaagcatatttctacagcctaagacaccaaaaagaaa

SEQ ID NO: 37831 - DNA, 1900 bp, Zea Mays
ctttcttcctcggtggagtacaattggtggccttatatacatgatgtgggcgtcatttttctgattgcctctgaatgcctatatccattttctagggtcatgccttcggataatgaaggagaagatttaggaacacaattgtctcggctgttaggacttatgcaagatgtgtgcactatcaaaagtggatcacacttggactcgaaagatgcatatgttactgtcatgcatgtgaagtttgcaacaaagaaaggtgaacacccattgtgcaaaatcgatagctacatgaaatgtagtgaactaaagtgggttcagcttgaaggcgatcaacagaaacttctcttgttattcgacataaaacgaaggcaagcatattaacgcatttaatgccacactcagattgatgtcatgtccaagttcttcaagctgatgatggtaggtgttctgcttcacttctttctcattgttgaagttgtcccaggttgtattcactcttagaacccctctattatttatttttgaacaaagcttccttttttgttacgtcctaaaatgatatcaagcaagaccattatttctgtgggttgagtaaatctagattttttacttggcatgatgagacaatctggagaatgtataccaattatgttgtatgccttttatatttatctacattaccgagtgtagcatattatttgtttctatcttagtcaattattactcatgctatggtatatttttcttttgcttcttgaaaataatttaacctatgttattgagtcatgttataacatattattcttttgcttcttggaaataatgtaaccatagattgtgcttcaaaattattgtcgtcttgaccatcaccatatgcacaacaggaacaaggtctgctactcagcttgcatcaatgctacaacactagctcttgtatatgctaggattccaatgcgagacactgtcacatcttgtagtgttgtctatttgtgttctactcctttgctccacaggaacctacctaattttcataactttagcagtagtcttatggtaataaaagtcaaacaataataatgtattgtgctagatctgaattacctcgaagacagtgttgggggttccgatgtcactgttgacatcatatccaaatttgtatcattttgtatggtgtgatatatctagaagctctaagaatttttgtcttgtgcaggtcctgcaattaatgaatgatttgaaccaaagtgttcgaaatgttgttctcttgtattgaggttagttaattccatatttgatactatataggcctactttagctgacattttgctttttccacacccatgatgacgggtatgatctctatttctattgatcttgttcaatttctcaatagttacatcctacatttacaacctagagagattgaaaattttttatagcaacatcttaattattaaaactctctgttgtttgctccaccacgagcttccagtgcactttctctctctatctcgtgtgatcaggttgttaagatatgcatctactcatattttaatttttagcagatatgtatctaaattttcttgtgttttaatacaggcttactgtgtgcttgaggttcttcgacctctctatgaatcccctaagataccggcacaaaagataactgttgcgatatgtgtcattgatcaatttcgttgttactaggagtttaaggtaaaagacatatggcatatgatgacttgtggacatgttattaatggaatgtactgttatatatattgagtatctgtttgaattgtaaggccttgtgatatttcctaaagatttgtataagtttgtaatttgttgtgatagtcttagtatttaaattatgcaattgatatgacattattaaaatca

SEQ ID NO: 37832 - DNA, 2937 bp, Zea Mays
cgggataacaatcatcttagtgagtcggacttccaaattcgtattcgcgcgagcgatgagttttaaataatcaccggacgcaccgatgttcggaacgactacgttccgaataatatggaaatttcggaagagcccggatagataaaaataaaaacgacgtcgcactcacgacagacggaacagatgcgatattaaaatcgtgataggcaaaaataattagaccttagtgtccgtcttatttactgatatcacgtgcttaaattcgtactcattgtcgagcggaatataaacacctggggtgttacagccctcccccttaaaagaatctcgtcccgagattcggagcgaaagacttttaagagtagagaagcatgtaaaccacgtccatatcagcggtaatcacaaggcagtcttgagcgaaggcgagtgcctcaggatgtggtttctctagcggacataacatgtattgccttaggccaatttagagatgtccaccaatagagacgatgtctgccagaggaacatataaggttccatgtgtgcagtttgctttttttgatgacactatactatctgagtctgtcgagcgagcggcaaatacacgactttacccaaacagaatcagatgcaccatcttgggtaaaacacacagaaagaggtttaccaacaagtggtcacaatgagttcgtagcacacgagacgggtgtgaatgtcgaataacatcacatttaactcgtggctagctagaaaatccaagtccaagaaaatgatagacttgcaaaatcaccagcgaagggataggcagatgctgccttcgtaaccaatccattttatcaatcactgggcatggctcgacttgatcacacatactggaaaagcacacgtgaggcgttcgaggcatgactagagcgatcattaggtggttatcagtcgatttaacttgatttttttataaacacttccttaagaggggttgtacaaaagtgagtttagacaacttgataaaacgatctctaaactcaacctttgttcattgggcagttacaagttagtaaaaccaacttgttgaactacttttgacattgagtaggtcctctcagtaccatcggtaagccaagggttgaaagctcacatttgctaacaaaaggtcatgcatttgggtagaaatcatttggacatgttattcatccgtttcttcatgcgagatgaattatccacttggttagggaatacatggattaaataggagagcgaatgaacaaactcctgcatctcaacagcaggggaaatccaatctccatttcgagagctaatcagtggttttccaacactaaaaagctccaaggattcacctttacacaaaggacgtaaaggaaacttgtatgtgtgaagtcaccatcaaagtcaagggaaaagagaccacacatgaaagggatatgcccttttaatccaacggagatgatagatgttgcttgatcacttgacaaacaacatagaaattgtttcaaggaagtagtttacggaagataacacatcagtgtagttccacaatggatcatgaccagagaccttgataccagcatgcgtcgagtagcacaatcctgtgtgcgcattcacaggaggctctcagtctcgatgcggcaccataagtccttaatcatgacaccatcaccgaactagcaccaataataaatctcacgtagcaaaaatagattgtgccaagataacgcattgacatagtctcataatggattacaactactaaccatgataccagcgcgtgccgagcagcacaaccgtgtgtgcgcacacacagagggccctcggtttcgtcacgacaccacaggttttagccataatgtcattaccagacgtaaccaataagaaatctcgcgcgatacaaatgaattgaacaagggtgacaatatacaaggagatactccacctgtaagaatggttacaagtagagagccaaatagattatggcccaaggaaatgaacaaaacatggccataacctaaacttgatgaaaggagtacgatgggagactgttaattcagccccaagcatatttctatgcccatcatagagattacaaggtcaaggatgagtatctgattagatacggaggtaaaacaatcataagattaagttggtaggccttcaatagagatggggaatccaaaggcatcaaactttaagaaaatggtcggacaagcttttcctaggttaggttaataaggcgacaagatgatccacaaggagaggccgaatacaatagggacctcaacctgcatcaactgaacaagggaatggttctaaaaggagacatgacttgagatccttttttttaagcttaggtacattttatgtccaataaggaaattgtctaagcattcatttacatgattttagtcaaggagggataatggtaaattcaaatttgggtctaggtttaccagataagaacgtggcctaattttgggtttaggcaaacaagtcactaaccttctatcgacacatcaagcacaagatcaaacaccatataagaccttaataggttacctaaagaatggaggacacctatttcatcgaagttcataattcagcattacaccacattatctacaatcaatggttactggaataaagatgagagaagcattttgggtgtataggcgacaaacatgatgcaacaatcaggatgcatgctcgtcctatacgtcctcactgattttgccaacataatgtggtaataacgttctatatcggtggcatacgttctctctcggtattttgctagtcgtcagctacacatacgtttttcgaggttagtgtacctgcagaaaatccatcacagcccaatttccaatgatgcagttcacacatgacattttatcacagtttatactccatatattgctatatggaggccag

SEQ ID NO: 37833 - DNA, 2812 bp, Zea Mays
gattggtgaaacttttttcggctggagaagagggtgctttgcttaaagttcttcaagattttgcctgtttatgaggcatattgaatattgcatgcatcgggttaacatgttgcggcattttggtgtcagaccaattcttgtatttgatggaggccttctgccaataaagagctatcaagaggggaagcgagcaaggtcaagaaaggaaaaccttgagcgtgccagggaacatgaggctgctgggaactcacgtgctgcttttgagtgctatcagaaggctgttgacattacacctagaattgcttctgaactgattgaggtactgaagaaagaaaatgttaattatattgttgcaccttatgaagcagatgcgcaaatgacattcttatctgttaataaacttgttgatgctgtgatcactgaggattcagatttgataccatttggttgttctagaattattttcaaaatggacaaatttgggcaaggtgttgaatttcagattacacgcctagagcaaaacagagagcttgactttaatggattcacaagacagatgttacttgagatgtgtattttaagtggctgtgactatctcccctcattgccaggaatgggcgttaaacgagctcatgcactcatccaaaagctgaagtgtcacgaaaaggtgatcaagcacctgaggtatggtgctgtttctgttccacctcaatatgaagaggacttcaagaaagcaatctgggcatttaagttccaaagggtctacgatcctgctacagaagatattattcatttgtcaagtgtgcctcaaagcctcattgaagatttggaatttttaggcccatggttaccacagaatattgccaaaggcattgctctagggaacattgatccactcacgaaggaaccattcgagatcaatccagagtgcagtgcaccttctgttcataaggtttgtccaaccagagagcctattgcaccttcaaatgggaggaagaaactagatttgcctgtgcagaaaaatatattgaccaactatttctgcttagcatcccttgaggcaaaacggaaattcagggcgcctaaagtaacacataagcaacaaatattgaatgaagctttgcctagccctcaagctcaaggctctgctacctctgattcagttgaagatactaggttgccaacagatcgcattcaagcttctcaatgtagttctgagcatttaagctctgaacctcctcaaaatgacccaatcagtgttggctctcagtgtagttctgagcgtttcagctgtgagtaccccctcgatgattcagccaacatttcacaatgtagttcacttgatggtggtagtgatcctccttacaaggatactggcaataaagacagaaaggttgaggctggctacgacaacaaaaatagaatacctacaagtccttgcataatgggaaatttaccctggacatcagagccatttttagttccccataacgtgggaccatctataccagttcaacattatactgaaagcactgtggcctctaataataatggcattaccgtaagttcatacttcaaaacagcaaacaagagaatttgcacagatcaaggagaccagttagatgatgactatgatgttagtactggtaatctttgtggagatcaactgaggaaatctggcatgttgaagagaagaaagctttctggcatccaaaagtttgaagatgaaactttacagccgattcattctgacgatagtccaccattcgttgatgaagaaacttctgcaggtcaagatacagatgatcctgacgatacaaatataagaactgaaggaagatttggatgcaatgtttcccatgtgaatacatacagtggaattgcagaaaaatcaatggataagtttgctgcattgatatcatctttcagataccccggcccccgtgccagtggccttcgtgctcctttaaaggatgtgaaaaacacactttctgtgagatctattcttaaagctccagaaaaagacacattcagacgcacagcaaagaaaacaggtctaggccccccttcaaaaagcagatatacaagtgatgataagggaagtgctgccagcccccctgatattagcgcatttgcttataggcctatgaaaactgttgcttctgaccaaggcaaaaccacagtcggacgtttgaatgggagcagattcagagagaccgcaccgaaagcaactggagggacttctaggagccagttcaaatagaaccagtgccgttggctctctaaatgctgtggtgaaaggaaaacaacccctgatcagagcatttccgtttctgagcatcgttgaagatagttggcattgggcccccggaggacctcgaggggctgcagaggttcctttgcttcagagcccctctgtacctattcatcaacgtggaccctggaggaccgttactgcctgctagtagcagctcgttattttgagctcatcttttgtgctgctcgtcagctcgtgttcaaaccaagcctactgctcatttgctttccctgcagcagcagcagcccctactgttgcatcgaagaaagcaatctcattagcgactgcgttgaactgtagttaagatacttcttgtccatatccttgaggcatgattcgaacggcgtcattgtctcattgacttgtctttatcattcctgaaagataaaagtgaacattgaaatcaaagaaaaaaaaacagtttgtacggtaaagtttgagtttaaaattcattttcaaggtaggcaactggacacactctgagctatccaaagg

SEQ ID NO: 37834 - DNA, 3103 bp, Zea Mays
  misc_feature (1)..(2): n is a, c, g, or t
nntgctcacttctcatgacttcactccgcactaatgttgagctcgagggtgaagcaggggagccttcttaccgtcgtttagttctccgtctggtttctcatgtcatcaggctatacagctcttcacttgttactgaaagtgagttacccgtcaggacttaccattatggcatcagatacttgtccttgaaattttaaggggtttttgtgttgaagcctgcactctgcgcttgctgtttcagacatttgacttgaatcctgtgaataccaatgtcgtggagaacatagttagagcacttgctttggttgtagcttcaattcaggtggtattggttcctttgcttcaaaagaatatcatccttattaattacatgtttggttcccttgcttcaaaagaatatcatccttattaattacatgtttgcttgaactcattttttgataattttccattgctgttcctttaactagaaatgtttctcttataggcttcagattcaagcgaagaaactctagccgctgttggtgggatgttcagtagtaaagctaaagggatcgagtggagtatggaccatgatgcatcaaatgctgctgttttggttgctagtgaagcacatactatcactctggcccttgaaggtctcttaggcgtagttttcactattgccactttgactgatgaagctctagatgttggtgagcttgaatcacctaaatgtgaatcaaatagtatggaatgtagtggacagttggcccttctttgtatggctttggtcaattcaacatggttaaccatccttgactctttgtcatttattttgacgaggtcacagggggaagctataatattagagatattgaaaggataccaagcattcactcaggcactaagaacactttttaatgttgcacatcgattacacaatgtccttggtccttcttgggttctggtattggagacactttcagcacttgatagagctattcattctccacatgcttcaactcaggaagtatcagcttctgtttcaaaactttcaagagatacatcgggacagtacagtgatttccatattctctcttctttaaattctcagttgtttgaaagttcagccttgatgaacatagctgcggtgaagtcacttctgtctgcattgcaccaattgtcaagtcagcacatatctggaagctctcaattgtctgtccagcagattgggagcatttcattttcagtggagcgcatgacaacgattcttgccaataatctgcatcgagttgaaccgatatgggatcaaattgctgctcatcatcttgagcttgcaaattgctctaacccacaattatgtaatatggcactgaactcattggatcaatcaatttgtttggtagcgggttctgaaaaatttcagggcatcagcgcagcacctcatcagtttccagaaagccatttggtcaaagaaagtgaaactgtatcatttgagtatgcagttttatctccattgatgatcctctattcctccaacaagaacgttgatgtacaaatgggtgcattaaagattcttttgcatgttcttgagagacatggagaaaagttatcatatagctggcccagcattcttcatatgttaaggatggttactgatgcatcagaaaaagacctcatctccttaggctttcagagcattcgtgtaataatgaatgaaggactggcaacaatccctgtacaatgccttgatgaatgcattttggtaactggagcatatggtactcagaaaactgatataaacataagtttaacatcagttggacttttgtggactgctactgattttattgtgaagggattagtcagcaagcctattgagcaagctagtcacatgaatgatgatgttcaatcatgtgaaatgactgaagaggcaaacagcaagcaagttcctccaaaactagttgattatagtatacttttcttttcagttttctctgtcctccagaaattgggttcagatgatcgtcctgaggttcgaaattcagctgttaggactctcttccagactctcagcatccatggccaaaagctttctaaaagtatgtgggaggattgtctttggttatatgttttccctatgttagagcatgtttcccacttggcatctacctcatctcgagatgagtggcaagggaaggaacttggaactcgggctggcaaagctgttcatatgcttatccatcacagtcgaaatacagcacaaaagcaatgggatgaaaccattgttcttgtacttggtggtattgcacggcttttgcgttcttttttctcttacctccaacaactgagaaaattttcttctggttgggtgcttttactcagttttataaaaaatagcatcttaaacggtagcaaggaggttgctattgctgccatcaattgcttgcagacgtttgtcggcgcaaactgtccaaagggcaatttggaatcctcgtatgttaaatctgttcttgatatttatgaacttgttcttcaaacttcatctaattttaagaatgactccactgataaagtgaagcaagaggttctccgtggtcttggtgatctttatgtccaagcacaatctctgtttactggtgacatgtatctaaggcttatggcaattatgcatctgatgatcaagactaccttgaatcctactgattatgatagtgaactgggtagtattcctgctgtacaacgaggtatattggaaatcattcctatgctacgcccaacagttgtattgtctcccatgtggacacatctgcttcttgagctgctatgctatcttaatgggcacgaaggccccctccagaaaaataatgaacaaacgcccgatcataattctcaagcactggtagacggtgcaaagcatgctcttgttgaaagaagcaatctcaatggcgggggtacaaaactggatatggtgggatctggttggggcattctatttgtagaaaaacttgtaccaatcattgccaaccttttcttggaggctccaccaaatgaaaggtttagtgtctctcctgaagtcattcaaggtcttggaaggtatttgctttttatgatttatatc

SEQ ID NO: 37835 - DNA, 1610 bp, Zea Mays
atgaccagggccgccgcccttgttgcttcccgcctaaacaaaaccaaacacaagccaagcctgaagcctgagcgcaaggagccaggaggaaggaagcatggtggcgagaaggagacggttaggccaaccgtttgtatcctccagcttcacgcacctctccccccactctactcttggcgccaaagcaaagccgttagattattggtcaccatctcgaacccaacccgcgccgcgctctcggtccctccccaccatttatccttcccgaagaaaacaatcgcgccatgccaatgcgcctcgccgcgccgcgccgcaccgccctccccccacgtccggcattgcgtctcagcgatgcggccgccttcctcctcctcctcctcttcgtcgtctccagccgcggttccggagcccggcggccggatgtccgcgctcacgatgcgcgcggtggcgcggatgtcgagggcgcggtggttcgtcttcctgcgccgggtgtaccagtaccagaacggcccgaggtctgacctgggctccaacccgttcaactcgcccggctggctcgcgctcgagctcggcgtgatcgtcgcgcaggtggtcctgaccaccgccgtcgtcgcaacatccgccgcggagcgacccgcgtggccgctccggctgtgggtcgcggcctacaacgtcggcaacgtgctcagcctacccctcctatactggcggcaccgccattcctcctcctcctcctccgccggcggcggccggggcgacctcgagatgcacggcgccaatgacgctccggggaacaggtcgtatctgatgaacaaggcgcgggcgttcctggagctcttcttcgcgatgtggttcgtgatgggcaacgtgtgggtgttcgacgcgcggctggggtcgttccagcgcgcgccgaggctgtacgcgctctgcgtcagcctgctggcctggaacgccgtcgtctactcgctcccgttcctcctcttcctcctgctctgctgcttcgtgcccgcggtcggctacgcgctcggctacaacatgaactcggcctccgtcggccgcggcgcctccgacgagcagctcgccgcgctgccgcggtggcggttcaaggagcccgacgtggcaagggaccgggagcgcgatgaccagtacggggagaaggaggaggttcggcagctgccgtgcacgcacgtgttccacctcaagtgcgtggacaggtggctcaggatcatctcctcttgccctctctgcaagcaagagctcaagtgactgatgcctactccgctcctacagagagatgtgggtgtattctccctcccttactctgactgcgcctgccgatcagccacacctactacatatataccacgacgaccgccggacgatgcgtgcgtcgcacctctcgcgaggatctctcggcgggcccgtgctgacctctagtagacgctgacaaatgatgtgcagcaggcggcaggtgaattcggtaccttttttttttgtctagactagatcaaatgggaattgtgtaaacaaaaaggtctctttttttttatgtatgtaacaatgtgttgtgcgcccttgcttcattcaagactgaatgcatacttttcttt

SEQ ID NO: 37836 - DNA, 2132 bp, Zea Mays
atgaccaaaatttccctcctaccttgtgctcgaatttggatgcctctctctctctcccatgttgcgtctgccctgctcttgttgccgtttgcgcacctggcagcggcgacgcaggtgggcgacgcgtgctcctcctccagcggcggtggctccggcctgcactgcagcccctgtggcgccggcggggcagcatctgcacgtgcgccagccccgtggacccggccacccacggcacgggcctccccttcaacaactacccgtggctcaccacccacaactcctacgctctcgccggcgccgcctccgccaccggctccgcgctcatcaccgagaccaaccaggaggacaccgtcactgcgcagctcaaggtaacccaaccagttcccgtttcatccattcatttgccgcctggcctctccactgctgaggccagctcaggtcgtctaaccgcttccgccttccgctccgacgccggcgacgctgggaatggaaacggcatcgagttttcctttggttgaggaatcaacgacgtgtgggggtactactgaaaagctagacaggagaggtgttgacagcaacataaataaagcagataaaaggaaaagcgtatcttatatcttttgcaagtgatcgtgtacacatgtagcagtagtagataggaaatccagtcctcaactatctcaagcatggtgtgctgatataggccctaattatcagccacgtttcggttgccagatgctgttgatgcaggggaaggagagatgccaccagccgtccagccagccctcccctttcgtgactgtgaccgccactatggccacgacggatggtaattatcttgtcttattaaccgagacttggatccattttcatcacaaaggagcacagcagcacaggtgtagtatgaaatatgaatgcgatgttcatttatttctgatgatacggcttgtttgcgccggagacgcaaggttggcatgggaaggagatctggagctgcacaggtgtaacatccagaaagtggcagctgagccagttgagttcaatcaagagattaggagggaccattgtttggagccggcccctttggtgaggggaggtaggcagggcaggtggtgggagggccatggggggggggggttcagcactgatgtccatgatgttgtttgagccactccatccatccatcgccgtgtaccagactagaatcagtccacacccacaaatgtgatatctgtctctggagccctgcctatctacggagcggatttggggagagacaaaaactgacttggcttccacattttgatggagactttgtttcagtagcgagttttttttagcgagcacaggctatgctatgaaatcgagagataggagtatagaagcaaacagaagcccagttcgtagcagcagagcacaacgcctaaagtgatgtttattatccttgattgatggcattgaagacagagggtgacacaaagggttcaaagtcttctgatcagaatggaaagaaacagatgttacccaatggtgaacttggatcatcaaggactaagtacaacaacatggagccagatgttgttgatttctttggggaatgtatgaatagtccccgaaatggtcgtactccgcttgcaaatgagatatatgagcaaatggttgcagagaaggaaagagagctagaagaaggagaagcacaaaagtcaccctccaagattgttgctgatagtctcagccagatcagtcgctcatccaccttccttctaaacattggtgtctgtttgaatgcttcaaacctttgtggtggaacctttgtatgtttgaacctctattgtggaagaactagtgtgctggaattgtgtatgacttgtgatgagaatgttgtgtatgatggcttttatgtgtattatgattctgtgagctatcatgagagctctgtgtatcatgagagctcagtgtatgattctgcgtcactgttagaagagttaccaagaagtaagcatgagagtacttccatgccaggaaagcagaaattgctgcaaaaacaggggaaaagcgagttgataggcaacatgacacatatacttggtaacacaaagcttaggatgatgatattcattctacttgcctga

SEQ ID NO: 37837 - DNA, 487 bp, Zea Mays
attgaagcctaggcaaggtacttgtatttggatctggcataattacaatcatcctgtcatcatcagtttcactcctctggctgctccttgtgtgtgtgtgtccactaatgcgttcagcattgcaactgctgctgccaaatgctgagcattcgttgccaacatagatggtcactctgataaactgtcaccttcaatgggaggatgctcaggttttgagaccgaacctatatgtaccaccaaaacaatatcctaattgcaaggaaggtgaccttcctctcatcatcgcgattgactagcaaccaatgaccctgataggtgttatgcaagtgtagggcgacatcactaatgctcggacaacggatgtggcatttcgatggatgcaaagcagacttggttgtttgcgatggaggcttcggataaaatttggtggctggtggatctgcttaagaatcaaaagtcagacaaggtggacatcaccatccaaccg

SEQ ID NO: 37838 - DNA, 2430 bp, Zea Mays
cacacacaccccttgcatgtaccccacccaccacggcggcataagtatctccgccggctacgcgcgatccaggcccggccgcgtgcgtgcgtgcgtgcgacgactgcacccatacacacatatacgcgctctggctggctgcctgcctggcttgcggagctccgtttcggccggccatctctcgctacgctacgagcgcgcgcggcccccgcgcccgtgtcttcccgctgtcgaccgtcgtgttgatcgtacatgcagctgctagtagcgaactatagttgcagaccgcatcagtgcgtgacaagaggatatatattatcagacacgcacgcgatcgcgcggagatgaaccagtgcgtgccgagctgggatctggtggacgacccgacggcggcggtagctggcggcggaggcggcctaaaccatcaggtctcgacgaccgggggcgcgcaccggggcctgctcctgcaggcgtcagctggaggagcaggcggcgggggcgcgttcgctcccgtcgtcgtgcccatgtcgaaccagtactacgaggtggcggagctgacgtgggagaagggcaacatctcctcccacggcctgctcaaccgcccggcgcacaataagtacccgcccgccgcggcgccgtcgtcggctcagctgcatgccatagcaggaggaggcggccgcggcggcgggtcgccatccggggaccgcgagacgctcgaggcggtggtcggcgaggcggccgcgcggtcgcacttcctctcgcagccggcgccgccgtggctgatcggcgccgacgccgtggcgcgggccgcggcggacgcgctagtgccgtgcgccgcaagggcgggcgagtccgctgcagacggcggagaagcgggcgcctcgaggaggaagcggccgcgcgtggtcggcgacgacagtctggtggtgtgcgccagccaggggagcaccgcgcctcgccgccgcggcgagagcgcgctgctcacgcagctggacgcctgcggcaccgaggccgacgacgtgtgcggcttcagaacgaccacaaccaacaactccacgtccatggaccgtgacgacaaaggctccccggatactgagaacaccagcatcggcggaggggccagtgattcgcgctgtttcagccgtcgctcacagaaacgaagggacaggatcaaccagaagatgaaaacgctgcagaagctcgtcccgaactcgaacaagacagacaaggcgtcgatgctggacgaggtgatcgactacctgaagcagctgcaggcgcaggtgcagctgatgagccggatgggaagcatgatgatgcccatggcgatgccgcagctccagatgtcgatgatggcccagatggcacagatggcgcagatggcgcagatggcccagatgaacatgggctccctcggccagccgggctacgcaggcctcacgccgcccatgatgcacccgccccccttcgtccccgtgtcctgggacaccaccgccaccgccaccacctccctcgccccgcaggccggcagcggcacggtgccagcggacgccttctccgccttcctagcttgccaagcgcagcagaacgggcagcaaccgggtagcatggaggcgtacaatagaatggtggcgctgtaccagaagatgaaccaaacgcagcagagcgcgcccagcaacccgtccaagcagtgagcatgacgtacgtacagctgctttcttgtacattgtttgttcagttttgtttagatttttttggctcattttatcgcatttgttcagattctttcctctcaattgatgaggcctggaactgtgtaacagagtctatgacagctggggcccgcgagcaggaggtggcgcatgcagtcttctgcagagaggagagagaaatcgtggaaaaagggagtgcaggtacacggtgtctgttttgcggagacagatgtggaggctgctggagagcgaaatagtgactcagagcgtgtataatgcggatgcggagtgggatggggagtgtagctggagttggtcccagaagcaccggaagtcgaacaggtgatgaaggcgatgtcacgcaagtagtagtagtgtgtacggtactaaagactttatttatttctgctggcaaatgagtgcagattagataaatcaacccaagcacgattgaagaccattatctgattgcttaacttgtcaatcattaatcctacatctcaatttttagggaaccgtttgtctgcctagaatattgtcacacccggcttttagaagaaacacaatacatatgtatgtgttcccagtaaattactcacacatactacgacatcgttaatgataatattacactataccggcttactagagcatgcaaaacccacataaatgatatatatcttaagagatatcaagtgggtaagtgtaaaaaataccaaag

SEQ ID NO: 37839 - DNA, 2177 bp, Zea Mays
cggggatttgcagggagtcctctcggtgtcaggatgctggtgaagctatgggtgattatgctgtagagtatagacagtgtaatcactttgtcagaaatgccttctgcatccaagtccaaggcaaaagaaagatcagctgcaaaagttgcaaaagagcaacccaaggttgctgcaaagccaatgggaaatgctacacttgcaagttcttataacaacctgtctggaaagttccatgttctggaaccatcaagctctttgttgggtagccaaggcatcgataaattcaggaatacagatgaaatagatgagcattctcgcagctcccatggtacaggggatttcgattgtgcctccaacaatggtagctgttctggtgactcagaggatacaaaggaaaaatcaaccagcactgcgtcccgagtagactctgttcctggatgtgatattgataaacgtgagaagattagacagaaaaatgagaagaagcatcaaagacagaaggagaggcgtgcccaagagttacacgagcgttgtaagggatacattatgtccagaaagttggaagcacttgcgcagaagcttgttgcgatgggtttctcagcagatcaagcaacgatggctcttatacaaaatgagggttgcgttgaggagtctgttacctggctctgcaactttgatgccagtgaggaagctaaacaacaacttgtagctgatcaacagtctggagttaacttgaagattgatatagctgatgagctttcaaagattgtgagcttggaggcaaaatataagtgtacaaagcaagaagttgaaagggcagttgtttcctgtgaaggtgatctagaaagggccgaggaggccttgaagacacacaagcaagaatcaactgcaatcccaccaaagcctgaggggtctggctattcaagtggcttgcctaataagccgcaagttgtacttgcacagaaccctgcaaggcctcaaacaaatggattatcatcagtaggatctcatcagatgagaagagaggagaaggacataaactataagcttttgatgaatggtagtggtccaaaggaacctgcaattaaaggttttcagccactggcaacaccgattaagccagatttggtccgtcagcaatttgttcaacctgagaagagacgtctcaatcccaactcgaatccatcagttccttctgtggcatcgtctcctttgcctgttgcagtgccacaagtgaagccagacatgcggcatgtggcagggaccaatgaggtgaaaagtttgatgcccaatggaagcttgcgagagtctgtgattgtaatgcagcgtcctcaatctgcaggtaccaaacagagcctaccatccactagccatagtatgtttgtgtcagaaccatctgcaagggattggtacttaaatggcgtgtcaggtgtggatatgatgttgaatgggggcttaggtcatggactaaggaatatgagtttggacagtgctagttctgccaggtcgtttgggcatgcaaaccatcaacaaaatttggtttctaatcctatagagctggctgccaatggttggggtggcacctggagttctggaggtacatcatcttcccgttctgtggtgtcatcactcggggcatttagagggtggaatgcatccgagtcctctgcattgcctcattctgattggagaaccaacggggcagcaccttatgactacacctcagtagactggagcgtcgacacaacactattgaacccagcagcaaagagcgagctgctgtcggacacatggtcaaccatgttcatgggtggcagatcaacaaggacacctgggaacctcagtggtgcaggcatcgctgggttgtatgacagtaaccgtccaatggatcctgctccttcggctcgtccatatgagtggcctactttctgcaggggaggatcttcctagtttccccaaccctgtaggcaagaggccattgaataaaaaaagtaaaagctgtcatttgtttcttttcttgttttggtctcagttgcagttggttgaaaaagttttactttgtctatcgaaccgagcttgtgtacccttgactgttggccgagataagtcatctttctgtgaaatcgttgtgcatgaaaaatgaaggaagagaactgaatctatcttggctgaaatgc

SEQ ID NO: 37840 - DNA, 289 bp, Zea Mays
gcacgtaccctcctggcaaaggaccgcctaaaaagggtggtgtgctctcgggtggcgcggacctgttcatgaagtggaggatccgtgggaatggtagacatgcaaggtttacgagaaacatatgtcgtgtggttagagatcctcagctgagtaaatcgattcggatcgccgttatatccccggagagtggagacttgatctccgacctacaacctaagtcaggatgtgaacattatgaataaaaatgatgttgtattaatgtgatggtgaaattagactagatgcaaac

SEQ ID NO: 37841 - DNA, 4382 bp, Zea Mays
caagattatatatcttgatcatccatgcgactttcttttgaatgtagaaatcgagccgttcaggaattcagggttttcccctgccctccggtccccgcgcgtactccccgctccgtgctccgcaactccctcttttcccgccgccacgactcgccgtgcgcgccgcatcgccgccgcggaactcgcgcacaacagaccagatattttcccggccgtgcgcacctctcgtcgagaggcgtcgctctcttcctcctctacttcgtcgccctttactgtttcggagccggggcgggttgtcctaggagtcggtttcgttccaagatttcccttctccttccgttcaattcgttttgggtttgtgccgtgcgctgcgcccaatctctacgggccaaggcatccgtggtccgattgggtcagtcttcgtctttctccgagtatctatgggggttcggtcgaatccccgtccgcaacactaagccctgtcctacccgtgatgcgatgcgcggcgaggccggcaatgactgtggtggcggggatacccaagtcctggacggcgggacacctccgttaggttctcctccgagtgatggcgatgagacacaacgcgaggcggatgattgggccctgtacgacgaaacacagcctctggatgatgctgagacccagttaatagacgaggtggaggagggtgtggctggcgattggacggagacacagttgatggatagtggcaacgaggatggtggctgtggcgatgaggatcatggcaatgacggtgacccagtgaagacgaagcaggtggaagatgaagaaggaggcgacgttggtggtggcgtggatgataatgccaacaaatggaccaagacccagttggatgaaaaatgtgaggtggatggagtgaacaacattgttggagacatggttgagacccagttggttgaggaacctgaggaggatgccgacaaggatggattaaatggtcatggtgaacatgatcttggtgagtgggggaagacccagttggttgaagactctgacgaagatataggtgactatgagttgagtgatggcaccgttgtcctaagtgacaatgagagcctctcaggggatgagagggttgtgaagtcaggaatggataaaagggatgtgaagttcggaatggaaggaagaatcgaggggttaactggagagataaggaagcatgatgataataatttggtggattctgatgcatcgacggacgaggagggtgacacagattcagaaccatgataaaggtggagctaaaagcagagacaagtgctcaacggcaaaaaagctttttgctgacacaacagctgaggatggagaaaagaacagcagatgtcttgctggattaagctacgctggatcacaagagcctggtgatctgtcacaagcaaatgcttttgatgttgtggacaggttgatttcaataaattgtggattatcatctcaagaaaccatcccaaataaattggaaatagcaaagccacatgcttcaagtaagaggggtactttaatgttggctgagaaggttgaccttggtagaagttcaaatgggaaggccgaaatatttgaatttgtggataaccttgaagatgagggaggaggtgactttttcagtaaaaacagagacatcttgttgccaaaaccaattggtagaggtgaaccaaagagtcattataccagagcaaagaaaccttccacaaaaaaatcatgtggagaaaataaaataggggaagccatgaacaaaagaaattccaaactacctgggaggttggaaactattcctttatcacattcaagactattcaaaagtgacgtaaagagtaagcaggcttatggaagcaggactaagaaaaaccttttgaaggacttagataacctatcaaatgccaaatcgttggaagaacaggaaagggctgatgtagctttgaatgatgttggtccagatactcaaatggctgttgaagctatggaggccctggtacaatgttcacctgctaaaagtttatctgctgaagatcaacctctgctcaatagagatacgatggctgagaagtctggaatagctaaaagtcatttgaagaatggttctcagagaactagcaacatccaggaaggtgtcacaacacgttctaagagaagaaaagtacctgacttcagtaccaagcctcagaaagaaagactaagaggatcaaaggtgcaagaaagttctgagcctatagtaaaagtgaagcataagcaaacaaagtctgtacctgagaaaagcaaagtttcaaaggaatttattgatgaaaataagtaccacgggacacctattgctcaccgaactaggcattgtggtaggaatgacccttctgcatttatcgagttctctaataaacacttgaggagaggcaagaaattgaccggtgacagctccactattcagcaagtgcaaaataaccgaattgcaattgaatctggtttgagttattttgaaaaagaaagcacagagcagatttgtacaaataatgatcaagatcttcagcaatctaaggatggaagcactcaacggaccagtgtaaataatgctcaaaaccttgaaacacacagagttgaaccaacaactgatgttacctgcagagatatcccattgcatcccaaacggcgaagaacgcctacaaaattgatactgtcaacttctgcagcagctgcaaatcatgaaataccatcagaagtggcaagaccatacaagaaaaggcggatttttgtaagaagtgtttctgacctgctaaagtatgcaaagagggaaccttcccatgggagatcagcttctatgctgtccagcatattagagaagtcattagctgcttctcctgtacttaatttttctgtatgtggtgacagcaaaacttcttctgatgtcattagctctgcacagagaccgaaggaatcctcccatgacgaggatacaagtaaatcaccagaaaacaatcctcaagttccaaatcgttccatgaaaacaccgtcaaaagtggttaatgaattgtcacccacttttagtcctgcgaatccatcaaaaggctcaagtagaaacttgtcaaaagcttctgttgcgagagaattgctgaagctagatcctgaaaatgtactaccaaatcagcagagaaaagattctagaagaaggaaggatatggcccatgtcagtattctattaagccatcatttggatgatgatgttgtcaagcgtcagaagaagatcttggcacgcttacgaggttctgaagcattttcaatggccgatgcaacacactttgttgcagatagattctgccgcacaaagaacatgctagaagcaataactattggcaagccaatagttacatcgatgtggcttgaaaattgtggagaagcaggttgttttattgatgagaggaagtatattctgagggatgaaaagaaggaaaaagagataggtttcagcatgcctatatcactggcctcagcttgcaatcatcctcttctgctgggaaaacgagtttttgtaacatcaaatgtgaaaccaagtcaagcagtggtgactagcttggtcaaagcatcatcggggcagccactggagagggtaggacggtccataatgaatgagaaggaagtagctccggacctactggttatctcatgtgaagaagactaccaaacctgtgcaccgctgctcgagaaaggtgcgagtgttttcagcgtggagtttctgctaaacggtatcgtcattcagaagctggagtacgagaggcaccgccttttcttggaccgagtcaaacagacccgctcgtcgcggtggttgaaggacaccgtgcaggaccggtttgtccctgtacccaagcgtcgccgtagataggcgaacaggttcggtgcatagtttttctaactaaatcatgcttctgtttcccgagccttagcagctcaagaccactgtatatgtatgtaagccatatgctaaagtattcctgtgctgccatgtgctgggtgattgagtaatgcgggcctaaccttttgttttcctcgtctgtaaattttgtagtgtaggtgttcatatgtgttgtagcctgttttcgcccccttctcagctgaacctgggtggtaagtaattagccagagactgttgagtgtttgatgaaatgttatgtattctgttgttttggagatgtcagatggctagagctggattgtgtgaacttgaggtgccgtttggttcacatatttgtaacgtaatgggtaacggataacgttaaattatgtttgttttagtctaaccgtaatcagataccacactaaaatttaataccagctattcaaatttgttaccgacagtaatcgag

SEQ ID NO: 37842 - DNA, 1258 bp, Zea Mays
ggtgaagcgaggggttggctcgtgtattttcgcaaatatctcctatcccttttctccctcccgcgatctcctccgctcgacgcctgtaccccgccgtcccgcgtccccgctccagctcgaaaccctagacctgtgcggctgtccctattctctccaacggaaagatgtactcggaccagatctccaccgggcgcaagcgctccatccacgaccgccttgacggcgacctccccgccggcacgggcgccggcggccgtgttcgtcacacggtgtccaagaggcaacggcagatagatgaaaaatggaagcatgatctgtatcgggaagacgatgaaccagcttcaaatccgaaggatttgcgattgaagcttcagaggcgaagttcacaacaaagctttaccagcacaaggagttctggtgtgcgtgatttacgtgagaagctatctggtataatgcacccacagccatcaaatgctgatccaaagcccaagccaaagccagtatcagaggttgttaacatctcaaggcgtcaaactgctgatgaaatgcctgcacgtcaaagcaagagagcaccaaaacagacttcattgaagaagacatctcagccaaaggttgaaagtccactcagcagtttcctgagttcccttgggcttgagaagtactcgattaccttccaggcagaggaggttgacatggcagccctaaggcacatgacggagagtgatctgaaagctttgggcattccaatgggtcctcggaagaagattatccttgccttggagccaagagcataagggaatggcaagtgtaggaaggtgggagggatttgctaggcatgctcatgtgcaagttcgataaaactctgtaaccacatcttggaaagggtaacaacgacaatggtttgtgggcttcttgtaacacgtatgctgccctgttgagcatgttcaacgaagtttaggatgttagaaggcaggccacgccgtgtattgatgcaacttctatttctgtgttgattaaatggtgctgtatacatgttgggggtctttgggttggtcttagaatgctatatcctataactacacttttcttatccacagggtatgctatatttgaagctaggtggtttggggatatgcacatcagcaatggttgttctgggccctggtttcagtgtattgggctcttgtttaagactcggcatacttgctttggattttggtttatttgcttcaagttagaatgaaaagtttgtgagggt
